United States Patent Application Publication US 2024/0301379 A1 - sequence listing, part 7

SEQ ID NO: 9556 - protein, 1398 aa, unidentified
  REGION 1..1398: note = Description of Unknown: Cas Enzyme sequence
MKKILGLDLGTTSIGWALVNEKENDREKSEIIRLGVRVNPLTVDEKTNFEKGKSITTNADRRMKRSMHRNLQRYKLRRKNLIECLLEHHIISDDTPLFELGNKSTFQTYRARAKAATEEISLEDFARVLLMINKKRGYKSSRKVKDGEEGELIDGMEIAKRLYEENLTPGQLLLDLYNKGKRNRPTFYRSDLQAEFDKIWEAQAKYYPNILTDDFKSSVRGFNKTQTSGAFYGVHQIYTAKNSGKEGYAQSLAWRTEALTHQLGIEEVAYVLADINGAINNSSKRLAMISDRSKELYFNHQTIGQYLMHRLDENPNNSLTNIIFYRQDYMDEFEAIWEKQSQYHSELTPELKREIRDIIIFYQRDLKSCKNLVSYCELEHTEREITIEGKKKTILTGCKVCPKSSLLFQDFKIWQILNNLQVSVIGRQRKRIKKDKSQLSLFDDAETGALNRFLTQEEKDILYKELSIKEKMTKRDILKLLFDNHNSLDLNYKEVEGNRTMAALFKAYQDIISLTGNGEYDFSKMPADDVINVTTEIFKGLGYKTDFLAFNPLLEGKVLEQQPAYRLWHLLYSYTGDKSSTGNDALLMRIQELCGFEKEYATVLANVSLALDYGSLSAKAIRKILPHMMKGYEYSEACKIAGYNHSARSITKEELANKEYKSHLDEIKRNSLRNPVVEKILNQMINVINEIVKTYGKPDEIRIEMARELKKSREERELLDAAIRRNTAESEKLRQELEEEFGIQHVTKNDILRYKLYNELKLNGYKTLYSNTYIPREELFSKHFDIEHIIPQARLFDDSFSNKTLEVRDINIEKGNKTAYDFVAEKYDEQGLTDYESRVEELYNNKVISRTKRNNLLMKEAEIPSDFLNRDLRDSQYIARKAREILEEMVPFVVTTTGAVTSRLREDWQLVNIMQELNWDKYDALGLTERYTDKNGNIVKRIKDWTKRNDHRHHAMDALTIAFTKRSIVQYLSNMNARSDKSGSIYGIEQKELHRDERDHKLVFNAPMPLDEFRAEAKKHLESILVSIKAKNKVVTKNINKAKTKDGHQQKIQLTPRGALHNETVYGKIRNYEAEYRKVDGKFTEETILRVCNQKCREALLKRLAEFDNDPKKAFTGKNSLEKNPIWLNAEHSYAVPLKVKLYKIVDVFTIKKAVDKDLKIDKVIDNKVREILQARLDEYHGDAAKAFSNLDENPIWLNQEKCIAIKRVKIKAKVSSDTSLPLHIKKNLLGNILKDDEGTAIPTDYVNTANNHHVAIFVDSEGNWHEHVVSFFEATASAMLGLPIVDKNYKREEGWKFLFSMKQNEYFVFPNEKTGFVPKEIDLADPKNYPLISPNLYRVQKFSSSFYVFRHHLETSVEEPAELRDTTWKRIQTIKYLDGIVKVRINNIGVIVSVGEY

SEQ ID NO: 9557 - protein, 1056 aa, unidentified
  REGION 1..1056: note = Description of Unknown: Cas Enzyme sequence
VFKDDMILGIDIGSNSVGWALLGYDADSREVTGITDAGVRIFEAGMDGDISTGNATSRCAERRAKRLIRRNLDRRRRRMLKLQHILQRAGLLPEGDDIEKIILDLDAEVRKFCLAVPEGERPSREVLAHTYPYFLRALAINGKLPPHLLGRAVYHLAQRRGFWSNRKSLVDEKELGQVKQGISELRGKMEETGARTLGEYFAYRDPTRDRIRGLWTSRDMYRHEFDLIMNNHPHLVTPDLRKSIEKAIFFQRKLKSVKSLIGHCALEKNKRRCPWYRFEAQEFRILQTITNLKVIEPDGELRELSAEEWENLYRVMMGETGDLDRHGNIKISKAKKLLGLPKGSKFTIEDGGEKTLKGNKTLSSLLAVFGDSWNEFSPRDKEDILHDLRSFEKREPLVRKAMRKWNLEQEEAEAFADIKLPEDYCNLSYKALCKLLPLLREGWSYGSAVKEIYPEAFKSDGIVHELLPGLDTSSIDLRNPVVERSLTELRRVVNAVIRKYGKPGIIRLEMAREMKLSANRKKEIIKRNRDLEKQREKAAEKIRDVFPGMTPGRTDTTKVLLAEECGWRCPYTGRSISIRTLFGPHPQFDIEHIIPRSRSLDDSFLNKTLCYHEENRNVKRNRTPYEAYHGTPRYDEILDRVAKFNGRLAKEKLRRFRMTPEEVEDRFADFTQRQLNDTRYAAKEAAAYLGMLYGGSVTSIDGRKRVQVLSGGLTYKVRSAYNLNGILNDGDVKTRNDHRHHAVDAIAIGMTSPGMVKKLTEIAKELENRRDYIRFGTGKGILPDKWNTFDEDVRRVIGKIKVSHKIPRKVRGAFHEETFYSKEYEHKVNGKTGMYRHVRIPLENLEKNKIPKVVDKGVREAIIRKLDELGIDDPRRAFRNGENLPEIVSADGAKRIPIKKVKIIRKQNTIRVGEGRRARNVVPGNNHHMMIYAVLDKRGEVKKWDGEVVTLLEARRRLMNGEPLVNKVNTPTARYVMTVQRGDVFEMDIKGKRELVITRDVPQTKQMSFVRLNDARLKKEIKSSGEWFTKRPNSMRTSNVKKFTITPLGELRNSNA

SEQ ID NO: 9558 - protein, 1865 aa, unidentified
  REGION 1..1865: note = Description of Unknown: Cas Enzyme sequence
MKKILGLDLGTNSIGWALIEINHEKKILRIISLGSRIIPMDATELGNFEKEGIIQSAAAQRTEKRGPRRLNERFILRRNRLHLLLNLLEALPEHYKIEIDFERNGQKSGKFKHGKEPKLAYKQNKHNPNKYDFQFSDAYQEMLDDMGIENVKGKRVPYDWTLYYLRKKALDGGKLTLNELAWVLLSYNQKRGYEKTEVENKSIKDNELIEELDLKVTNVSKQKQDINGRKYYEVSLEGNDIKYKEYSDKQMTFKNDLKEVIKTTKLDEEGYEKEKTFKVVDIYPLTIESIEYKKEDGKHNFTLHFTNGWSEIKKLKNYTFKYKNIKGKTYDYIVETEYDENGDIKTIQGKERKFREPDFSDKSNDWTLLKKKTEKEALKFNVNKKYIDKKGNPKHYISPDIYETLKTDAVSKDHKRTKIIGGKFQVVDRKFYREELNDIINNQKKYHPKLEDQKLINDCIKLLYPNNGNHRKLLENKKAIEALLVDDILLYQRPLKSKKSEIANCKYEIKYWKTDVDKETGEILDEKPIYNKVVPASHPLFQEFRIWDKIHNLKLIEKEPKDSKRINVDVTKQFFKTPDDYQKLFDFFNNQKTVTQSAFLSHCKKEFGIKTKDFKWNFPEDEELKGNETRTSFITRFKRCGFDNYDDFLTLEKEIALWHYLYSVSYNERTANNKKSLKKFFNNYFKDFNDITEVTIEKLVNDFANYPKFDSKYAAYSHKALSKLLPFMQMGNNRFKGTFTEDETKNNKWKKSINERIETILQKLKQIDFTAEKPDFSEVEEKGNLKENILPFPKGLFNVFKDFENPEDFSALNLTQASYLVYGRHSELAQEKHWNSPQQIIDELHKELKHNSLNNPIAEKVLLEMMQVVAEIWKTYGEKENEFTYKKLFDRIHVEVGRELKKSAKEKKKISKNQTENRKQNKRLRQILQEFLSNNNYKANPKNNDHFERLKILENGARIDKKLFIRDKDDDGNINKLKQNGITQKDINSILKKETITKQEFDKYKLWIEQGYRSPYTGLMIKLTDLFDGNKYNIDHIFPQALISNDSLTNKVVCETEINKLKSNQTGRDFILNPKKRKVFCAAYNREVEILTEENYISLVKEQFAGQKREILLSKEIPSKFINSQLNTSRHIARKAVELLSHIVREKGEIEYRSKNVLPVTGMVTNKLKRAWKLDHVWKELVTPRFIRMNELTKSNLFGDWREIEDEYGNIKKYFDCQIDETILEKMGEFDIKRIDHRHHALDALVVALCTEEHVNYLNNINANAKKDDYGKQKQLEKYRLTLKKKIKFSKPKKNDPKENDWFFMLPAEKRQPNAKSSSRDTVIEMKYQYKGTGFDKNYKKMMLTALQDTIVTFKQNKRVINKTVNKYNKWDKEKNKVTLETQKPKTIKEALKSNKKYNWAIRRSLGKDTFYGKVFLGDLVNKELHKSIDIIFSNPTLIVDENLRKEVIILKKQFPEITEFTKQIKNKYVNKKITLKVEKMASRYKGELSKEFNSDKIKNITDTGIQKILLNHLKQFDTIKLPFDEAIKYYDALLEKDEFEAIVNDNENDFKSTEELIQYLKNNKYESGKTKYATLNVFVDKVTSENLRNRVDDKEKKIEIIEHPEIAFTPEEIEKMNEPYNLIRLNNGKNHKPIYKVRLSSGFGKQRQVTTDKETKHPVKLKQYMVNDEGSNIFIGVYENKETTERKFKGIELIELIETLKQAAYNHDLSKKENPIPDKYDNDDSNFGRIFTLSPLDLVYVPTEEELNSEKININTLDKSRIYKLVKFSGQTLDFVPANTASVIFDIDNAKGKNNKFLEKLGKRSKNGFKIISPKDKKLTFILNEIGKTSRQSKSQNTLDGIQIKSQCWKLTIDRLGNIIKIEK

SEQ ID NO: 9559 - protein, 1178 aa, unidentified
  REGION 1..1178: note = Description of Unknown: Cas Enzyme sequence
FMDSFRIMADEFKAKGIEKIPYDWTLYFLRKKALKEKISKEELAWILLNFNQKRGYYQLRGEEEEQEDGKVKTFEVLKVEKVVDSGETIKGKGDKLYDIYFTNGWKYDKQTTKPELWEGKTKEFIVTTSTKKDGEIKRTFKTVDSEKDWVAIKAKTEQELEKYIGDDYENKSVGTFIYEKLLENPHQKIRGKLIKTIERKYYKKELQAILDMQMKQHPELQDIELYKASVRELYPRNEAHQSVLLLQKDTFKHLFVDDIIFYQRPLKSQKGNIGGCQYEKRPQKDKEGNLLVDDNGKPILKQVKVASKSNPLFQEFRLWQWLHNLKIYANEKQVDGKLKVDVDVTAELLPTEKDWVDLFDFLTTKKEIDLAGFLKYFSDKKLIEKQKKDNFTHRWNYPEDKKYPVYETRSSILSRLKKVEGLKNPNEFLTKEIEKHLWHIIYSVSDALEFEKALGSFADKYQLNRKSFVENFKKIPPYKSDYASYSEKAIKKLLPLMRMGKYWKENDIPQPVKDRIQSIMERVAALNLPENPTRKQINEAFEKYQVTDDDIPRQIVKSFIPFVKTNPLKGLNTYQAGYAVYGRHSESGDLQYWKTPQDIDNYLFNFKQHSLRNPIVEQVVLETLRTVRDIWNYYGEGKEKFFDEIHLELGRELKNPAEKRKKISQKNAENERANQRIRALLNEMTGEGAKPYSPSHQEILKIYENDVVTSMELPEDIEKIRKNNKPSAKDIQKYKLWLEQKYVSPYTGKPISLSDLFTEKYQIEHIIPQSRYFDNSMNNKVICESAVNELKSNQTAYEFIKDKGGTRIDLGNGKTVDIFSFEKYQTHCNQYFKKNKQKLKNLLTDEIPEGFINRQMNDSRYISKLVKSLLSNIVREEGEQEPTVKGLLPVTGAITSKLKQDWGLNDKWNELILSRFKRLNQLTETQDFTYLNEQGVEVPTVPDELRQGFSKKRIDHRHHALDAIIIASCTREHINYINALNSERKNFGLVKKLRKIEEVEKTNPLTGERKKVKVAKEFLKPWPNFPVDAKEVLQKTIVSFKKNTRVLTKTNNKYWKYVQQKDGSYKKELVKQSGDNRAIRKPLHKETVFGKLKWKAPTGKIYAATRVSLVGFKEKQISSITDKGIQKILINHLKQDKYQNQTDEKGKKVAPEILAFSPEGIEDLNKNIQALNGGKPHH

SEQ ID NO: 9560 - protein, 1127 aa, unidentified
  REGION 1..1127: note = Description of Unknown: Cas Enzyme sequence
MSKKILSLDLGITSIGYSILEEVSENRYSLLDYGLSMFDKATDKDGNSKKLLHSSASSAKNLYTLRKERKKSLAKLFELFNFSTSLKLLNQEKENLYINKWELRAKEAFCRRLEVGELFSILYALAKHRGYKSLESGDLLEELCEELNLECNLTKKTEDEDTGKIKLALKTVESLRLDNPHKTVAQIIYEEEILKFTPTFRNHDNYNYMIRREYINDEIKKILLAQEKFGFFKSDFDVTAFIDSVIEIIDDQKESTNDLSLFGNCEYYPKHKVAHQYSFLSDIFKMYESVSNITFNTKPTLKITPSQIKLIAEDFFAKVKKGKNIGDIKYKDIRKVLKLDDDVKIFNKEDSYLRAGKKIENSIIKFHFVNSLSKIDNSFIVIALEDERGYEVLQNIFDVLAYEKSPKSIYEKLKNLVDEKTIIALIQNKHGNSLNISHYAMLQFIPYFEEGLTTDEIKKKIGLERKEDYSKYRKGIKHLNIVEFEKDENLEINNHPVKYVVSATLRVVKHLHSVYNGFDEIRVESTRELSQNEQTKKDIEKANRAQEKEFSRIVEDKEYQKIADSYGKNIKKYARKILLWEEQEYLDIYSGKVIGLGEIFSNEVDLDHIVPQSLGGLSVKHNFVLAHRDTNVQKSNRLAVDFVSDKEAFINRVEHLFSSHKINWKKRKNLLATNLDETFQDVFESKSLRATSYIEALTAQLLKCYYPFIDKKKQVDGSAVRHIQGRATSNIRKLLGVKTKVRDTNIHHAIDALLIGFTNHSWLQKLSNTFRENKGVINDEARAKIKKEFPIIELVVNDEVEYLEPKELCERIENTFNCYGEESVFYKDIWGKNRVVSFWVSKKPMVSKIHKDTIYAKKKEGIFTVRENIINKFIGLKITPTMSSQKFMDIFKKNILEKMYLFKVNPKDFISLVIQKRADEIAELLESFETLDKKDKESMSQAKVDLEVLIHKEILDNSENSIRKVKFFQTNLTGFDVRGGLATKEKTFIGFRAWLEDDKLHYVRIDVANFKKIQKLNDSSFKVYKNDEIFFIMPDGSRRGGKIVSFLEETKKSAFQNAKYPTSSEYQPMQFCKMDKGKKSGAKQQSIGKAIGIIKLNIDIIGNIKSYQVIGNAESELLDFVKETVHG

SEQ ID NO: 9561 - protein, 1013 aa, unidentified
  REGION 1..1013: note = Description of Unknown: Cas Enzyme sequence
MTERILGLDIGISSVGWAVIEYDKEENTNNKIIKSGVRIFTQAEHPKDGSSLAMPRRLARGARRTNKRKRQRMKSIKRLFVNNLALSEEDLFLTTEIDNTIYSKKGRTDVWELRDKAIKIELNSSELARVLTHIAKRRGYKSNRKVDEQGNSEGKKVLSAIENNKKLLEDYLTIGQAIYESTKVTGVRRNKKDAYLHSVSREMLLDEVNVIFKKQQELGNSLATDEFRDRYIGVAFHQRDFASITKMVGYCTFEKAELRAAKRTYSAEEFVTLTKLINTKVVLEDGTERGLTENELEKIILLCKQSLEPSYVKIKETIALEATSSFKNIEDYETDKETGEFLKKKPRKFKSAFVGFHKLRLLVTKVLSKTHWHNLSQDTKLLDEIGTIFTHHKSDEKISEELNKLTFSMLSEEESKTLQEALLLNISFDQFIYLSHKALDNIVPFMREGKRYDEAVALVGYKNEEGIKQKFLRALNKDEQNELTNPVVKRAIAQTRKVVNALIREYGQFDKVHVELTREIKRSHKDRKKIEDGQKKYQEFKKEVVAEFIENFEREPRGAELLKYRLWKEQGGYCAYSGYKGQAGYIQPEKLIADVKYAEIDHILPYSRSLEDGMHNKVLCLAKENQEKKNQTPYEYFLDIGRDWYAYEVFVKSILKGLSKAKRTRLLKKNFDENSAKEFRERNINDTAYMAKFIKNFIEANLELTSKSKKRVLSINGTLTNMLRHNWGVGTKSRDTHLHHAVDAILIAFSTDSEVQRLSTLSAKIEGFNYTVSEAKSKKFMFAPPMESFRDEVQKSIDEIFVSNSPRRKVTGSAHEDTIYSSKTFIANRKKEKPSILPMSSRDKIVKLNNGKNLAKNESMPRVDIFQHKKNKKYYVVPLYVSDFVKRELPNKAIVAGKNKDGTPKEWLEMDENYEFRFSLFKDELVEVKTKKTATKESKLILGYFVSADSANGSLELKSHDNAEHNIFKRGSTNMCVLSSLGIQNVEYVKKYQVDSLGNKNEVKQEQRIMTKK

SEQ ID NO: 9562 - protein, 1172 aa, unidentified
  REGION 1..1172: note = Description of Unknown: Cas Enzyme sequence
MNKKVLGLDIGSNSIGYSLLELNEQNDEIVFNELISNSIVFSEPNTAEERRDGRSSRRRNERKSARKKATRKLFVKYNIASKGFIEKTTQYLNKLSIDDTDVYRIREKAVNGDMLTKDEFLFCTYSILTDRGYNNMFSTSKEDGVINDAVLKNREKFKVGEYLLPSMVLTEERKEQEDRYQNLPIRNKKDDYRNSLDRDMHKEEFSKVALSQSDNKSLFKSTKECQKFIDEVLDETVVNAPFFQRPLKSFEGMVEFCTFYDKFNPNGSEKRMPLAHIKNIELTLRQKIDNYEISNIETGEIKSSREMLSIDEIETIIDFWIYTPSSNEINAKNIFKATGLKDIKLEIPEKSSQIILNIQAHRNVLEVLKEYEIDFSNTHQEFYTKLLLILYYFKNQSLREEEVSKLLEAYKIEVEDSFSQKVSILENMDGFSSFSLKFTDEVLTKMSEENKTHHEALESLGYYSKYLKMPTYNYLPPLEPTHKDIKWLQNNLDYFETKHLFYQPMMSPKVKRVIAVLRKLMNELIKTYGVIDEIRIETSKEMNSKVEKEKIDENQKKDRNKNNEADKLLESHEIVKSSTNMERAKLWKEQGGKCLYSGENIVLTEAFDENETEVEHFIPRSVIWINSYKNKILVKKKYNQDKSDRHPIEYLKSIGEWEDFKGRVQDTFMVFKKKDWLTKEEIINSVMQKEHWKDSYLNDTRSATRVIQKYLNHYLYPKENMYGRDEKRSIVSVSGRAINELKYMWGIHKIMPKNSDDKKDRNTNYHHTLDAFTVALCSTGAVNTLHSYFKKKENAFKTKAMKENLTNSLPQTKEGVNVVEHLQKLVEKYETNQLYVFPYNKRKTNMKGFKDGNKKLYITNNPKDETKEILAEMEKVAIDTTILVKKVGLNVKDRKDDEVKKFIKEVQDRLDKEKQAKIIVAIEVYANRLMELRSEVVALDKEINSLNKTKKRGKQHKENNALIEESIKPIREIKKSLLQEEKELKCSYLVKGNKEQIVKSLKLYKTKIEKSKADAIIFHQRKNNKIERLSLSNYMNALNDKEPFVIKENESTLYVELFNTKSRGQAVGLNYFSSIVNNIATKINSKFDDEINSNVVADLVLYKNDIVKVIDTKKETVNYHIFNGGGNIAGGNNKLELKTINKSTKQRLYITLNKTTHVSKVKIDFFGNIIED

SEQ ID NO: 9563 - protein, 1083 aa, unidentified
  REGION 1..1083: note = Description of Unknown: Cas Enzyme sequence
MITLGLDLGHTSIGWTLADVENGKIIDGGVEVFEAPEDEKGNTLASIRRGYRGSRTTNKNHEKRLLNLKKLCSKYGLVSKKLLITPKGGIAPIFKKGIQKDSPLKLRTKGLDELLNGRELTRVIIHIANRRGFKYDIDEESDEDAGKIKEAQGELKNEFEKFNYRTYGEFLYKEYELKEKKTRNRAKKDKTPDYKFSIHRDNLENELLQILAKQQELKSQYVTDEFKGKIKDELLFVKEPKSLKRMIGDCSLIRGRKRASKALYSSEIFVARGSLVNLRVKEPDNDEYRELSKDEIELLLKEAHTKKITKTEAKKLLNISGKSKFKGDDEDSLPHVVYLESLLKMKEYIDDEVLFKKLFKDLNLYENIVDLLTYEKSVVRRKKKLEVFFKDSSLSIDEQKELYSKIFNLSFSGYLNVSTEAVKKILPYLENGYRVDQAILEQDIKIDVVPQLYLPPLKDTQLMIPNPIVVRAITKSRHLINAILKKYREVYADDEWTFDRLNIELAREINTQKEKKEITSAQTRDRNNKQKAVDFIVEKCGEKYVTSKNILKVRLWQQQDEYCPYTLSKYEDAKKAKITTDDIVTDIKGKVEAFDVDHILPISRSSDDSISNKVLVFSDENRAKSNKTPYEYFGNDSKRWEKFEKFVRSMYGKLGKAKVGKLTMKDFANREKDFLARHLNDTRIISKTVKNYVEKYLKFKNESDERRVYVISGKLTSTLRHQWGLENKNRGNHYHHFEDAVLIAFSNSSIINRLSKYYHALETYDREGKDKPKFTKPYENFVDDINDMVKKINVVRETKIRNSGKVHSDNPRKKNEKSRKGMEIRGGIVDNSEIVRTDVFKDIKKQKYFLIPFYLKDLNKPLATKFITAGNKKWEEFDKNKHKFVFTLYPNDLVQIQTKTELIQGYYISPHTGTANITLLSMDNIDDGIFTKEILKYILRINIDNSLDTDSRKKIIEELAKLSHIKKKKPNGILSLVMDIKINDVKELKGKKNNLALIIDELQENYSIEKIENSTQNILLPTTIKNDNEIKLILKLDTFYDNRALKGTGVKTKTLGFKKLQIDLLGNITELPSETERKPFTKR

SEQ ID NO: 9564 - protein, 1144 aa, unidentified
  REGION 1..1144: note = Description of Unknown: Cas Enzyme sequence
MVNLMSKKILSLDLGITSIGYSVLQEHSNDKYSLCDYGLSMFDKPLDKDGNSKKLLHSASISTTKLYALRKKRKQNLALVFENFQLASKTSLLEQEKNNQFINKWELRAKKVFEEKLEISELFTILYTLAKHRGYKSLDSGDLLEELCVELGIEIDNKGKKKEDDEKGKIKNALKTIESLREANPKKTVAQIIYEIEIQKVNPTFRNHDNYNYMIRREYINDEIKKIINTQEKFGLFSIAFNTKEFIKKIINAIDDQKDSTNDMSLFGRCQYYKEEIVAHQYSLLSDIFKMYESVANITFNAKPIVKITPKQLKLIADDFFKKIKKGKNIADIKYKDIRKILKLDDNVKIFNKEDSHFIKGKKQERSIIKFHFLNNLSKINNAFILDALEQENKYEILKKIFDVLAYEKAPHSIYEKLKEKIKDKKTIVDLIKYKAGSSMSISSYSMIQFIPHFEQGFTTDEIKKKLELDRKEDYSAFNKGIKYLHLKQFEEDDDLKINNHPVKYVVSATLRLIKYLHSVYGAFDEIRVESTRELSQNEQTKKDIEKANRALEKEIDAIVSNTEYQTIAQNYGKNLRKYARKILLWEEQERLDIYSGKVISVEDIFTNVVDLDHVVPRSLGGLSVKHNFVLAHRDTNVQKSNQLPLYFVMDKQAFINRVEYLFESHKINWKKKINLLANSLDDVYKDTFESKSLRATSYIEALTAQLLKRYYPFPDEKKQSDGSAVRHIQGRATSNIRKLLDVKMKVRDTNIHHAIDAILIGFTNQSWLQKLSNTFRENMGVIDDKARENIKKDFPIIELVINDEVKYVEPKELMELIEDNYNTFGEDSVFYKDIWGRVKTVNYWVSKKPMVSKIHKDTIYAKKGNGLYTNRENIINQFIALKITPTTNAEKFHENFEKKILKKMYLYKTNPKDVICQIVQNRAEDIATLLKSFIGVDSKNKELMSNAKSQLEALLHRELLDNNGNIIRKVKFYQTNLTGFDVRGGLATKEKTFIGFKSWLKDENLHYERIDVANIDTVKKENDSSFKVYKNDLVFFIYPDGSFRGGKIVSFLEENKTGAFQNSKFPMALKYQPSSFCEVDKQGKHTKTKPKSIGKAIGIIKLNLDIVGNIKSYQNIGNVNSECLEFLKENTDGWESSSSHKTL

SEQ ID NO: 9565 - protein, 1030 aa, unidentified
  REGION 1..1030: note = Description of Unknown: Cas Enzyme sequence
MFSISNEDGVINEAVSKNVKEYEARNYALPSMVLTVKREEESKLYQNFPIRNKKDDYSNSLNRKMHIEEFEKVVYSQKDNKNLFSSPQKCQEFIDEMTDESEVNTPFYQRSLKSFEGMVEFCAFYDKYNPKGSYKKVPLANIKNIERTLRQQIDNYEAIIAKTGEIKKFTPSEIDTIVDFWIKTPSSNEINANNIFKSVGFKDVKLSISEHSSQVVLDIKAHRQILKLLQEYEVDFRGEDNALYNEILLELHYFKNNSSRVEHIKKILEKYESNLDDEFIQEIALLEHMDGFASFSLEFTTEVLEVMSNEAKTHHEALEKLGYYSKYLKIPKYDYLPPLEPTKKDIEWLKANVKGFEMQHLFYQPKVSPQVKRVIAVLRKLINEIIKEYGHIDEIRIETAKEMNSKSEKEKIDKNQKKDKKKNDDASRFLKANDIKETKKNLERAKLYIEQGKDSSLCLYSGETITLEDAFDEEETEVEHFIPRSTIWINSYKNKILVKKKANQNKGSQHPFEYLKSQSQWESFQGRVHKTSMFANKKEWLTYEKLIESVMAKEHWQESYLNDTRSATRTIQKYLNHYLFPQENQYGKGEKRSIYSVSGRAISELKYMWGIHSVMPKNEEDKKDRDTNYHHTLDAFAIALCSSSAIHTLHNFFMKKENKYKTKIQKKNLSANLPHSKEGENVVEYLKELVQKYETNRLYVSPYNKRKTNAKGFKDGNLKLYVTQDKKNNEILAEMEKVAVDSSLLIKTVGGFPKPRSDAEVRKEILSIQERLDSQKQKKIIDALEVYAEELLTLRVGIEEKEKEIKNIKKSLKTGIQHKEYNDTINKTLKPILATKEQLAQQLNHLKCSFATKNAKRQIVKSLKLYNAKVTQSKADAIVFPHREERKIERLSVATFNKALQDKEPFVIKANESTLDIKLFETLEGQKVGLDYFSGKENSHIETKINPKYRELVEYASSALTLYKNDIIKVNNTKTGVVEYFICNGGGDLANNKIEVKSINKTTKKRIYATFKNKLVSHVKIDFFGNITEI

SEQ ID NO: 9566 - protein, 1682 aa, unidentified
  REGION 1..1682: note = Description of Unknown: Cas Enzyme sequence
MKKILGLDLGTNSIGWAIVEQDFDKKEGKIIGIGSRIIPMSQNEISDFGKGITKSATALRTEKRGIRRLYQRDHLRRERLHRVLNILDFLPEHYKNSIIWGKEEGIKEKDWKKHGQFKENVEVKLPYKPLPKKNDSNKQEYDFIFKESFEKMLADFKKHQPDLFYKKKNGEETKIPYDWTIYYLRKKALTKKISDYELAWLILHFNTKRGYYQQRGDENIEEKDGKIIETVEESILSVEEINKNEYKVTLSDDTEYIEKSNIQLSYKGEKRLVKHITATKTDRKTKEKYIDKYKQVVYLITSKVTNIKKLDVDKKGFTKYQVDLENGMTFEKSKKREIDWLNKEKTVLLTYKIGENKTSLKISAPEETDWTLLKLKTEQDLNNSRKTVGEYIYDTLLSMPNQKIRGKLIRTIERKYYREELEKILQKQSRLNLKLQNLDLYEQCVDELYSHNESRRNILQNIKDENKFQFLFINDIIFYHRPLKSKKSLIANCKYETRTILIDRSDFETFFNKVKKNPNLSEKEKIEKIIEDIRFVKDEKIIQQDTQKGKNNRKVIKKNDLTEQYKDLINNEDLRKAIKEAETYADLLKELNLGAVYLTKFNKNPLKAVAKSNPYFQEFRIWQFISNLKILEKKKIIDGKLKFDIDVTSEYIKTDEDKIKLFENFYNRANIKQSQFLKLFKNSNNKILTSKTHKWNYIEGNEYPLNETKHILSSKFSEDYEFLRFYEENEYELWHLFYSITGTEELKKALNKLVKKNKEKYKFPENFVEKALKIKPFKKEYAAYSEKALKKLLPLIRIGETEDNVSKIAKENIDKIYERLKSISFDKEKIEQVIDDEITKGMLSSFIDFPNKKYTGLQVHQASYTVYGKHSEAINTEKWSSPKDIENYLRYEFKQHSLRNPIVEKVVTEALRVVQDIWEQFGNGKPDFFDEIHIELGRDLKNTKQEKERLTNINTKNKNTNARIRNILREFKENEEKYQIKNVNPSSPYQQAKFKIYENDILSRYTEKELEKEKQDNIKIADVIKSIEPTDKEIEKYKLWLEQKYRSPYTGEIIPLSKLFTEEYEVEHILPTSRITNNSFNNKVICEARINPDPYKGNQTGYEFILNNENRKVEELPKKNGEYTTIFSREKYEVFVNDNYSNNPKKAKILLSKDIPKDFIDKQKNDMRYISKEVTKLLGRIVREDGENEATPKRLLPVSGGVTSSLKQDWGLNHIWNDIVLPRFLRLNKLTGTKKFTYINKEGKEIATVPKELINDFNVKRIDHRHHAMDALIVACATRNHVNFINNKHSNKEQRLDIRNKIQYKKYKDNEKNYNWIYKKPWENFPTDAKNTLEKTIISFKQNIRVINLTNNKYWKYVKQKDGSYKKQQVDQKGKNWAIRKPLHEATYSAKIDLPWVTLKDDEFITATRQNNNLNKSFNENKIKKITDTGIQQILLRYLKQEKFKKVNKKGETYYDADLAFTPEGIEELNKNIKIYNKGKKHKPIYKVRTYEKGKGRFKVGVKWNNDKKYVQGSPNLFFAIYRTKNENGKTIRVYETVALNEVIGHQKQQAQESVKSNNRTHIPIRFEKGEFLFTLSPNDLVYVPSDNEKENPSSVDFKNLSKEQVKRIFVVNDFSSTIYFTPVHLATNIAPKEVDLSFDEKKDKLKGSYDTKTASFEGKQIKDICWKLKVNRIGQITGFEK

SEQ ID NO: 9567 - protein, 1062 aa, unidentified
  REGION 1..1062: note = Description of Unknown: Cas Enzyme sequence
MPSSLRLGIDIGTNSIGWALFALDEQGNPQRLLDAGVRIYSSSREPKTEDPLGKARREARQARRQRDRRLQRKRRVLAELVRLGLMPADPSERKQLEHLDPYELRARALDAPLPPHALGRALFHLAQRRGFKSNRIAGDEDEKGKVRESIEALKRELDAAGARTLGRYWYQRLRNGERVRGSFWTERTMLEEEFRAIVEAQKRMQPGLAATLDRALQGESCLFGRIFHQRPLRPQKTGVCTIDGCSPRAPWAHPLAQQFRILQDLTNLRVRVPPEPAFRPLSRDEFSRLLGELSRRKELKFDRMRRLLGLPGDARFNFESEVRNKIEGDRTASILGAKKIFGAHWHRLSLDQRQEIVERLLGEAEEAEIVRFGRSLGLEEAGARALAATRLPQGHCHLGLPVLRAIVPIMRDQGLGYAEAVKEAGYHHSDLAEKAGRHRLPYYGEVLRRWCLPGQDDTLPSEEREFGRIANPTVHVGLNQLRKLVNAIIDRYGTPAEIHVELARELKLGRERKRRIERKQARDAARNREADAAMREAGFDPETMGTGSRTENRRRYRLWLELDETGPQRRCCPYSGRPIGIRALFSNEVEIEHILPFARTLDDSMANKTVAFREANRDKGERTPFEAFGSSPTIGGRRYEWEGIAQRASRMPDNKSWRFASDAMDRFEKAGDFLDRQLTDTTYFARLTRIYLQSLYRREDGDRVVAIPGRLTALLRRKWGLDGLLAEGNRKNREDHRHHAIDAAVVACTDRRSLQALARADERGRQRIVISPPYEGFREELARRLAGMIISHKPEHGIAGRLHEETAYGATSVVNEKGTPCYVVRWPIEKFRSERHLDQVRDPHLRRRLKEHVAERMAAGQKFEEALASFRDANGRSVRRLRVLVPFDPDSLVGIPNGLPEPFKYYPTGTNAYLDVLELPDGRWVGRAVSVFEANRLAMSSDAQPPWKPAYPAARRVMRLHKDDLVAVERDGRTEIMKVLQVWRDGRVVLASAREGGKSESRAVDRPSASTFPKLRLRKVAVDILGRLKDPGFADARKGRGDRQRQPPSVGGQGPSPDPRAG

SEQ ID NO: 9568 - protein, 1555 aa, unidentified
  REGION 1..1555: note = Description of Unknown: Cas Enzyme sequence
MKKILGLDLGTNSIGWALLENDFEEKEGKIVGLGSRIIPLAQDILDKFGAGQSYSQTAERTNYRGKRRLYQRHRLRRERLHRVLNILGFLPAHYANAIDFDKHFGQFKEDYEVKLNYRKNNDGKFEFIFKDSFLEMVEEFKQMQPELFYKNKNTKEAKLPYDWTIYYLRKKALSEKISKEELAWIILNFNSKRGYYQLRGEDKIKNEDEAKEKIFVVLKVKDVIDSGEIIKKSGKKLYDVYFECGWKYDKQITKTENWIGKTKEFIVTTTIKKDGKIKRTFKNVDSEKDWPAIKAKIEQDIKSSGKKVGAYIYETLLNNPKQKIRGKLVQTIERKFYKEELEAILIEQMKYHDELKDKHIYAKCVDDLYPRNEIHNSILKQKGFKELIIDDIIFYQRPLKSKKSTIANCTYETRTYVKDGIKYEQPLKGIPKSHPLFQEFRLWQWLKNLKIYQKERASNGIIKLDVEVTEELLPDDESRVMLFDFLKTKTEIDQNQFLKYFSDKNLIPKQKKDAPNYRWNYVEDKKYPCNETSASFLSRLKKVEGLNIKEFFTQEIELQLWHIIYSVKDKNQYDKTLKNFAVKNNIDKKSFFSVFEKYPPFKSAYGSYSEKALKKILPLMRMGKYWNENLIEKEVKDRVARIKERLEVINYDENVFKDDRNNKLKSIVDDEIPKQLLKSFLPFKNKNHLEGLNTYQACYAVYERHSETSEITKWNTPTDIDTYLENFKQHSLRNPIVEQVITETLRTVRDIWQYYGNGGKDFFDEIHIELGRDMKNPADKRKRISERIRENENTNQRIKALLQELITEGAKPFSPNHQEILKIYEEGVYQNPDADFYKVSETEIENIRKKNSPSKTDIQKYKLWLEQGYRSPYTGKIIPLGKLFSTEYQIEHIIPQARYFDNSLSNKVICESEVNKLKGDKTAYEFINDSDVRIIDLGQKQNVKLLTIEQYEVHCKRYFARNRIKLKKLLSKEIPEGFIERQLNDTRYISKFIKGLLSNIVREENEKEITSKNLIPVTGAITTKLKIDWGLNEIWNEIIQPRFERLNNLTNSKDFGDWDYQRDENGKILGKKFFRLKVPDGLSKGFSKKRLDHRHHALDALVIACTTRKHIQYLNSLNNKNIKYTLQAGLFVKNDKGHFTKQFAKPWNGFTVDAKKALEHTIISFKQNLRVINRTNNKYWKYEKQIDGSFKKKLKEQEGKNFAIRKSMHTPLPYGEKEYSFTILEISKNIGKRKFIIDDEIKVKIEELLVQFDGKIGDVQKYLKKNPIMDNANKPIVFTVFNIKEKRYRKRQPIQKLSNRGQGGIKSSEQAIKFINKVSDIVIRHDLLEHLKENNYDIDKAFSIEGIEIFNSIRKIPVYKLPISEASTGKFALGKGHNTKVKFGEAESGTNLFFAIYWNEEKQKREFETIPLNNVIEHQIWRAKLSKEEMKKEPIIPINQTKGRFLFSLSPNDLVNIPTEEEMEYPHNVDFKNLTKEQFDRIYIVNDFSNITIYFTPNRLAKAIAPREVDLSVDKKGKLKGSYDIKTATFNGTQIKEFCWKLGLDRLGNIINVVK

SEQ ID NO: 9569 - protein, 1189 aa, unidentified
  REGION 1..1189: note = Description of Unknown: Cas Enzyme sequence
EKSNKTVGQFIYETLLSTPSQKIRGKLVKTIERKFYKKELKAILKEQIKHHPELDNHTSKGKDFYRACIQELYPRNEAHQYNIKEKGFDYLFIDDIIFYQRPLKSKKSTIAGCQYETRTFKKTITDLITGKEKTIEVTEAIKAISKSHPLYQEFRLWQFLKNLKLFQKEDKQGNLLDKDVTLEFLKTETDWTDIFDFLNRKSKIKQSQLIDFLSRKKGLDKKRKSNYRWNYVEDKEYPCNETKAQLLARLQKVKNIDAEAFLTNEIERKLWHIIYSVKDKNEFIKAIENFALKNKVDKESFVENFAKFPPYKNEYGAYSEKALKKMIPLMCRGIYFDENAIPTEVKERILSIMERVKALQLPDNPSKEQIKEAFEKYQVVDDDIPIQLVKSFIPFKNTNPFTALNTYQAGYAIYNRHSESGTINPWKTPNDIDTYLKEFKQHSLRNPIVEQVVTETLRVVRDIWQDYGNGAENFFDEIHVELGREMKNSADKRKKMTDRINENENTNHRIKELLKELMDDSEIQGDIKPHSPSHQEILKIYEEGILQNPNVKYDIVKEEEIVKIRKKASPTKSEITRYKLWLEQGYTSPYTGDPIPMSKLFTTDYQIEHIIPQSRYFDNSLSNKVICESEVNQLKDNQTAYEFLKNNPERIVDLGHGKNVKLFTLKQYESHCNKYFKNNKTKLKKLLSEDILEGFIERQLNDSRYISKIIKSLLSNIVREDGEREATSKNLIPVTGSITAKLKQDWGLNDKWNALILPRFKRLNRLTGTNDFTYVNKQGVETPTVPDALSKGFSKKRIDHRHHALDALVIACCTQKHTHYLSSLHTEKENYSLRDALLIKNKEGHYTKHFQLPWNNFPVEAKDALEKIIVSFKQNLRVINKTNNKTWQWVEREGILKKQLVRQTKGDNWAIRKPLHKETVSGKIKKSTPKGKIATASRVDLSTIKNRKQLEKITDTSIQIILNNHLKNYVDDKGKEQFDLAFSQEGIEQLNTDIIALNNGKHHHPIYKVRLYEIGNKFKVGYVGNKKDKYVEAAKGTNLFFAIYWNEEKKRRVYETIPLNEVIEHQKQVAYLPRKERTPVPIYNTKGTFLFSLSPNDLVYVPTDEELVNPKLVNVDNLCEEQMQRTYKMVSSSGIQCFFIQTNIAKTIQNKVEFSALNKMEKSINNIMIKDRCWKLKTDRLGKIEMLRK

SEQ ID NO: 9570 - protein, 1266 aa, unidentified
  REGION 1..1266: note = Description of Unknown: Cas Enzyme sequence
QYFWQLYQKNEITKENIRGRYTDREKHYEKEFNKICETQKIPDDLKKKFYNAIFYQRPLKSQRGKVGYCLLEKNKLRAPISHPLYEYFVALQFVNNIKIKEKNNEIRFLNDNERKIALNILDNSKKINIEKLLKKIFTNKKVAWLKNNDTDADVYVNYKLEKKVKTNIVRYYLKKYLKNNFGKVSHTIKHKNNEVEVYFEDLAWHALFSFNDEKKLQAFAQNKLEMNKEDAEMFSHISIERGYGNLSLKAIKKIIPWLEKGLTYDKAVFMANIPYILEKNIWEKNKKEIENGLKKIFDDIKKENFIVYIVNSILDDYRENKITYSKQAENIFIKDVEKALISNIGKLTWERKTEIERKSLIQNTYEKLINHLIENKNNFIIPFLKRKNLEQKIIDFLIGKNKDGVVYCKNEHKLNNLYNPSKIEGFKTVYDKNTGKEILGLPFIKSINNPNFSKVMFNLRKLINHLILVGAVDKKTRINIEMAREINSFNKKKAIEQWQAKQGKLKEKAYKIIQEYQEEYHPNNDKIKHIISSIKQKKLSNDDIKKLILWKEQKYHCIYTGEQIGITDLIGNNPKFDLEHTIPRSRSWNNGMENLTVAERNFNRKIKGEKIPYELPEEKYEEILIRAKEIYEKKYLELNKQIDKMYIPKEESDRKNRALQKKYLLEFERDYYYNKFSFFKIKEIPDGFKKSQLNDTRLITKTAMEYLGSYFNDGNGRSYVYPVNAKSVSLFREIWMGDFEKSRDTHFHHIVDAAIVASIHKKTYQKLENIWKKEDDFEIAKNEIKDEIKNTKPWNTFTKDIIDLTNKTLTYHLHKEKVGKQTKKKLRKRGKIVKKNHQPIYLQGDTARGALHKQNFFGAIKIPKKDKNGKFIFDENNNIVTEEKIYFVKRENLEKIIESKAKIKDIVDDTIREIVIKDIEKNKEIKEELNKLNEKNKNATEEEEKKNNILIEQLKKEQSKLFHLPNMKNPNAPIPIKKIRVKSKLKETISVKLHNKVYRSKKDYKQDIYAENKNNFGLLLYSNKNKKTGQLINLFDFYQSVKNNENIIQDKITIKTKKGIELYDLLRYKNQPLLIKKGQKVILKKNENEEVQWNNLQWLFDRLYVVTGIDGDGIKMLHHFVSNNDLLKKMNAFINKRNFENLSNQFKKINLNIFEILNQYKQKEDLEIEKLYETIDDYKINLKTIFGDINKILDRFYEENNIEKTNFIKLKLSSLTTPKGGDEIYQQDNYKRFPYIKVQPNGFYGLLENIHFKQKITGEIEKLDLN

SEQ ID NO: 9571 - protein, 1311 aa, unidentified
  REGION 1..1311: note = Description of Unknown: Cas Enzyme sequence
AGQQKLLTLYNGFKFILKEKEDLQTLKDKIKVRLNKKENLGNVAKGITELDEKMKGFKTLGQYFNTIYGKSNQKIRGQYTAREDHYLKKFEIICKVQGLGEIIETEKDPNKKYKGIALDLYKAIFYQRPLKSQKGLVGKCTLEPTKYRCPVSRSEFEEYRMYQYLNNFKIKTPNDEKLRALTEDEKEKVKPLFFRKKVSFDFEDVVKKLIPKQEKAVYFKSKESSSARYVVNYKLNTSLNNCSTIFHFRNVFGEDWKSLHYTYKTTDKKGIVKARTIDYQDIWHIWTTFTSEDKLYEFAKSKLQLADKEAAKFAKVNLKKDYAALSLKAINNILPYLKDGLIYSHAVFMANMKNVVKAENWNNEAERKIIQTEIKNIIDNHQLENSFLYVMNGCIHNNFKNSYSQKADDIYRKELNEAFEKEFGKKKWQALNVTNLFESKYQLFVAKFKEKAYFKIKRIDEKVLEFLDDNDLLKDKNKLYHPADIEKFRTVKETNKDGELLEVLGSPLSNSIKNPMAMKVLHKVRKLINTLILEGKIDRKTKIHIELARELNDANKRKAIQKWQKDKEEEYKVYRKKIIELYEKETNRTDFVPSAYDIEKFKMVLEQRKDKKIVSKEDVLKYKLWEEQQHICLYTGKTISLTDFLSENPNYDIEHTIPRSVSVDDSQMNKTLCENEFNRKIKKNLIPSELNNHNEILNRISHWKDKYKKLDNEIKGLVRASKTAVTKDAKDRIIQKRHYLKMERDYWKGKYKRFEIEEVKAGFKNSQLVDTGIITKYAQQYLKSYFDKVYTVKGTMVDQFKQAWGIKKTVTDENGVERKDRTNHIHHCQDAITIACMTKNKYDVLAHAWGLEEKFGIKQKVAELTKHKPWETFTEDVKNIQNEVLIVHSHKDKVPVQSKKKLRIRGKIQYKTVTKLPEEFITKKAGKDYFVLKNGKFKIPKYQQGDTVRGSLHEQNPIGVILQPVIIEEKPEREQGKFVTKKNKNGDFEKFFVKRKPITKEFTKANVLKIVDEGIRNRIEKYGLKNVLTAEGYILLPKETKGVKGAKKDLKEMLVKKVRMFEKDNPIDVKKQPTQNLQTSKAQRKKHKHTIYFQNDENYCMAIYEGKDKRGTIKRQYELINNYDAGAFYKKSSNIDNLIPSTHIDTNYPLIYHNNKPLVLQKGVGVILLKKDEKKDEIDWNDLNWLITRYYILSGIDKDGIKMIYHQEARAKTDVVKFMNYIINKQNFNDAILKITDLERIEELKKMFNNPTVKKKDFFIEINKTLNSKFKESKLTTPKGGDIIDEFKEFPLVKLKVNGFNALIENLDFKI

SEQ ID NO: 9572 - protein, 1206 aa, unidentified
  REGION 1..1206: note = Description of Unknown: Cas Enzyme sequence
MKKTILGLDLGTNSIGWALIEINHKEKIVKITGLGSRIIPMNAQEISDFEQKGTIKSLASQRTTKRGTRKLNERFILRRDRLHLVLNVLKALPEHYKLEVKLPENNQVRRNSTNNGSFKKGKEPKLAYTQNKNNPKRFDFQFMESYNEMLKNFGIENIKGQKVPYDWTLYYLQKKALDGKKLSLNELAWVLLSYNQKRGYEKTEVINKSTKNNEIIEELDLRVKNVSTKQQDKKGKNYFEIKLEGNDQFTYKEYADKQMTFKGDLKEVTRTTKTDDEGNVKEVTFTITDIYSLKIDKVDYKNEEGKHSFIIHFNNGWKEIKLPKKYTFKYKDVIGKEYDYIIKTDYDKDGNIKLQKGKERGIKEPDYSDNSSDWTLLKKKTEKETLIFNINNNYVDEKGNAKKYISTKIYDVLKEDAKTGNHIKIIGGMFQVVDRKFYREELNDIIRNQKKYHTELKDEKIINDCIELLYPNNKNHQKLLKNKKAIEALLVDDILLYQRSLKSKKGEIANCKYEIKYWSEQVNEKTGEITEKPYYKKVVPTSHPLFQEFRIWDKIHNLKLIEIEQKTENTVLTNVDVTKKYFKTPEDYQKLFDLFNTRKIIKQNHFLTHCKKEFKINTKNFKWNFPEDEELKGNETRTSFVTRFKRCNFKNYSDFLTIEKEIALWHYLYSVSYKERTANYNKSLKTFFKNYFKGFEIEKEVFEKLVEDFKNYPQFPSRYCAYSYKALNKLLPFIRMGNNRFSGQFSQDEVQKDPWKKSINERINTIIEKLNTIDFNAEVVDYSNVIEKGDLRKNILLFPKGLFNAFRGFKKTEDFTSLNLTQASYLVYGRHSELSQAKYWTSPDQIRDELHKELKHNSLNNPIAEKVLLEMMQVVAEIWEVYGEKNNDNTYKKLFDKIHIEVGRELKKSAKEKKKITDNQGKNRKQNKRLRQTLKEFLQATYNATPNSNDHFERLKIVENGARLDKKFFEENEKIKKEKITHKQINDILKKEEITKEDFDKYKLWIEQGYKSPYTNKIIKLTDLFDGNKYNIDHVLPQAAITNNSLDNKVVCETEINKEKSNKTGRAFILTNAGKEIYCTAHNGKVKIVDDATFLSTVKQHFSGTKREILLAKEIPNKFISAQLNTSRHIARKAMELLSHIVREEGEVEYRSKNVLPVTGAVTNTLKKAWKLDQVWKELVAPRFIRMNELTKSNIFGNWRTNKNGT

SEQ ID NO: 9573 - protein, 1212 aa, unidentified
  REGION 1..1212: note = Description of Unknown: Cas Enzyme sequence
KGDLKEVTRTTKTDDEGNVKEVTFTITDIYSLKIDKVDYKNEEGKHYFILHFNNGWKKETKPTKKYTFKYKDAIGKEYDYIIKTKYDKNGNVKLQQGDERNINEPDYNDDSSDWTLLKKKTEKKALIFNANNGYVDDDGNIKDYISLDIYNTLKKDTQTGKFTKIIGGKFQVVDRKFYREELNDIIRHQKKYHTKLKDKKIIKDCIELLYPNNKNHQKLLKNKKAIEALLVDDILLYQRPLKSKKGEIANCKYEIKYWVEQANEKTGEITEKPYYKKVVSTSHPLFQEFRIWDKIHNLKLIEIEQKTENSISTNVDVTKQYFKNSEDYQKLFDFFNNRKVVNQTQFLNYCKKKFKINTKNFKWNFPEVEELKGNETRISFITRFKRCGFKNYNDFLTLEKEIALWHYLYSVSYKERTANDNKSLKTFFINYFKGFEIEKEVFEKLVEDFKNYPQFPSRYCAYSYKALNKLLPFIRMGNNRFLGLFSKEEVEKDHWKKSINERINTIIEKLNTIDFNAEVVDYSNVIEKGDLRKNILPFPKGLFNAFKGFNKPEDFTNLNLTQASYLIYGRHSELNQVKYWKSPKQITDELHKELKHNSLNNPIAEKVLLEMMQVVAEIWEFYGEKNNDNTYKKLFDRIHIEVGRELKKSAKEKKKTTKTQGENRKQNDRLRKVLKEFLYQNPYNAKPNNKDHFDRLKIVEDGARLDKKFFEKNEIIKENKITQKQINDILKKEEITKQDFDKYRLWIEQGYKSPYTNKMIKLSDLFDGNKYNIDHIFPQAAITNNSLSNKVVCETEINKDKGAQTGRAYILASSGKSIKCEAHNKKEIKIINDNDYVEIVKQHFSGTKREILLSKEIPNKFISAQLNTSRHIARKAMELLSHIVREEGEVEYRSKNVLPVTGAVTNTLKRSWKLDHIWKELVAPRFIRMNKLTQSNIFGNWRNRKDGKIIENNENVKKKDVYFDCKIDNVLLEQMPDFNIKRIDHRHHALDALIVALCTEEHVNYINNIKADSSSKDYGKQKQIEKYRLTLKKKIKFSKPNKDNPKDKDWFYMLPGEFRQKATDDSSEKTKVKMNYLYKNNNSFNTDYKTMILSGLQNTVVTFKQNKRVINKSVNKYQKWDKNKQTIAIQEPEKLKEAQNHKKKYNWAVRRSLGEETFYGKVFLGETTNKQLHKIVDILFKRPYLITDEKLRNDISILKENTLSYQDFKAKI

SEQ ID NO: 9574 - protein, 1043 aa, unidentified
  REGION 1..1043: note = Description of Unknown: Cas Enzyme sequence
MKKILGLDLGTTSIGWAFVTEKERNGGEIKKLGVRIIPLTKDEKDEFAKGNQISTNANRTLKRGARRNNQRFKQRRDFLLKRLIQINFISDYKEVKSTNAFELYKARANAISEKISKIDFAKILILINGKRGYQSNRKANKEENETDYLNKIITRDRELVTRKITIGQKLFELIKDNPLASLKNNIYSRASYIEEFDKIWAEQSKYYPELTDKLKHEFKNKIIFYQRDLKSQKSLLSECIFEKHHKVIPASSPLFQEIRIWQRLHDIRIKDRKYQEEELSQEEKEFLFDILQEKEKLTDKQILKSLKLSTKEYSLNFKKIDGNTTRAKLIDIFTKTGYDIDEILDLDICLSGNDFDKQPFMQLWHLIYSAKSDKKLIVKLKETFLFNEEQAVAISKITYPLKYGSLSSRAIRKILPFMKEGHEYSIACQLVGYRHSIWITKEENEKRVLKDKLELVKKNSLRNPVVEKILNQLVNLVNAIIDDERLGKPDEIRIEMARELKMPAKKRKILSKNISDRTKQHEKIRKILIEEYGLRSVSRNDIIKYKLANEVNWVSVYSGKPIDHKLLFTSNYYDIEHIIPKSRLFDDSYSNKTICESNLNRDKGNMTAYDYMLTRGEEKLNQYLARVDDLFKAKKIPRNKHQKLLMQQKNIPTDFINRQLNETQFIARETTRILRQICRHVKVTSGSITALLRNSWELPFVIQELNVEKYRKINQTKLRDIKTNGNGKKRVELIFLKEKGKEIPWSKRNDHRHHAVDALVVAFTKQSYIQKLNTLNEQFDDRIALKEAAWKFPPPWLKFREDSKKALDEILVSFKEKNKVTTRNVNKIKNRKKGKDVVQIVATPRGPLHKETVYGKICRYASRKTPLKKINQENIQLVCNEEIKILLLDTLQRNEGDYKRAFNPKNNPIFYKGKQLLNVQCFEEYYTVRKIISPDLNIDKVTDAAIKKILNERLKIFNNEKKQAFSGLDENPIYLNKEKGITIKRVRVLEKASNVVALHHNKNKPIDYVFTGGNHHIAVFLEKGGKIIGESVSFFEAVTRKLA

SEQ ID NO: 9575 - protein, 1087 aa, unidentified
  REGION 1..1087: note = Description of Unknown: Cas Enzyme sequence
RYMQKHYPNWRDWLEQLDASEAPDLTELRSRKGKPLLDEEEQKLRRLQFILDRAQERDACRLNLIWSQYHRYQKGGDKAEQARKKQDEHLAASTLSEALKKELTPGAFTTKGSFGHFLNKYYQSRRKARDGRYFLHPLASKVQDKAKPGERKPRWDDINRLLTLCPHRPRQKRHQMAMDFAAIVGMPPKHLEAVLAGQALDEFLLKIDTLARNAENAAKAQKEHRGELKLKLQQRRDRKLTALAHRVENLATELAARLWPDADENEQKVKAKRFNSLFSFAQIHNLVFKERSGFSNTCPVCSTDNAGRMVEDEHGKALAARLPALSIRLIDGAVKRLFEYKSAEIARRHWPLIAPKLKAGYEVCVPLILEQNRFEFEPSLDSLKGRRGTKPAGFDESESFDAQTDRIKSASQGICPYSGKTLTGSGELDHIIPRKSDYGTLNDETNLIYVSTVENRSRSNQTYYLSNLAARYKDKQFGTADNDAIRQWIYQTLTGNEPGDDPHFVFGSYMSFINLNPDQQKAFRHALFLADDDPLKQLVIRALQNRNRTFVNGTQRYFAQVIADKLHQRAKREKLDGRLSFDYFEYPADPRHPKGTQRLRRALDLEEKGEVQEDYSHHIDAHMTFLLAVDDHQGDGSLGITFDHIDSVWPFDDGDITAYKNTEVPREMVNVIPLGRKASTTGNRPWRAYHRDNFYADRYMPLWMVFAGDNLAIKKGFAPDNAVPYQLNNKKSNTALQCIARFSSDGWMRAQAEQAKDWPDFCARVRKRFDGSPAYIPWARNMIEKHCVDTYPAQSLARGKKYGDDIKWLRELAYQTQKKAINSPEDIEKALKTDAKGKGETRKNGIDLPARSDWLRLHEAWDQAGRPMDEDFDRFLREYFLHEKNRRTDETRQPSHKKARRVFSLPIYNENAHYLQLRQSVTGDTVYQLIADSDSRKDGNKFKRAAMTPAGNMVEVVNEPFRSKRMFKLKQDKVYAGDDYINIDPNCWHEITRQKARQWQLDFPAKVQSIAYRIDNVTRPKIRLQFDDGATDDLEALLGILTRHQLTKPKETEKLKIALERGGAYVGSGFNKAVKQALSRLFQHESD

SEQ ID NO: 9576 - protein, 942 aa, unidentified
  REGION 1..942: note = Description of Unknown: Cas Enzyme sequence
LRELKKRFVKLGLFANTKAFETFLRKNSHQNNLWKTVETAHDNPITPEQFSAILYRFAKRRHYVDMRKKLSFEKSKTDKEKSDMKKSWSAMEEIHHTLPESSTWFEALFARRKKLIQLLKEAGVAFDEERFPYTNRKWNKFIDKEKYSALLKKKAITGYDLMLRNEQVAESLAQLSQKQRALGNNHPIFSDELMEQYIKLITFKGLQQSFADKIGVCLSGEELKRHPISSIDAEKSKIASTLHLLMNEIDKDGKVIREFKLSDTGLDFENLEKILTKLISAKNANKKGDIVASKLITALRTNGYLPKKKDFIFKNFKHKEKPNSTIVLRLPGHLRMLTLSPGLREILLKDNELRDEIEFTMLSFKDPDTLKERLSAIFSSGQIEAEEKDLDLLAFSDTGKPAACHNQTYRKILPLMAEGADFTTALTQAYPNALTNQKRYFRKTLDYKIYHRDQQRKGINSPYQDTIIKEFIFLFNRLVQKYGEPDRIVFETTRAILSEKAKKEIEDKINDNEKLNREIDTVLNSFVSQYGVKPAKGVRERLKLFVAQGGKLLADKNGNRQDAKCILTGKPISLEAAIEGDRTNTDHIIPRSWIHDNRLDNKMLLDKSINQSAKEDMTPIQYLISIGHTEDSAKTRLTEYINGMKLSKTKKRHIFETREKEIIKQDAENRIHSMDQRMKGEQDHAVKAIMSLLVDQLRFNTEKQLTVSQYRSRVLPINGSMTNLFRRGWLPDYKKERARFHNHAVDALVMLNFDRSMLQHYVKLLQESYLRDKDKIEIAKKKIVPTLENFASRTMEIVNDFEVQKRVVVRREIKKYRGRLYEQTAYPKGEQKSAVNVKGHFRKLESGFQKLLLYTNPKGKIQAVRIHPGNMQHTELAESFFDTLYRYSLIRIKSKLYCGYCYVIGYTESTGRLELTPANHSSDKRIRPTFSSLKEYAHIQKL

SEQ ID NO: 9577 - protein, 919 aa, unidentified
  REGION 1..919: note = Description of Unknown: Cas Enzyme sequence
ILRTGIRIFPEGVVAKTIGTGDREVSKNAARRESRQSRRGFYRHRLRRIKLLETLNEFKMCPLTVEELTQWKQYDKKKGQAGKTFPNSEEFNNWLKLNPYKLRAKALNEDISLFELGRIFYHLIQRRGFLSNRKGNEEGKIFSGKENMTGIDETNKQIKDKTLGAYLNSVIPKENEPYKNITDENGKELRARGRYTLRDMYIDEFEKIWQRQAKQLKLDKIQKEVKKESIISGSIYNKRNKHRIEKLQEKKGKENIKIEGNKLTIIEHIPLKEHLAGEIYYDEEGNLKHKSQESVLFYQRPLRSQKGLLAKCSFEGRKFYDKKNERWRTVGPTPCPLSHPEFEEYRALQFINNIEYGAKKRLDEHQRQMLYELFNKKDAGFDFKLIPKELRLTYETFNYADDFKVTGNYTNSKLSKLFKADIWEKHKEEIWHCFYFYTDNDKLIEKLKTDFQLAEKDENKISKIKLKDGYANVSLKAIRNITPFLKKGYKLSDAVLLGGVRNAFKTSNPDNVPYDRWGNFKDEHEKIEKDIIRINKDKKNKEGEAIKRIKEYLHENCGFEKDDRNFKKLYHHSQEIEQKKIQDRLDKIENLRNPIVQQGLNELRRVVNTLLDEHGKFDKIKVELGRNLKMGKKQRQETEFRIRDNNKKNEEAREKLSEYGLAHSRENVQKYLLWKEIEDRSGTAKCPYTGKTISISDLLGKENKFQIEHIFPRSTSLDDSFGNKTLCEAKFNGLKGNKTPYQFYKESNDANLWGGAKSWDEIQQRAFKLLPYRKAKRFTAEKVDEKADGFIERQLNDTRHMSKKAKEILSQICPKDNIRVMPGSVTSELRHLWGLNNILQPVEILDFKDAKINTEKPEKHWVVFDEKGKVLSFNPIYNEKPDVKENEIIISGNLNNKGEFSSKYISAKSQHDELKGNNF

SEQ ID NO: 9578 - protein, 1389 aa, unidentified
  REGION 1..1389: note = Description of Unknown: Cas Enzyme sequence
KFMKKVLGLDLGTSSIGWAVVNQAEKEDEKSSIVKLGVRVNPLTVDEKGNFEKGKSITTTADRTLKRGMRRNLQRYKQRRDKLKSILIENNIISKDCTLTEDGANSTYQTLELRAKAAKEEVTLEELARVFLIINKKRGYKSNRKANNEEDGVLIDGMAVARELYNKGITPGEYVYELLKSQKRYKPSFYRSDLQAELQTVWNKQADYYPTLLDNETRRKIEGKGKTETRKFFYAAHKISAAEEKDRKLRQVTYYQWRARAATSRIEPEQLVTVLSEINGDIAASSGYLGAIGDHSKELEIKKMTVGEYLLDLIKRNRHHSLKNIVFYRNDYIHEFNTIWNTQAKYHKELTPELKEKIEAETIFFQRRLKSQKGLISICELEGREISLACGKKVMTGPRVCPKSSPLYQEFKIWQDLNNLILENKTVKKSRKKSDALPSLFASTEPEKFSPLSQEQKQRLYRELYCTRELSAKEVLKVLELSDKDYALNYKKLQGNITQVTLLNAYKNIIEMTGHDVDKFDKMDAASKLHLVKAVFETLGAKGDFLTFEPGNSACEMQQYAMFKLWHLLYSYEDDNTPTGNGKLIDHIAELTGLPHEYAAALAQVTFVQDFGSLSTKAIRKILPHMKNEGMHYSDACQAAGYNHSKQSITKEEKGNRVLATHLELLPKNSLRNPVVEKILNQMIHVVNGCIDEYGAFDEIHIEMARWLKQSQKQREEASKHLNAKTREAESIKKLLAQPPFNIAKPSRNDVLRYQLYEELAPNGYKTLYSGTYISKEKLFTRDFDIEHIIPQAKVFDDSYSNKTLESRAVNIEKGSMTAIDYVRLKCGEEGVEDYKKRIAFLNKEGSRKKHKNLITEEDKIENSFLNRDLSDTQYIARKAKELLLQVTRDVIATTGSITARLREDWQLVDVMKELNWDKYSKLGLTTVERNRDGHEVRRITDWTKRNDHRHHAMDALTIAFTRHSQIQYLNNLSAKDEGENKDSSIYAIEKKELTKNGRFVPPMPLDEFRAQALKHLGNILVSIKAKNKVTTRNVNKPKGASISQVTLTPRDKIHDETIYGRIARYKKTLVEIDGSFDEHKISCVCNPTYRNTLLQILKQNGNDAVVAFTGENSPSKKPIYVDRNKGILMPDKIEISTLVYFFTKRVPVNAKLNVNDVVDEKIKRVLNQRIKDFGSKEKAFSDLEKNPIWLNKEHGISIKRVTVLTTIKGAVPIRNKKDKYGNTVFVDNKPIPSDFVEQKNNHHIAIFKDVDGKLHERTVSFSDALKNKMKNNMVVDKNYNKEKGWEFCFTLKKNEYFVFPNEKESFIPSEIDLIDPSNYCLISPYLYKVRSISSNDYIFTHHLETTINNDEKLKNITWRRIRNANGLKGVVKVSINHIGQIVKVGEYQ

SEQ ID NO: 9579 - protein, 1366 aa, unidentified
  REGION 1..1366: note = Description of Unknown: Cas Enzyme sequence
MKKILGLDLGTTSIGWAYVNEAETDNEKSEIIKLGARVIPLSTDEEMDFQKGKATSINADRTLKRGARRNLDRYQLRKKSLLEILKSNNFINDDTILSEEGKETTFSTYKIRAKAVHEKISKEEFAKVLLMINKKRGYKSSRKAKSDDEGTAIDGMEVAKYISDNNLTPGQYVYELLRKNKKFIPDFYRSDLQKELVLIWNYQKQFYSDILTDEFKEQINGKGKQATSKIFLGKYGIYTAENKGKREDVKLQSYKWRSEAINTQLTKEEIAYVIVEINNNINASSGYLGAISDRSKELYFNKLTVGEYLYNQLNENSHTKLKNQVFYRQDYLDEFETIWEKQKEFYPELTNELKKEIRDVVIFYQRRLKSQKHLISECEFETHHKAIPKSSPLFQEFKVWQMINNLEIRHIPSRTIYNNEKIDQEVKELLFNELNIKEKLKANEILNILVDKPKEYELNYKDGLEGNHTNAQLYKAYQEILILEGEEYDFKKLTADKINDIVVSKFAELNINQDLLFFSVDKQANEFDKQALLQLWHLLYSFEGDNSPTGDKKLIDGICHKFGFKSEHARIIANINLQSDYGSLSSKAIRKILPFLKDGSRYDTACGLAGYNHSSSLTKEEQEKRELKEFMELLPKNSLRNPVVEKILNQLVNVVNAIIKDDNLGKPDEIRVELARELKKSAKERDAMTRSINKATTLHEKIRKTLQTDFGITKVTRNDIIRYKLWLELESNGFKTIYTNTYIPKEKLFSKEFDIEHIVPKALIFDDSFSNKTLSVREVNLKKSNETAVDFLQNYLNPDDFNQYKSRVEKLYKDAIINKAKYNKLLMKASEIKEGFIERDLRNSQYIAKKATQMLQEVVRTVSATSGSITDRLRSDWQLINTMKELNFPKYEKLGLIETIEGKNGRTEKRIKDWTKRNDHRHHAMDALTVAFTKPAYIQYLNNLHTRKDKSSSIYGIEQKNLHRDKNGKLIFNPPLPITEFRTESKKHLESILISFKAKNKVVTRNKNKIKIKGKDNYKTKIELTPRGQLHKETIYGKIEKYVTKEEKINAKFDLEKIKSVAKQSYREALLIRLAEFDGDPKKAFTGKNAPSKNPMLLNKGVTQSDTLDTNQVPEKVKLVFKENVYTIRKDISPDLKIEKVIDIGVKRVLQKRLDEFNGDAKKAFVNLDENPIFINKDKGISIKRVTITGVNNVEALHSKKDHNGNLILDDKGNKQAVDFVSTGNNHHVAIYKDAKGNLQEEVVSFYEAVHRVNAGLPIINKEKDGLEFMFTMKQNEYFVFPSDDFNPEEIDLLNPDNASLISPHLFRVQKIANANYMFRHHLETNVDTIKELRNTAYIHIRSANGVNGIIKVRINHLGQIVKVGE

SEQ ID NO: 9580 - protein, 1199 aa, unidentified
  REGION 1..1199: note = Description of Unknown: Cas Enzyme sequence
MKKILGLDLGTNSIGWAVIKNDFDNKTGEIINAGSRIVPMSQDILGKFDAGQSISQTAERTGYRGTRRLYQRDNLRRERLHRILNILGFLPEHYKNKIDFNKNFGQFKSEIKINYKKNDNDKYEFIFMNSFNEMVKEFKEKHPKLFFIKENGEESKIPYDWTLYFLRKKALKEEITKEELAWVLLNFNQKRGYYQLRGEEEEIADDKVKSFEILKVKDLVETEDIIKKTGDKLFDVYFENGWKYDKQITKTENWINKTKEFIVTTSITKSGETKRTYKAVDSEKDWIAIKTKTQQDIDNSGKFVCEYIYEKLLTNPNQKIRGKLIKTIERKYYKNELKAILAKQIEFHNEININTEIGENLYLNSINELYKHNEAHKNNIINKKDGFQYLFIDDIIFYQRPLKSQKSNIGGCQYEYRSFKKEVKDSVTGKLKEIEVKQPIQAISKSHPLFQEFRLWQFMHNLRIYEKEKNVDGKPKIDFDVTFEIFQTDDDLVKLFDFLNNRKEIKQSQLIDFLVKEKYISKAEKDNYRWNYVEDKVYPMSDTRAQFITRFKKVKTNEGIVLSDTLIYKLWHIIYSVNDKEQYVQALKTFAKKNNIDIDSFVSVFEKFPPFKSDYAAYSEKAIKKILPLMRIGKYWNEKDIIDSAKQRINDIIERLESIDFNIKKIDSISDDDIQKQMLKSFVKFKNKKPFIGLNTYQAGYAIYGRHSEANNIAKWHNPKDIDAFLKNFKQHSLRNPIVEQIITETLRTVRDIWQEYGDFNEIHLELGREMKNPANIREKISKKNAENENTNYRIKQILKELMNDGVEDVRDFSPSHQEILKIYEEGIYQSSDIVDDDIEKIRKNPNPSKNDIIRYKLWLEQDYISPYTGSPIALNSLFSTDYQIEHIIPQSRYFDNSLSNKIICESEVNELKTNKTAYEFIKAHSGQIVTLTNGKQVKIFDLDNYETHCKRYFSKNRTKLNKLLSEEIPEGFLERQMNDSRYISKLIKGLLSNIVRDDGEQSETSKNLIPITGAITSKLKQDWGLNNKWNEIILPRFERLNKLTETNDFTYVNTEGNIVPTVPDELQKKFNKKRIDHRHHALDAIVIASTTRKHIQYLNSLNNDKEKYELQASLLIKNKEGHFTKHFQLAWNTYPTDVKNSLDKIIVSFKQNLRVINKATNNYQKWVKDDSGQFKKKLVKQEGQNWAIRKPMHTPLPY

SEQ ID NO: 9581 - protein, 1137 aa, unidentified
  REGION 1..1137: note = Description of Unknown: Cas Enzyme sequence
MKKILSLDLGITSMAYSIIEEFENDRYSLVDYGVSMFDKPTDKDGNSKKLLHSASTSTKNLYNLRKKRKQNLAKLFENFNLSTKSRLLNQEKQNLYINKWELRAKKAFDERLDTTELFSIFYALAKHRGYKSLDSGDLLEELYEKLGIDFQAKKEKDKSKADEKGKIKSALSTIENLRLEHPQKTVAQIIYEVELQKKNPTFRNHDNYNYMIRREYINDEIKKIILSQKEFGFFSDGFNVEEFSKRVVETIDDQKDSTSDMSLFGFCEYYKDKEQRVTHQYSLLSDIYKMYESVSNITFNSKPSIKITPQQIKLIANDFFTKVKKGKNILDIKYKDIRKILNLDDNFKIFNKDDTYLNRGKKQEHIIIKFHFVNTLSKINNQFILDIFEQENKYELLKDIFDVLCFEKAPHAIYEQLKEKIKDEKTIVDLIKYKSGNSLNISHYAMLKFIPYFEQGLTADAIKKKLGLNRKENYSAFKKGIKYLHINKFEEDDNLKINNHPVKYVVSSTLRVIKHLHSVYGAFDEIRVESTRELSQNEQTKKDIEKANRAFEKELDIIIEDVEYQKIAEQYGKNLRKYARKILIYKEQERRDIYTGEGIELKDIFTNVVDLDHIVPKSLGGLSVKHNLVLAHRDSNVRKSNQLPLYFVKDKQSFINRVEYLFEHHKINWKKKKNLLASALDETFQDTFESKSLRATSYIEALTAQVLKRYYPFPNKKKQSDGSAVRHIQGRATSNIRKLLGVKTKVRDTNIHHAIDAILIGFTNQSWLQKLSNTFRENMGLIDDEARANIKKEMPIVELIVNDKVEYLKPKELCQRVEESYSEFGEDSVFYRDVWGEVKVVNFWVSKKPMVSKIHKDTIYSKKQDGIFTVRESIINKFILLKITPTTPSQKFIENFQKNILKKMYLFKTNPKDIICQIVQNRAKSIATLLDTFKDIDSKNKELMSDAKTKLEELIHKDLVDNNGNTIRKVKFYQSALTGFDIRGGLATKEKTFIGFRAWLESDKLQYERIDVANFDTIKKKFDNSFRVFKNDVVFFVYPDGSFRGGKIVSFLDDKGIASFSNPKYPSLSEHQPKSFCKMGKDNNGNPKKSGAKQQNINASIGLIKLSLDIIGNIKSYQVTGNAESELLRFIKDVKNG

SEQ ID NO: 9582 - protein, 981 aa, unidentified
  REGION 1..981: note = Description of Unknown: Cas Enzyme sequence
MSKLILGLDLGITSIGWALVKTDNKEVQNNEIVASGVRIFTRAEHPKTGESLALPRRTARGARRNLKRKAQKLRAIKRLLIKNNILTSEELEHLFIGNKGQKDVWQLRHDALYRVLDNKEFARILIHIAKHRGYQSNRKSEAPSDKDGKAVLLGIEENSKLLATKSYKTIGEYIATKEKKRNGKRDGKLYYENSVSREMLVDEIELIFKIQNEFGALTLEDELLREYKKIAFTQRALKSVEHMVANCPFEPNEKRAPKSAITFLKFRAIQTLKHLRYIDSLGEHTLSIQQIEQVLEEAKSVKTPRTYAHLRKFFKLNDDVEFKGVTYFDAKTGEAVKSPEKDKLVDFTPFHKIKTVIQNVDNLFWDSIDEDDTLLDNIAYILTVEKNDDITLKRLLELKLPHSVSDALLTLSFNGVGHISTKALQKINKEFSSAESYDKACENAGYDFKAIFKGEKTLLLPPLSKQENVEMTNPVVKRAISQMRKVYNAIARKYGAIDALHIEFTRDIKKSYKDRMKIQKEQKAFQDTKEEARVYATEILGHEPNAKELLKFRLWKEQSGFCVYSNEEIKPYHLLNDLDTQVDHILPYSRSLDDSLNNKVLCFTKENQEKSSKTPFEWMDEKRFYEFSVRVKNLTLKKAKKERLLKQNFDESSEGAFKDRNKNDTSYISRFIKNYVEAHIAFKESHAKRHVFTMNGMLTTQLRYKWGVGDKNRDTHLHHAEDALILAFSTQSMVQKLSTISAKRENSSFIYKSKEEKSKALHFVTPMEDFGKKVRENVEEIFVSHMPRRKVSGAAHEETIYSAKTLSVTKENGKKEFLKGNGVTNNVKLKHGVAKNDSMPRVDLFQHKKSKKYFVVPIYVSDFVKETLPNKAIVAGNKPWLEMDEEYEFKFSFYKSDLIEIKTKQTAKKESVQALGYFTTAVSSTGQILLTSHDGKEEYLYGTQNLIFIKKYQVDLLGNYVEVQEEKRVGTLHENKKLRRV

SEQ ID NO: 9583 - protein, 1162 aa, unidentified
  REGION 1..1162: note = Description of Unknown: Cas Enzyme sequence
MDKIQSNSQIVLALDIGKSSIGFTLIDKANNYKILNAGIRVFDAPEKPKEQTSLALERGQFTRDRKHQKNSFFRTKNIVKTLLKYNLLDAKTIRNYNKSPKVQNCPKSKKKHLFYIKTAEYLFYKKANANDVLDLRVKALSYKLSNIEFARVLYSMNKHRGVTYDEIRELPESSSLSQDQKNLRDGFLKYKQEFQEHKESYQTIGEYLYKEHREKFRNKEKTSKSKQNIKNYYLFSIPRDDLKNEIETIFEKQREFKNNLASVEFEKEYLEWFLWEKESPDYNTLVAPCFYNPKEKSASKHHITSLLFIALEKLYNLRYKNYTEKEYKKLDIEQINKILQNSFEKLKGISYKDIKKILKLNDAEFKGIVDESKIVTNFETFIRVKNVLHLDFTMEEFNKEKSFLHNDLVKIIEILAYKPKESQKVEKLLELDIDKQKIDELVKIKFRGHLSYSLDVTKKLVLYMLDGLTPYKAKEEIKKEYGEAYIEKKHYLPPILETDFPLKNNHTVLRALSQVRVVVNDILKHYRKITQNSNWSFDEVVIELAREMNSAKEVKNINQQISQNTKLNEEAKEFCLECGINNPTQSQILRAKLWKMQGGIDPYIWVKSGEGEKTEHYTLDKIELNKLFDEDYCQIEHTLPFSRSLDDSQSNKTLVLTKTNQDKGDKTPYEWLSKEEFEKFESYIREKKTYLAYGEARVRKLLLKDFKGIDGFKQRDIVDTQIISKYTGLYIDKYLRFYNNPNFTGKRRVYANNGKITSLLRKSWAIGKKNRDTHLHHAEDAILIACSSPSLIKNIASFVNLQTKLTSSTLTEKKFNYILQNHKSLKEYILKELEKQKISLDDKEITSAIFKIIATKNYPYDGFREDFKTAIENAPVTHFVKQKNNGSIHDETISKIKDKEIKGIKIRGGIARNGAFVRCDVFKIVNKKGKISYDFIVMTAQHKGKKVEDLPTPMLKDGENATFMFSVFKNELLSYSLKDKTQIVGNFVKVASSIILSEPKNIENELFNKQIKALSYSYGKTDDISNLKEIMNDKKIQKELNINLLKTTKIDTLVTKLKSLCKNIKNTLTTTYNVNVVFVMPKMNTEQTNSLRDVLLKEKIVEDRLIISKDLKNTIFITLGASGYTQAMRADGQKKLIDLTKLKVNVLGEIVEKITFEKRKVM

SEQ ID NO: 9584 - protein, 1062 aa, unidentified
  REGION 1..1062: note = Description of Unknown: Cas Enzyme sequence
MKKRDLIFSFDEGHSSIGWNVIQETEAGPNVLALGTVTFTADGCLASKRRIFRGQRRTVRSRRQRIEDIEKLFIHQGILSETQAKEKHEQAGGNAYPWLLASAVLASNGKFTLNEKELFDVIRWYAHNRGYDGNKRWAGSADDENKEDSAKEEVAIDLMKNLSTQTMAETICAQLGLQPNGHKKASMKKYKDAGAAFPRKIVEKEVLKILQAHVGKIAGCTETFIETLCGENDSAWKKIPVENIKKTKTFRGGLLFGQKIPRFDNRILSFCPITDKPVPLKSAKEFMEFRCAMFLANIRVKDVIASEMRSLSKNELHIIWELIKEKGYLTASEFKRAVRSLGKFSQDNLDGLMIITESATNLIIDPVQKLIHSNQILSVLWSEIPDFIAKECLFQLGKKRSITLSEIISKMEENLSEGFVTALDKAYKKVQKKNPDKQQWLERKNYRASFDKGRAPYGRDIMKKVVLEVLGGKDPREKGGCLYITEEIREKVNHRKLDELTNNHLVRHRLLILNRLFDDMVDDFADGDKERIKTVVLEVNREISELSGKTTKEIKKEEGLKRAEHKKAREKMEAAVKDSGENIVITAGLIRKARIAQDLNWTCPFTGKEYDPIDLIHKQVDLDHIIPRAERLSDSMGGLVVTFSEVNRMKGKRTAWQFIQDEQGKPVKGKPVLSIRTMKNYETFVSKLKTFGGVKSDEARRKMRKQFLLMPDYKEKGFTPRDLTLTSYVTKLALQQIKNQFDTCRKKPQVIALPGRLTGETRKTWKLMGLLHVVNEKIDGKTLKNDIRSMSHLHHAIDATIMGLLAYYIKDLADGTTWQLLLKRYLTASEIQHLKDNLNHFKIDSKNRAHLCDIPSHVQKQIEQCLKERRVVQHVPSNMGGMHVEENTRGIVGFDSEKGKVLLQQKKDGLKKITTEVAGKLLGYDAEDGSKLKKQKGVRVINKNFGVALTQSTPEIITWHKVYPKLSSIYKRDGVWPNVLRNGMLISVFSGRYAGIWRILSIKNNATGINFSIAKPDAIAPFKQNVLLKSLMSAGLKKVETKLTGDGICHITSSKSIAPLFD

SEQ ID NO: 9585 - protein, 995 aa, unidentified
  REGION 1..995: note = Description of Unknown: Cas Enzyme sequence
KIFDFLNHKKEIKQSQIIDFLVKEKYIVKAEKENYRWNYVEDKIYPMSETRAQFLSRFKNVTAKEGVALSDALITAELIQKLWHIIYSVNDKEQYKKALKSFAKKNNIDTESFVSAFEKFPPFKSDYAAYSEKTIKKLLPLMRLGKYWIENEILDSAKQRINDIIERLENINFNKNKIEAISDDDIQKQMLKSFIHFNNRNPLCGLNTYQAGYAVYGRHSEANEITKWNTPADIDSFLNNFKQHSLRNPIVEQIVTETLRTVRDIWNEYGNFNAIHLELGREMKNPAGKRESLAKQNIQNENTNHRIKQLLKELMNDGVSDVRYFSPSHQEILKIYEEGIYNNPNSKYDELSIDDVDKIRKNPKPSRNDIVRYKLWLEQDYISPYTGNPISLSRLFSTDYQIEHIIPQSRYFDNSMSNKVICESEVNELKTNKTAYEFIKAHQGQIVSLTNGKQAKIFDLEVYENHCKRYFSKNKTKLKKLLSEEIPEGFIERQMNDSRYISKYIKGLLSNIVREEGEQSETSKNLIPITGSITSKLKQDWGLNNKWNEIILPRFERLNKLTNTINFTYTNTEGTVVPTVPDELQKGFNKKRIDHRHHALDAIVIAATTRKHIQYLNSLNNDKEKYELQPSLLIKNKEGHYTKHFQLPWSSFPMDVKNSLENIIISFKQNLRVINKATNRYQKWVKDENGQYKKKLVKQEGQNWAIRKPMHKETISGKISFDAPKGKVATAVRTSLSDIKNKKHLDKITDKGIVKILENHLKNYIDDKGKEDFENAFSPIGIDELNKNITKLNGGRKHQPIYKVRLYEVGSKFALSENENSPKSKKYVEAAKGTNLYFAIYETTEKKGNKKRVFDTIPLNMVIEHQKQMANLPKEQRTEIPVDNTKGKLLFTLSPNDLVYVPTIDELENINTIDFYNLSVEQKKRIYKMEKASGTECYFILNNVANLIKQYDAKSKIGEYGSQNKLQTTIEGQKIVNLCIKLKINRLGQIVKVGE

SEQ ID NO: 9586 - protein, 1188 aa, unidentified
  REGION 1..1188: note = Description of Unknown: Cas Enzyme sequence
MSQIITKRVLGLDIGSNSIGYALLMLNEKNSQITFEELISNSIIFSEPNTAEERREARSARRLHSRKSTRNKNSRKIFVDYALASKEFVDNPTTYFQNFSFKDKDVYRIRQRAVDGEQLSKNEFLLAIYSILTNRGYNNMFAIADNEEDGIINEAVTHNKQEYLAKNYLLPSIVLTTSRDKLKDEYQNIPIRNKKGNYSNSLDRDMHKEEFKKVVLSQATNKGLFESEKISEEFVEVMLDETTTNRAFFQRPLKSFENMVEYCSYYDEFNPKGSEKRMPLSNVANVELTLRQSIDNYNAINKNGEIKNFSQDEKNKIVNFWLNSPNADKINNKNIYKNAGFKDIKINIKDDKELLILNIQAYRGMLEVLKKYKIDFQGKDSEFYNAMLLELYYYKNYSSRVKHIEKLIKKYKLNIDNSFVDDVAKLKHMDGFGSFSLKFSNEVLNEMKSGKIHSEALEKLGYNDKYLDMPSYDYLPPLSPTKADIEWLQKNISYFNTNHLFYQPMMSPKVKRVIAVLRKLINELIKKYGKIDEIRIETARELNSKKEEESITKNQADYNRKNKEAEKLLKANGIHTNHKNIERAKLFKEQECECLYCDKNLTIDEAFDETCTEIEHFIPRSVIWINSQKNKILVHKKCNQDKGSRNPMDYLKSIGEWENFKGRIKLHSKSPKYRWLTDESIINSVMQKEHWQDSYLNDTRSATRSIQKYLNHYLYPQTQRYNKGGKTHIFSVTGKAISELKYMWGIHTVMPKTTEDKKDRNTNYHHTLDAFTIALCSPSAIQALHNHFKKNENRFKSKKMKENLATIMPTSTSGVNVVEHLKSLVEKYETNSMYVCPYNKRKTNMKGFKDGNLKLYVAKDPKDESKEVLAEMDKVYIDTSLLFKKDGLNLKSRSDKEVLDEVKSIQLRLNPIKQKKIIEALEVYVDILLILRKEIKDIDDNIKVLRKTKKTGVKYRESNQEIEESIKPIQERLKLVTNRQESLKCSYVTKNGKRQIVNKLNLHKVKIAKTSADSILFSRKKERSLERLSLSNFQKALADKEPFVVKENKSTLCVELYSHPKQNQVVGLKYFSSIANPHIKTKINEKYGDMFDEVEPSLVLYKNDIIKVVNTKENTISYYIFNGGGLVAGSNNKISIKNINLNTFVKVSKLGVVKESQESSVTPNKTTLVSKVKIDFFGNIIECKPNEN

SEQ ID NO: 9587 - protein, 1064 aa, unidentified
  REGION 1..1064: note = Description of Unknown: Cas Enzyme sequence
VYQLLKDGKKHIPDFYRSDLQNELLLIWKFQKQFYPEILTDEFFEQIQGKGKVATSKIFLGKYKIYTAENKGKRDEVKLQAYRWRKEALSKELTQEELAYVIVEINNNINASSGYLGAISDRSKELYFNKQTVGEYLYSQLQNDSHTKLKNQVFYRQDYIDEFEKIWKTQKAYYSELTDELKKEIKDVVIFYQRRLKSQKHLISNCEFEKYHKAIPKSSPLFQEFKIWQIINNIELKNIQTRVIYKNEDIEQEVKDNLFKELNIRAKMSDKDILKILVDKPNEFKLNYKELEGNRTNAALYEAYQKILEFEGEDINFSKMQADDISDRISSKFLELGININILSFNSELKGNKYDKQDIVQLWHLLYSFEGDNSPTGDAKLISTLNSKFGFKPEYARIIANVVLQDDYGSLSSKAIRKILPYLREGNRYDLACGLAKYNHSSSLTKEEREKRVLKDALNLLPKNSLRNPVVEKILNQLVNVVNAIIADENLGKPDEIRVELARELKKSAKEREEMTRNINKATSDHEKFRKILQNDFGITKVTRNDIIRYKLWLELESNGFKTLYTNTYVPKEKLFSKEFDIEHIIPKARLFDDSFSNKTLSVRQVNIDKSNDTAYDFLKEKLSEADFNQYLARIEKMVKAKKIGRAKYNKLMMKLSEIPEGFIERDLRNSQYIAKKAKEMLEEVVRTVNTSTGIITDRLRSDWQLINIMKELNMPKYEKLGLLETIEGKNGKPETRIKDWTKRNDHRHHAMDALTVAFTSYSHVQYLNNLHARDDKSKSIYGIEKKYLHRNEKGKLVFNPPMPLQEFRAESKKHLESILISFKAKNKVVTRNKNKIKIKGKDNYKTKIELTPRGQLHKETVYGRINQYTTKEEKVGSKFDLAKIKQVAKQSYREALLIRLAEFEGNPKKAFTGKNTPSKNPIYLADGKSEGVTSSDTPTRAILPEKVKLVWKEANYTIRKDITPDLKIDKVIDVGVKRILEQRLAEFDNKPKEAFANLEENPIWINKEKGISIKRVTISGVSNAEALHYKKDHRGEHILDQEGNKQAVDFVSTGNNHHVAIYR

SEQ ID NO: 9588 - protein, 956 aa, unidentified
  REGION 1..956: note = Description of Unknown: Cas Enzyme sequence
KQALKRVEELKQSSNKTVAQIIYELELQNQTPTFRNHDNYNYMIRREYIEEELKKLVDAQQYLFKNNKDDFFKKLKEIIVTQNESSNDLNLFANCQYYKEYKVANQYSVVADIFKMYESVANIIFNKEKISKEQIKLIADDFFTKIKKGKNIPDIKYKDIRKILSLGDDVKIFNKDDSYIRKGKTIHHTVTKFHFLSNLSKFDNSFIVQNLDNLEKLAEIFEVLNKEKSPKTIFEKLKGGVDEKTIIELIRYKNGKSLNISHYAMLKFIPYFQEGLTTDEIKQKLDLNRCEDYSEYKKGIKYLHINQFEKDDNLEINNHPVKYVVSAVMRVVKHLHTLYGAFDEIKVESTRELSLDEKTRKDIEKANKEFEKKLDDIKQNSEYQQIAQEYGKNLSKYAKKILMWQEQERLDIYSGKVIGLDDIFSNVVDIDHIVPQSVGGLSVKHNLVLVHRDTNLQKSNQLPMNFVADKEGFKNRVEKLFSEHKINFKKMKNLLATNLDEIYKDSFESKSLRATSYIEALTAQMLKRYYPFENEQKQKDGSAVRHIQGRATSNIRKLLHVKTKVRDTNIHHAIDALLIGVTNHSWLQKISNTFRENFGLIDDRAREKVKKELPLIEGVSVAEIVAKIEEDYNIYGENSVFYKDVFGNVRVVPFWVSKKTDSSRLHEATIYGIDKIKGEKTNLYTGYTTLRIDIIKLLKDSSKKPKLPKIGDNAENFLKDYEECIIKKLYVYQYNKNDKIIKIIRKKGIKIFEYLKRYENLDKTNKELKQKVEQELSSIIDEPLIDYNDNIIRKVKIIYSNKKDEHIIRGGTTVAERTGIGLNISLKNNKLQFKRIDFRDKLSNNIGKICNTKCLSVYRNDVIVCCFKKSEKNFIACFESFNEKRNTALFFNSKFPKKVDFQPKYLLQGKSRKEFGIKSMIGIIKLNLDVLGNIKFFSSMGEVDGELLGFLKEIKG

SEQ ID NO: 9589 - protein, 970 aa, unidentified
  REGION 1..970: note = Description of Unknown: Cas Enzyme sequence
WEGNKNKIYEIINNANNNYSYYKTIVGITNNLIDKYKALTDTDKFAHKNFSYILDESDYTDVKNACIFYWGEKTWTEKENKEKIIEQVANYYQSFFAETQRKYIELPTLTNILKKELKKNNIEFDIDKLYHHSDRKNIYLQKLKIDKETNTPLLPIDFKTKKTILPIPLIDSIKNPMFNKSMSILRRLINELIIKEYVDEDGVVQSYINEDTEMIVEVARELNDNNKRIAIERYQRERRDNKEKYKQYIRELKGEDIKSEEDDIFKFELWAEQVFTKPKDDRIINKNVEILKEKDAIKRYELWSEQKGQCMYTGKMISVSQLFTAEIEVEHTIPRSLLPDNTMANLTVCYSWYNSDIKNNKKPTSCPNYENDTNEGTAIKSRLKPWIEIRDRYKKLYDDRKKPFGIEDEGKKNRRIQEKHYYRMHYDYWEDKVSRFETEEIKESWVRRQLTDTQMVSKYAREFLKTYFKKVTVQKGSTTAEFRKIFKFQSEDEIKSRDKHTHHSIDAAVLTLIPTNSSKRVEILNKLYKSQEEKKPTYHTTPDGFTEFNAQELIDYINNNTLIVNYKKDKITEQTYRNVRKRGKIQYLKKNGKYVLDKGGNKIPLKAKGTTIRGKLFQETFIGKIKNVERDEDNKPLRNKDGSWKYLSGKDEFSNIVRKPITEAKVEDIVDPDIKKNIEKQLKEGKSISELKDHQGNIIRHIRVKTKAGKVLKERLNYKSKHDYKNKYYAAAGEIPYAIFITNLISGRLERKMIPVAIHEVAQVFKDKHKFNIDYYLEKFYPEITEKQDVKLLKVGQKVFVLNDDSEFEKRKEIDFQIKRMYKIIKLDNAIWLKYHLEAQKDTDIDEKLKLVKDNIVRKIEIDFNIPEVKEDANIENPKQRKDKYKKDRFSFSNYSDFRLDRLISIIGKEEVVKLRLKLRKIKTISSEIDKDIIIPLLKINKSERWNFLFENYDFKIDLTGETTWLSENK

SEQ ID NO: 9590 - protein, 1461 aa, unidentified
  REGION 1..1461: note = Description of Unknown: Cas Enzyme sequence
MKKVLGLDLGTNSIGWAIVEQDIDKKEGRIIDAGSRIIPMDGVEMSNFKKGLPQTKNAKRREKKGVRIGNKRYKARRNKLIFILQKLDMLPEQIKLSEPFQDPFKITKVNILPIDKHTHQLTAKDFLELKANAIHTPVGDKKDFGKILYRYNQLRGYAGGDENEDFQEEIDDVLGIKNENEFPAQVSRIQTFKVLNYTSTDNKKKKKIIYKITVEDNDGKKWEGETTVDGLKEGGLIELKQTIRRNRKKGTITSIEFSIPNKSSWRKKMENLEKALDEHSEKYGRKTYLSEYFLDVLKENKWQKIRDNVILRQRYKEEFDALWETQAKEHLKDIDRRIVEEIANFLFPGKSETQAKLRREGIEKGIKYIIKEQVIYYQRPLKDQSHLIGDCRFEKGEKVIAKSHPLFQEYKIWEQINKLSITKRTEVSISKKGKPKYEYIDRPLSSVTKEFLFNELQNKGELNFNSVFKKIKESEYFIENQDFFNGLSSKSKLIGNTTRITLKKRLGKFWDILKVDEIKNQIHLWEILYNGKGNEYDINSERNMLIKEYLEQNGVKRNEDNFEKIVIAISTIKFKREYSSLSLKAIEKSLPLVRAGKYFDAEKLSKEINTKIIKIVNESFTDPYELSLQNYLDKNDQLVLQEGGFVNAFALMLLYGKHTAKEISENDVFKSFNDLKPLKQNSLRNPLVEQIVNETIMIVKDIWKEYGKPDEIKIEFARELQNSIKERQKIHEANEKARKTNERIKKRLAELNYELSGGNIEKYKLWESQENKSDEFVKRYEATKSEIEKVKLWEEQGHLDPYTGKPIPLSKVFNKGEYDVDHIIPKSRYFDDSFSNKVLSARAVNREKGNRTAMEYFESGSNKCHILTKEHFIDHVSRHFYGKKRKNLLATKIPDNPIERQKKETQYITIKVREELSKIVGSNNIKTSTGGVTHYLRNHWGLTNVFKDLLYERFIEFYRLKAIKQYADLIDENLDNKQYLLKLAKGLLPELIYEKYKKQIDNANIEKEEEFIDFYTKCHIYKDKNNNLIIKGYSKRLDHRHHSVDALIVALTDEKAVKRLNDLNKHLQDWLKENINRFDIDFNDDNDNIFNLFVELDEQKRNRIFSDIEKFRNVEIPWKGFQYDVKRILDKIIVSHKPKDKILIQNKEEKDENGNIIKNKNEKIIKIRGPLHKETIYGLYKDNYEAYRIPITKLAGSQFDTKGNIEKITNSFLKEIIKQHFKDFNFKKSEAFNSEGIMVLNKKLSERTKIKNGKEHKASHPPIYSIKVYRKKPDENYKISLQKLDRGKSFNNKLYVNTRSNYLFAVLEKKGKRIYDLISLFDAVNLIKFEFVACKNKDLFDKNKVLKQYFEIKNEAKLIFTLKQLDMVYLPDENEDVVLDSSSPFYEEYWNDKERVKKIFTVEKFSGNQIYFLLNTTADVIEDKVELGSPNKLEFFKGRKIVEHCIPITLNRLGHFVKKEV

SEQ ID NO: 9591 - protein, 1452 aa, unidentified
  REGION 1..1452: note = Description of Unknown: Cas Enzyme sequence
MVKKLGIDLGSSSLGWFLRENDKIIKHGVVTFNTGMVKDQGGYSSPTKNRREARSKRRLIQARKYRKIALLKILIKNDYVPLTKEGLNIWSKYKKGQQRKFPENNEFQKWLACDFTYLENGEKYKNPYELRVKAIDDKLSRHEIGRAFYHIIQRRGYKDIGENNKETKTQEERRVEGGLKRALEEYKYLSKALKNNFLDKGQRARNEYPFRLEYEEELIAICKTQGFDVSKNEKNEYNDDFIKEIRKAIIWQRPLRSQKGNIGRCTLEPAKQRCSVSHPVFEIYRTWAYLNTIKYINENGDKKEIPLKYKEDLFENIFLKKDKNFKFDIIQKYLDKLFKEKKKYNYYNESTKKYDSTISGMPVSKTFIDIFGDKIKEELKNLHNNIGTKANKIINDKYSVHDVWHLIFNTENDYLENFAIEKLDVKNEVNKKGNTFNPIVKLKNEHFSSSYADLSIKAMCKIIPFLKEGFLYNQAVLLAKIPDVFKKQNKNWENEKEKIYKLIEKANIQYNNNKVIVSITNNLIDKYKALPYTEDFAYKNYDYKLDNKDLKDIENACISHFGKITWENITNKEEITKKLTEKYQSFFADEKRRYIELPTLTSLITNIFKENNIEINENNLYHHSNRKNLYPKPINNKKYDKQLLAVPLIDSIKNPMFNKSMSILRKLINELIINGDIDEYYNEEDKSDTEVVVEVARELNDNNKRIAIERYQRERENNREKYKEFIRELNGGNTNSENEDITKFELWAEQIMAEPNDSKKNINKNVEILREKDAVKRYELWMEQKGQCMYTGKMISISQLFSKEIEVEHTIPRSLLPDNTMANLTVCYSKYNSDIKNNKIPTNCPNYKKDEDLHKIGYCSAIEPRLKKWEEIRDRYKKLYEDRRKPFGLENEEQKNRRIQEKHYYKIHYDYWKDKIERFTTEEIKESWVRRQLTDTQMVSKYAREFLKTYFKKVTVQKGNTTADFRKIFGFQAKDEEKNRNKHTHHCIDAAVLTLISTNSSRRVELLTKMYKLEEETGEQYHESPDEFPGFNAQKLIKYIENNTLIVNYQKDKITEQTYRNIRKRGKLQYLKRNGKFVLDEKGNKIPLKAKGTTIRGKLFQETFIGKIKNVEKENNKPLRNPDGSWKYLTGKNEFEHVVRKPITEIVDAKTDDIIDPDIKRIINEQRQKGIAVTKLKDHQGNIIRHVRVKTKAGKIVKDRLNYRSNHDYKNKYYAAAGEIPYAIFITNFKNGRIERKMIPVAIHEIAQVYKDIHKFDCKYYLQKFYPNITKYDDIKLLKVGQKVFVLQNDDEFEKRLDNDFQMKRLYKIIRFSDGNIWLKYHLISIDTPSIDKYIKNKKHEYLLTIETKLNLPAIVEDETITDTKKRKKNFEDKLYKFSSLKDYRLKRIMDIIGELETKKIKEELDKYKVFSSKIEIEGETPLLKTSKNNWNFLFENYDFEINITGKVNWLI

SEQ ID NO: 9592 - protein, 1462 aa, unidentified
  REGION 1..1462: note = Description of Unknown: Cas Enzyme sequence
MNEIILGLDLGTNSIGWALVEYDSVKKEGKIIDAGSRIIPMDGAEMSNFKRGLPQTKNAKRREKRGIRVGNKRYKQRRNKLIYVLQKLDMLPEQIKLSKPFDDPLRLSKINILPIDKKTKQLSAKGFLELQVKAIHEPITKKEFGQILYRFNQLRGYSGGDDNDEFQEELDDILGISTEKEYPAQESRIQTFKILQVEPTKDKKKNKPVYKIKVLDIENNEWVGDTTAKGIKEGDLVELKQIIKRSKKSGEISSIEFSVPNKTGWRKQMENLEKAFDNHSKKYGRKTYISEYFLDVLKENRWQKIRDNVILRSRYKEEFDAIWDTQFKYHFEEIDKKTIEEIVWFLFPGTSSTQESLRKEAVLKGIKHIIKEQIIYYQRPLKDQSHLIGTCKFEKDEKVVAKSHPLFQEYKLWEQINKLSITRKLQVGITKNGKPKYEYIERSISSDLKEKLFDELQEKKELKFSSVFNKVKKTEDFIEGQDFFNGLSTKSKLVGNTTRQMFKKRLGKYWDILKLSDIDNQIKLWEILFNGKGNEYDINSERNKNLSVFLQKFGVDKNSSDFEKIVIAISKIKFKRDYSSLSLKAIQKVLPLVRAGKYYNLEMFPDNINDKIIKLVNENVTDDYDISIQAYLDKNDQSILQNGGFINAFALILVYGKHTAKEISDKEVLRDFSQIKAIKRNSLRNPLVEQIVNETLMLVKDIWKKYKKPNEIKIEFARELQNSKKEREKIHEANENARKTNEQIRKRLSELKYEISKKNIEKYKLWEMQINKDPEFVEEYESKKSEIDKMKLWDEQGHIDPYTGKTIPLSDLFNKGKFDVDHIIPQSRYFDDSLANKVVCATHINKDKGNRTAMEYFEAGSSKFEILPKEVFMENVAKHFFGKKRKLLLATKIPDNPIERQKKETQYITLKVREELSKIVGTKNVKTSTGGITHYLRNHWGITEIFKKLLKERFEKYFEIKAFEEINKLNIAEVSYKDHLISLCEKLLTETLAKAYIKKINGYSEISDDEFIKLYKKLHIYKDESNKLIIKGYTKRLDHRHHSMDALIVALTNEKAVKRLNDLNKELQDWLQNNINRFDIDFNDKNENVIELFNDLDERKRNKILSEVEKFRKVEIPWKNFQNDVKETLENIIISHKPKDKLLIQDKEEKDEKGNIIKHKNKKVIRIRGALHEDTIYSLQSNKYEAYRIPLSKFSGNQFDTKGNIKKIVNPFLREFVSKHFFEDYNGKKSDAFNAEGILALNKKLTERIKIVNGVEKKVPHPPISSIKVYRKDINNKKYKISLQRMDRENSYNNKLYVSTGSNYLFAVLKKDNKRIYDIISFFDAVNLIKEEFKNCKNKDLFNKEKTFKEYFEQKNNAELIFVLKQLDMIYLPEPNEDMILDDSSPLFKKFWTNKDRKKNIFTVEKFSGKQIYFLPHTNAEVIEKKVELGSQNKLEFYKSRKIVEHCIPIRLDRLGRIITVG

SEQ ID NO: 9593 - protein, 1481 aa, unidentified
  REGION 1..1481: note = Description of Unknown: Cas Enzyme sequence
MNEIVLGLDLGTNSIGWALVEYDSVKKEGKIIDAGSRIIPASQDILGKFESGQSVSQTAERTNYRSIRRLYQRANLRRERLHRVLNILGFLPDHYRDAIDFDKRFGQFKTEVKLDYKKGAEGKFEFIYKSSFNEMIEHFKKEQPDIFYKRKNGDESKIPYDWTIYYLRKKALSDKISKEELSWILLNFNQKRGYYQLRGEEEETKEGQEKTFEILKVKEVVATDEVIQKTGDKLYEVIFENGWKYDRLIAKPENWIEKSKEFIVTTSVKKSGEIKRSFKAVDSEKDWIAIKKKTEKDLEGSGKFVGEYIFDTLLSNPDQKIRGKLIKTIERKYYKEELVAILKKQKEFHDEINIETDIGRLLFKKAIDDLYKHNDAHKNNISLMGFEYLFIEDIIFYQRPLKSQKSNIGGCQYEYRVFKKEEKDAVTGEIKMVTVKQPVAAVSKSHPLFQEFRLWQFINNLRIYQYEKSVDGRIKIDVDVTNEFFKEDKDYVNLFDFLNDKKEVRQSQLMDFLAKEKYIDKKDKANYRWNYVEDKSYPISETRNQILSRLKKAGFNEQLVSAAFIKKLWHIIYSVNDKKQYLKALETFAQKNSLDIKAFVKAFEKFPPFKSDYAAYSEKALKKLVPLMRMGKYWREDDILQETTERINGIIERLQAINFNKEKIEEVADDDIQKQLLKSFIGFENKSPLKGLNTYQAGYAVYGRHSEAGEMIKWNSPEDVDVFLKNFKQHSLRNPIVEQVVTETLRTVRDIWQTYGEIHEIHLELGRELKNPADIRKKISQRNIENENTNYRIRQLLKELMNDGVPGVKDYSPSHQEILKIYEEGVYLNPDTRFDSLNEDEVLKIRKNPNPGKNDIIRYKLWLEQGYVSPYTGKTIGLSELFTSKFQIEHIIPRSRYFDNSLSNKVICESEVNLEKGNLTGYEFIKSKGGSLIDLGQGQSVRVYKPEEYEAHCKRYFAKNKSKLKKLLLEDIPEDFIERQLNDTRYISKYVKSLLSNIVREENEQTETSKNLIPVTGAITSMLKQDWGLNDKWNEIILPRFERLNKLTGTSDFTYLNNEGKIIPTVPDSLVKGFSKKRIDHRHHALDAIVIACTTRKHIQYINSLNNEKIRFELQSSLLIKNEKGDFTKHYQLPWNTFPVDVKEALENIIVSFKQNLRVINKATNKYQKWVNEQGQWKKKFVAQEGENWAIRKPLHKETVSGKINKTVPKGKVATAVRTSLTEIKNRKHIDKITDKGIKKILENHIRHYVDQNGKEDFENAFSPEGIEELNRNIKKLNDGKPHHPIYKVRLFEVGSKFPLSENKDNPKSKKYVEAAKGTNLYFAVYETEDKKGIKKRVYETIPLNAVIEHQKQVAHLPKEQRTAVPVDKSKGRLLFTLSPNDLVYVPTDEELENIAAIDFDHLSAGQKKRIYKMVKASGKECYFIWNNVASLIKQYDAKSKTGEFGSQNKLQTTIDELKIVDRCVKLKVNRIGNIVKVEHS

SEQ ID NO: 9594 - protein, 1195 aa, unidentified
  REGION 1..1195: note = Description of Unknown: Cas Enzyme sequence
MKRILGLDIGVSSVGMAIINESNNEKIIKNLSVRIIPEDPDFHGKFYSGNTASKNLGRTEKRGIRRGNQRFKLRRDKLYRLLKVHGMFPDESLMRLPAIELYSLRARAVEERISLKEIGRVLILLNQRRGFLSNRKSISEDESSSEYKERIAKLEKELNGKTIGQQLYNELKNSVKIIDVLIRERTYQRASYINEFDRIWDKQRDFHPDLLTGGSQLDSNKGTLYDEIRNRIIYYQRPLKSQKGLVSECEFEQHHKAISKSSPYFELFRIWQKINNLSWNTINGEKHYPNQEQKTVLFDALFYGQLKNGTELLNGKYKLTVGKIKNILGYKTRDKIYLNFTELDGSRTYSILKKALLKAGIEDFKKYLFFDYKKSDEKRGLFELWHITYSIPDEKDVVNTLKNRFGFTSYQSKIVADNVKYGSEYGKLSTRAIKKLLPYLEEGVGYSEACDKVGYDHSGYKTKIELKSNLKPVVKNSLRNPVVEQILNQVVNMVNIAIEEYGTFDEIRVELARELRNSAATRKRISMLNSKNRKLNDKIRTTLRDEYGFKIVNGRDIKRFKLWEETGKVCLYCNNPIQMSDILSGQADIEHILPKSRSFSNSMSNFILAHRKCNADKNQMTAFDFMSNKSEDVFNQYVEKVNALYKDGKGTISKSKFDNLLTKGENIPSDFVDRMLKDSQYIAKEAVKMLKIICENVYTTTGQITDLLRKEWELKDALQEVMIDKYREAGLTEYREYKDSKGDLKKYEAITDWSKRDDHRHHAIDALICALTDQKIIFKLNNLNKLFQYAKSTLTEEEIRDMEKVNKSRYDLKEFVAQGAYEFPVPIPNLREEVISHLESILISFKKENSKVLTKTINRTANKNEQTTWTPRGKLHEETIMGKVKRVSKQKLKLQKIKSLSDIELVISPNVKELLIKRIEKFGFNIDSAFSQKGLKKDKVFYKGKELKETATYEFVNTKRVELTENFTEAQLGKIADKEVEMTIRDFIANNGGSIKTAFKNIKNNPVKLKNGTIIKAVTVYDESKVEQIRTGFAKTGGNHHALVYVNEYGVFKDKVVSFYEAVAIGLQNIRESGKPYPIINRNDDPELGVFQFSMQINDLFVFDLKHSKHPQDENELDFFDMNNRKTISKKLFRLQKMSKKGNGQFDVHFRHHLETTVNRNIKELTWINISSNKYLGRLTKIRLNHIGQIIRVGE

SEQ ID NO: 9595 - protein, 1180 aa, unidentified
  REGION 1..1180: note = Description of Unknown: Cas Enzyme sequence
MKKVLGLDLGSTSIGWAYVKEAESENERSEIVKLGVRVVPLTTDEETDFERGNPISVNAQRTLKRGARRNLDRYQMRRAALIDVLKRNGFINESTLLSEEGKKTTFQKYRIRAKAVHEKVTKEDFARIMLMINKKRGYKSSRKAKQDDEGVAIDGMDVAKYLYDNDLTPGQYVYEMLKKSKKYIPDFYRSDLQAELDRIWEFQKQFYPEILTDDFKEQISGKGKQATSKIFLGRFGIYTAENKGKRDEIKLQAYKWRSEAPDRKLAIEEVAYVIAEINNNINSSSGYLGAISDRSKELFFKNLTVGEYLYRQIKENPHTRLKGQVFYRQDYLDEFEKIWEKQKEFYPELTDELKKDIRDVIIFYQRRLKSQKHLISNCEFEKGHKVIPRSAPLFQEFKIRQTINNIRVRHQDTGEVIGIDSIEGAAEHLFEELNIRAKLKDKDILKLIVDKPREYELNYEELEGNLTNAALYQVYEKILEYEGENVEFKKLKADSINDRVSTKFLELGIEPGLLSFESDLEGDEFDKQPLMQLWHLLYSFEGDNSVTGNKKLIEKIKTKFGFTEQYAKIIANVTLKPDYGSLSSRAVKKILPYLKEGNTYDLACGYAGYNHSSSLTKEELENRTLKDRLEILKKNSLRNPVVEKILNQMVNVINAIIEDEGLGKPDEIRVELARELKYSADERKRMTLNINKATRENDDIRKILQKEFGIPKVTRNDIIRYKLWKELESNGFKTLYTNTYIPKEKLFSKEFDIEHIIPQAKLFDDSFSNKTLAVRQVNIEKGNKTAYDYLKEKLSPEDFEQYKARVDKLYKDGVIKRAKHNKLLMKEKDIPDDFIERDLRNSQYISRKAVQMLSEIVRNVTTTTGKVTDRLRSDWQLINVLKELTLPKYEKLGLVKIIEGKDGKPEKQIIDWTKRNDHRHHAMDALTVAFTTRSHVQYLNYMNARNNQAHKKYHEVYGIEKKYLHRDKNGKLIFNPPIPVSELRSEAKKHLESILVSHKAKNKVVTRNKNRIKIKGGFKEKTEKTPRGQLHKETVYGKIHRYATKPEKVGSKFTEETINKVADKKQRDALLKRLNEFGGNPSKAFGGKNSPAKNPVYTIDNIKVPEKVKLVWKEPVYTIRKDVSPDLKVDKVIDEGIKKILRKRLSEFNGNAKQAFSNLDENPIWLDKEKGLTVKRVTIT

SEQ ID NO: 9596 - protein, 912 aa, unidentified
  REGION 1..912: note = Description of Unknown: Cas Enzyme sequence
MKRILGLDLGTTSIGWAYVNEAERENEKTEIIKLGVRVIPLTTDEETDFQKGKAISINAERTLKRGARRNLDRFQLRRKNLIEILKKNGFINDNTVLSEEGTSTTFSTYKVRAKAVHEKINKEDFAKVLLMINKKRGYKSSRKTKLEEEGNAIDGMEVAKILYENNITPGQYVYQLLKEKKKYVPDFYRSDLQRELDLIWNFQKQFYEEILTDEFKDQIKNRGKQATAKIFLGKYGIYTAENKGKRDEVKLQAYKWRKDALIKQLAIEEVAYIITEINNQINQSSGYLGEISDRSKELYFNKLTVGEYLYKQIKENPHARLKNQVFYRQDYLDEFEKIWEKQKEFYSELTDELKKEIRDVIIFYQRRLKSQKHLISECEFEKFHKVIPKSHPLFQEFKIWQMINNLEIRHIPSRIIYKNDQIEQDIKELLFNELNIREKLNENDILKILFENPKEYELNYKNGLEGNRTNAELYKAYKEILSLEGEEYNFNKLSAEKINDIIVSKFADLGINQEILYFNVEKEKNEFDKQAMLQLWHLIYSYEGDNSNTGDKKLIEAISNKFGFNNEHAKIIARINLQYDYGNLSAKAIRKILPYLKQGNKYDVACTYSGYNHSSSFTKEEKEKRQLKEFMELLPKNSLRNPVVEKILNQLVNVVNAIIKDENLGKPDEIRVELARELKKSAKERAEMTSYINKATAYHKEIRKILQTDFGITKVTRNDIIKYKLWKELEGNGFKTLYTNTYVPKEKLFSKEFDIEHIIPKALIFDDSFSNKTLSVREINLKKGNETAFDFLQHYISEQEFDQYKSRINKLYKDGKISKAKYNKLLMKSTEIPEDFIERDLRNSQYIAKKATQMLQEVVRNVVTTTGSITERLRNDWQLVNIMKEINLPKFEKLGLVDIIEGKKGQLEKHIK

SEQ ID NO: 9597 - protein, 955 aa, unidentified
  REGION 1..955: note = Description of Unknown: Cas Enzyme sequence
DINDVWHVLYTFDNEEKLRDFFIRRLKLNDEQLKELFRISLKNDYASLSLKAIRKILPYLKEGLIYSHAVFLANMGSALPDKIWNNEDNKKIVQDEIYNLIKTQNEEKQIVEIVNAMVKTNRDNNNTWSTEAIDLYKRDMQVRIESKIDKQRFVEYTDLRKSDIFKRAFSLFEQQMNKNSGRGEFARIKRIDERVKDFLIDNFNIPVDKLKKIYHPAAIEVYKPPFRKDDGRLYLGSPLITSIRNPMAMRALHQLRLVVNDLIGNDVIDENTKVTIEMARGLMNANERKAYQSWQDEREKERKKHTESIKEYFGDNYEPSDTEILKYQLWEEQNHKCLYTGREIGIAAFLGPNPEFDIEHTIPRSLSLDNSQVNKTLCDKSFNRSIKRNQIPAKLKNHSEIVERIEHWQNKVDDLEKQINYVVRKSKSLEDKDARDKAIQNRHKLTYRRSYWKEKYRRFVMKDVPDGFKNSQLVDTGIITKYSRLYLKTVFSKVYTVKGSIVSDFRKIWGIQEEYKSKTRVNHIHHCVDAITIACISKQEYENLAIFYHNRERAFIKGVGQLPPVRKPWRTFAKDVRSVVHEVLISHYTPDSLPKQTKRKVRKRGRIQYNKNGLPKYMQGDTVRGSLHKETYYGAIETEVNNKDGIKEKKIKYVVRKPLDTLDDKLVKNIVDEKIRNIVLEARKKEKQIRKDIEQLNKKLKNVEEAEEEKLLKKIVALKNEIESLYVLPNKNGNPVPIKKVRLFQPNVTTPLKLKTHRDKSLNSRKEYKEQYHVVNDSNYLMAIYEGTVNNKTKRGFKIVNNLEAGEFFKLSVKKVLKAQGLSGLSGLIPFEKGIGSSFLKLKSILKIGTLIILWEGKPKEIWELTNEDLKKRLYKVTGLSEQVVQGKYHFGTIVLRHVNEARPASELKIQDGVFKANEEYKAQRKMNHNQFNALVEGFDFKLSSIGVITSINKL

SEQ ID NO: 9598 - protein, 902 aa, unidentified
  REGION 1..902: note = Description of Unknown: Cas Enzyme sequence
MKKILGLDLGTTSIGWAYVKEAENDNEKSEIVQLGVRVIPLTTDEESDFKKGKATSINADRTLKRGARRNLDRYQLRRKYLIEILKKYHFINDNTILSEEGKNTTFSTYALRAKAVHEKISNKDFAKVLLMINKKRGYKSSRKVKSDEEGTAIDGMEVAKLLYDNNLTPGQYVYQLLKKGKKYIPDFYRSDLQKELSLIWKFHKRFYPEILTDEFKKQIENKGKQATSKIFLGKYGIYTAENKGKRDDVKLQSYKWRNDAINQKLSKEELAYVIVEINNQINQSSGYLGEISDRSKELYFNKITVGEYLFKQLKENQHTRLKNQVFYRQDYLDEFEKIWEKQKEFYPELTDELKHEIRDVIIFYQRRLKSQKHLVSECEFEKNHKVVPKSSPLFQEFKIWQMVNNLEIRHIPTRTKYNNEQIDYEVKKILFDELNIREKLSANEILKILVNKPKEYELNYKDGLDGNRTNAELYKAYQEILRLEGEEYDFNKLSAEKVNDIVVSKFAELNINQEVLLLNTNLKDNNFDKQAIIQLWHLLYSYEGDNSHTGDKKLIEAISKKFGFKPEYAKIIANINLQADYGSLSAKAIRKILPYLKEGNKYDIACVYAGYNHSSSLTKEEQEKIELKEFMELLPKNSLRNPVVEKILNQLVNVINAIIRDENLGKPDEIRIELARELKKSAKERAEMTKNISKATIQHEKIRKILQTDFGVTKVTRNDIIRYKLWKELESNGYKTIYTDKYVPKEKLFSKEFDIEHIVPKALIFDDSFSNKTLTVRDINLKKSNDTACDFLQNYLSDKEFYQYKARVEKLYKDDKISKAKYNKLLMKASEIPEGFIERDLRNSQYIAKKARQMLQEVVRYVNTTTGSITERLRSDWQLINIMKELNLPKYEKLGLIDVIEG

SEQ ID NO: 9599 - protein, 1493 aa, unidentified
  REGION 1..1493: note = Description of Unknown: Cas Enzyme sequence
MSKILGLDLGTNSIGWCLVDDTDNKIIKAGSRIIPMDAAAMSDYERGNLQSQASVRTGFRGTRRLYQRAELRRERLLRVLHVLGWLPIHFDDQIDWVEHPGQFKDGGEPLLPYRKGSDGKNDFIFNDSFQEMLDDFNEHHPELLANGRRVPYDWTIYYLRDKALRQPIRRDELAWILLNFNTKRGYYQLRGKDEFVAEDEPKDKREEYARLRVKEVNFLEPDQKKKGYNWYNIVYEGDIIQRAHSINEPHSVGDEVELIITTKLDKKGGVKLSKEGLPMITVRSPKEDDWKLMKKRSENAITKSGFTVGSYIYKAILADPAIKVRGKLVRVIEREFYRKELIAILSKQMEYIPELASKDAMEKCVAELYHNNEAHVASLADKTLASFFVDDIIFYQRPLKSKKSEIANCPLEHYHYINQDTGEIVEKPIKCIPKSHPLFQEFRLWQFVRNVSILQREKYINGKLRTDVDVTEEFITSPEDMARLYDELNELGSIRQERFLGLFGLKPDQYRWNYPEDKEHPCNKTHHDIVAALHKTAGKPTLTYEQELKLWHILYSVDDIIELRKALTRFAGAASIDTASFVGSFLHFKSYESDFGAYSERAISRLLPLMRVGKYWSADRIDAKTRQRIDKLITGIDDETIAKQVRENAIALNSVEDFQGLPLWLASYVVYNRHSEAIDATVWKSPKDIDYYLKFNFRNHALRNPIVEKILGEMLRVVRDIWDTFGKIDEVHVEMGRDLKSPAKKRAADSMRMAESERTNMRIRVLLQEFVNPEYNISNVRPMSPSQHEILKIYEDYALTNGEEVPDNIETIKDAIGNTSKPVAKSDIMRYRLWLEQRYRSPYTGDIIPLSKLFTPAYEIEHVIPQARYFDNSLSNKVICESEVNKLKDCMLGYEFILDKGGSVIKGSFGKEIHIFTKTEYEEFVRENYRKNPIKMRKLLSEDIPKSFIQRQMNDTRYIARKTIELLSHLVREDGEKEATSKNVIVTSGSITDRLKKEWGLNDVWNDIVAPRFERLNTITGSSDFGEWVNMDGKRFFRTNVPLAISLAFSKKRIDHRHHAMDAMVIACTTRNHVNYLNNSSAAEKNEGHRFDLRNKLCYKDKSLGSDNYTWRFVKPWDSFTADAKRELQSIIVSFKQNLRVVTRTTNSYWHYENGRKVLAKQKDGDGWAVRKSLHKATVSGAIRLQEKKKVRLADALLVPNLICDVEVRKVVSRTIEKYKHFDQKTILNYIKDNFANKVNGKDIRKVEIWHIPEQPTMSATRVLIDDSFDKKKIESVSDSGIRKILLAHLENYNGDSKAAFSPEGIVAMNRDIKVLNGGKDHKPILKVRKTEILGEKFPVGYVGSKSTKFVEADKGTNLFFAIYINEEGKRSFESIPFRVALERKKAGLSVAPERNGKNEKLLFVLSPNDLVYVPEEGEHVDSHLNLKRIYKMVSSSGNRCWFIPERVAFPILDGKEFSSHNKVEIALSGENIKVVCKKIIANRLGLIKKIEQ

SEQ ID NO: 9600 - protein, 958 aa, unidentified
  REGION 1..958: note = Description of Unknown: Cas Enzyme sequence
MNKEYYLGLDIGTNSVGWAVTDKEYNLSQFKNKDMWGIHLFDEAKTAADRRVKRTARRRLKRRKQRIQLLQELFAEEMAKKDSEFFIKLNESKLVLEDKSVKIKHPLFSDPDFTDIDYYKRYPTIYHLRSELIHDGKPHDVREVYLAIHHILKNRGHFLVEGNLEAATDFSSLIGNISETFNNYFSGEVLCEIDKDNYKKIEAILRDSKKAASSRAKEMASLIVFSFPEMDKALKKKCDNASKEITKLLVGNQADINKLFVESGYFDDEELPKIKFSAANYDEQTEPELQEKIPEEMIIINAIKAVYDWSLLVDILQGQEFFSDAKIQSYHTHKDNLILLHTFMKKYCSGAVCKEFFDAALPKKANYSNYVGHMKKNGEDIRVSKCNEEDFYKNLKSILTNVDQKQFDDQSRMVYEKLLVGVENKSLLPLQRSKDNAVVPKQVHEKELRVILKNAEAYLPFLSEKDEKGKTVADKVIDIFNFRIPYYVGPLGGSQIAESNSWMIRKKGKEEEHIYPWNFDEIVDREASNEQFIRRMTNKCTYLYGEDVLPKQSILYKKYMVLNELNNLTIRGKSVCPDTKKAIYNDLFMKRPKVTGKQLLTYLKKDDSELELSDLGGFDIDFKSSLSSYISFRDNVFGEAIEEDENLKIAEDIIKWATIYGDDKKMLIDTIEKAYPGKFDDNQIKAIKRMCFTGWGNFSRRFLEGINGVSKDDGVVGSIIDMLWDTNNNLMQLLSQQFTFSEQIREMNQKITGVIETVSYDELIKGLFTSPANKRAIWRTIKIVEEIRKVQGGPPKKIFVEMARGGEKNKTRKASRKQKLLDLYAACESDVREWIEEIEGRDEREFNSIKLYLYYTQMGKCAYTGNPIDLEQLMNGSHKWDRDHIYPQSKIKDDSIDNLVLVERVENAKKDNGMISESIQGKMRPVWKAWLRNGFISKSKYDKLTRREDFSNDELAGF

SEQ ID NO: 9601 - protein, 1342 aa, unidentified
  REGION 1..1342: note = Description of Unknown: Cas Enzyme sequence
MNYYLGLDMGTNSVGWAVTDTQYHLLRAKGKDLWGARLFDEASTAETRRAFRTGRRRLQREKARIGFLKEVFSEEINKVDPGFYQRLEDSKYFIEDKTEHQPFSLFADKNYTDKEYHDQYPTIFHLRKELIDSSEPHDVRLIYLAVLNIFKHRGHFLNRNLSDKGQENFKDLYYELCNEESMYSFPNLTSTKELEEVLSSKNYSNTKKWETVLELLNINKKSAEAEILKMICGLSGSISKIFTDTEFDEETEKLKLCFRDMNLEETMGKAEEILEEEEYECILLLKKIHDWALLASIMPTDGPQYLSYARVESYEKHHKDLLVLKRVYKNYASKHYDEMFRIMSDNNYSAYSGSVNSKIQQRRGGKRRLEDFYKNIKSAVSKMPKDDDTRYILEEIEKETFLPKQLTNSNGVIPMQIHKMELSAILKNAERYLDFLTQKDDTGITVSQKILDMFSFQIPYYVGPLVNTEDNNAWVIRKEKGKVYPWNFNEKIDVKASSEEFIKRMVKHCTYLNDESVLPKDSLLYQKFMVLNELNNLKINGEPISSDLKQNIYNDLFSKGKKVKKQQLINYLKAQNIVDIKDDPEITGIDNDFVNTLSSLKRFKDIYGVENLTQEQKSMTEKIIYWATIYGDSVKFLREKIKENYGDKLSDGQIKRITSLRFKEWGRLSRQMLTLEGAEKNTGEIKTIISRMWDENYNLMELLSDKFTYIDRINDKVSNIDKSLKEFEYEDLDPFYLSAPVKRMVWQTILIIKELHSVLKSSPKKIFVEMARDVDAKKERKDSRKKKFLDLYKACKDDGINWLESLKDIPEERFRSKKLYLYYTQKGRCMYTGDIIDIQDLFNDNLYDIDHIYPRHYVKDDSLDNNCVLVKKEKNAHKSDVFPLEDELRKKQAPFWKMLADGGFISKEKYSRLMRRNSFTMDELAQFISRQIVETRQGTKFIAQLFKEVFPESSLVYVKAGNVSSFRQNFDLLKCRAINDFHHANDAYLNIVVGNVYDVKFTRNPINFIREYKKDPKAHPYHMSRVFDFTVKNKSETAWVTENNESISIVKAVMKKNTPLITQMNYETHGGFADQTIYSADEAKKAKGVGYVSVKSSDSRLCDTTKYGGFKKFTGAYFFLVEYTNKGKRERKLEPMPLYLKHILEKEDNLEKYCAEILGYKDPSVRVRKIKMNSLIKVNGYYMNLTGRTGKQLRVVNAVQLVLSQDYSDYIRLIQKDIDVKDVERLKYDSITAERNIKLYDEYIDKLKVSIYRFKPNAIGDKLIEERTAFVNLTVDKQIYILNQILTLFVRLNNGADLTLINGSKSAGVSLISSELTKQKSVVLVNQSVTGLFEKEIDLLKI

SEQ ID NO: 9602 - protein, 1330 aa, unidentified
  REGION 1..1330: note = Description of Unknown: Cas Enzyme sequence
MKQNGNNEKQGNWYLGLDVGTSSCGWAVTDQDYNILKFKGKSMWGARLFDEANTAEARRTARTNRRRLNRRKQRLLLLESIFTDEIKKLDPNFFVRLHESNLWAEDRTESGCKYTLFNDPSFTDVDYLKKYPTIYHLRSELIHNDQPHDVRLVFLALHHIIKSRGHFLWESSANSEGKTLDEAMEDLETRFESDGLSFSPRDPALFKDVLSSADSVSIKKEKLNKAFGDLAKTEEDSLDYGAFLDLLSGATVKLSKLFCDDSLTDADIKSISLKDDIDSQMDQLTILLSDRADYIFYAKEVFDIAKLAEFLGTNEYLSDAKIVLFKKNERELKVLKNFVRNNLSAEDYKAIFHSGKGNNLCAYLASDDAEKKCSQEEFCKYLEPFVAGMKDSVDDEEENVYKEIAGRTFLTKLKGSSNGVVPYQLQRKELIAILNNAEHYLPFLNDVDSDGYRTSDKIISLVEFRIPYYVGPLKNGWAVRKNSNERVYPWNFEKMIDEEASAEKFMENLVGRCTYTGAPALPLNSLLYSRYMVLNAINPIKVNGYPIDVRTKQQIFNDLFVKSRKKVTKKSIHGYLLSKGLIKQTDEISGIDDEINASLKSLHDFSSMRDHISDADIEKIIKAILVYGKDKKMLGSWIKKNVKCVTKDDLRCIRSFQYSEWGRLSKEFLTEIYHTDENGEVKTIMDMLWETNNTLMQLLSDRYQFLVNAQEYRKEQFGVGDSVREQVEDLYIAPAVKRSIWQTLKVVDELVDVQKSAPAKIMIEMARTNSKELKKKRTVSRKDTLSELYRSCAKEAFQFIPKEKFEKVKSRLEKETDQSLRRDKLYLYYTQLGCSAYTGEPIDFEQMMLEDKTYDIDHIFPRSLIKDNSLNNRVLVESHLNREKTNEYPIKDSIRKKMLPFWKMLHDKNLISDVKFERLNRCTPLTEEELSSFVARQIVETQQSTKALAEILHNSYPTSRIVYSKAGNVSDFRQEFDLPKFREINDLHHAKDAYLNIVVGNVYNTKFTDQFFKNITHEKYSLNKVFDFDVPKAWKADGTSIRTVKKYMAKNNPIVTVAQIEGKGMFFKLNPLSKGKGQLPIKEGMDINKYGGYDKVSGAYFCVVEHQKGKKRIRTIQPVLLYAKDEYENKPEEYCENVLNLEKPRIIVKKVPKNAILELDGSRLLITGRTGSQNVYRHAYEFSVDNEHGQYLKNLQKYCQRCATAGKDVELKVTSCDGISAEDNVKMYDWFISRIEQPCYLKLFNNERKQLSNCRDAFCSLSILKQAKALMEILKVFKCDSVFGNFKEFNGSSGTAGRVQKSSNISSFTSAFLIHQSSTGLYETKVDLLK

SEQ ID NO: 9603 - protein, 1389 aa, unidentified
  REGION 1..1389: note = Description of Unknown: Cas Enzyme sequence
MNLRKAENYTVGLDLGTGSVGWAVVDENCKLFHFKGQPTWGSRLFPSADTAAATRLKRGQRRRYERRRQRIDALQGFFLNDMEQVDPDFFIRLRQSRLLKEDKDETIRGYRWPLFNNSDFTEADYYRRFPTIYHLRRYLMEADEKVDLRLIYLALHNIVKYRGNFLHEDEGDSLKAANANASAAAEELCTALWEYLRDLPDVGEEIDCDVSAVERALDERGVRRGDRVDVLSGAFVARGKDAQDRCKLVCKACVGYKVDFAKLFAGLEGLEGTNFSLSDEEKVQSFVDEQCPDEARVLFDAIQAAYSAFVLSGILQSASSISDAMVRSYEQHKSDLAMLKDLFRDYLSHDQYNEFFRGAESEPGRYDINVLVKGSYTSYVVGEKGANKKGTSHDELVKRICELCDMNPAIKEDERYWEIAERLEAGEDSDFLVKQKTRSNGVIPYQLHLEEMDAIIRAQGVYYSFLLENREAIEKLVSSRIPYSVGPLNPGRDPKGPYPNNPVDSTRKFAWSVRRPGMEHAKAYPWNVDEVIDTDETAERFIRRMTGTCTYLYGEPVLPRHSLLYEEFCVLNELNGAKWCYKGGKPKRFDHVDKERIVQELFKNRKSANVSYSLVQKWLCEEHCAVDAEVSGGQGETGFESKLSTYHDFCKLFGVRDLSDAPLSFDEMEEIVLWSTVFEDRAIFKRKIMAKYGLDGDGRLSSEQVKKIVNKRYAGWGRLSKKLLTGIKVPASVPSGFVSIMDVMRNGNPFAKLQQLVLMEALAERDLGFSLAIEEENKRHFNETGLELSIEDMQGSPANRRSVNQAMRILDEIIDITGKPPARICIEVTRDDDWQKKGRRTRSRYNQLKDALKAFKADAKMLGDLEELKDRLDDDRLLLYFAQQGKCMYTGEPLSINQLSTYQIDHILPQSYIKDDSIDNRVLVKSGANQRKLDSLLLDDSIINARYAWWKALCDTELISRKKFERLTCRNLSERQVQGFINRQLVETSQIVKFVRQMCEQNYPSTEVVSVRASVSHGVRDNLGLVKCRELNNYHHAHDAFIACQVADFVGRCYPTWQDGLDIRVIMKRANGLKGRSGFIADSMTESVRVVEETGEIIWDKNERNAYIRKALGYRTCFISRMTEVATSGFWDETVYSPRDERNGKSLFMPLKSSRQERNHEGYLDPRKYGGVSSVKQAYWFIFAAKDKKGKYRYFFEGVPIHLAGQIGGGLQDYADEIAASAKCGKAIILRERVPLRQKFELDGTPYYLYGDGEIRPARELFGRAELVYKLFSEPDELTSEQLEDIFVWLGYSAWIVFPNIASNFKLNTLYERFQSIDRASKVEQLKAIIKKLNGENQKLDMSWLGGSKTGGNVRKSFTKELPNITWIDQSVTGMFEMRTTFEDLCRGL

SEQ ID NO: 9604 - protein, 1077 aa, unidentified
  REGION 1..1077: note = Description of Unknown: Cas Enzyme sequence
MKTNGYVLGLDIGVTSVGIGVLEKSTGKVIFSGVRLFEEADATNNQKRRARRSGRRMKSRRRTRLDDALALLKNEGLCDGEIDPSIDPYEARLKGLTTKLAKDELSSALYQLAKLRGSSLDVVEDSDKETADDLSAKATLAENDKLIKEGNYIVQIQLKRLQENGKIRGHSNNFRTKDYVNEATQILLNQDVSDDFKKAYLSLIKRRRGFSEGPGSSVSPTPYGRWTSAGQLEPIDLIEKMRGHCSVYPNEMRAPKMSYRANLFNLLNDLNNLTINGSKKITQDQKEKVIKVIDAKGSITVKQLTKILGIPESGITGFRVNKSGKPLLTEFKGYKEIKGILNDSGIYEDHFLVDEICEILTRTKVVEQRKSALRELSSRFSDSEIDQLAQINDISGYHSLSAKALDEFNEIMLETNQNQMQILSAKAEEPERLAALKGKKYIVSDDEAVLSPVAKRAQREAIKVVNRMRELYGEFDNIVIETTRAKNSQDEKNRINEQQKFFEDKNKKAEKLLEESHSNAKLNGKLKLKLRLYEEQQGKTPYLLEPIDLRLLINDPTAYEVDHILPISISLDDSYSNKVLVSRSENQKKGNLTPLQAFEKHRFSSDITARDFIANVQHLHEANGNKYNRKMNNLLCEENLNKEETLSKFINRNLVDTSYANRVVLNTLQDYFRANEVGTVVSTVKGSATHMFRVKARIDKDRDDLTVGNAHHAIDALIIASIAVYPRMNKLLSKYQKTEMGVYDAETGEVPEEVADDKFFDPQYIELITKLLALDAKTVKFSYKIDTKPNRQIADETIYSTRTYEDGEYVIKKYKNIYDPKQVAIANDLLDESKYSKYLMYRNDKQTFDILLDTVLYYKKAYQDNAKVFDKKGNKFLKNPLAIMLEETGKKFRKYSKHGDGPEIDSIKYKDSKLGNYIDISKNYNPQNKRVILQQISPYRTDFYYSPKDGYKFVTVRYSDIRFLKEDNCYEIDPSWYQGQLKKKGIDDSFQFCFSMHHGERIQIIKDDEDPQYSPIWRYVATNNDMKNVIEVKHVEFKDSKQIMLTIGKKVTLIRKFTTDVCGNMYEVTNQQLKLKL

SEQ ID NO: 9605 - protein, 1200 aa, unidentified
  REGION 1..1200: note = Description of Unknown: Cas Enzyme sequence
MVQNYKKRFVTPKIVCNFIATIISIHIFMEKILGIDTGTNSLGWAIVERNNEQYKLIEKGTNIFAEGVKIEKGIESSKAAERTEHRSVRKHYWRRKIRKIRLLTILSDNKLCPPISKTDLRLWRLKKVYPSNEDFISWQRTEDKDGVNPYHYRYICLTQKLDLNNQAQRYILGRALYHLNQRRGFLSNRKESTKESEGSVKEGITDLTKDMESAGCTYLGEYFYHLYENGEKIRSHYTSRKEHYLKEFHAICEKQQLDSALVHDLEKAIFTQRPLKSQKGLVGKCTFEKNKTRCPSSHPLYEDFRMYSFLNNIKMRTPHDIDLRYLTADEKMKIIPKFKRKSKKTFLFEDIAKELAGKNNYCYDRDEADKPYRFNYPMDTSITGSVVNAQLEDIFGENWLDSVCEVYTLANNKSPFEIMNDIWHALFFFDDEEKLKDFAKNRLQLNDEEAEKFSHITLPDDYAALSLKAIHKILPYMKEYGLIYSQAVFLGNLSEVVPNYIWNIKEMRDAVIENVINMMQSYDRQTEPRSMEQCITELLHDRYQIDEAHLKKIYHPSMIDLYPRVQPNDEGIYQLGSPRIKSVRNPMAMHSLFRLRKVVNLLLKENKIDENTTIHIEFSRDLNDANRRKAIQDYQKSNKNVRDSFRKKIEEFGVKEPTDTDILKYQLWEEQGHKCVYTGDEIGLSDFLGNNPKYDIEHTIPRSAGGDSTKANLTLCNSKFNREVKKTKLPSELANHEEILLRIANWKEKYEELDKRIRKLKGIRSSSKDDKDSIIRRRHLLSLERDYWRGKYQRFTMTDVPEGFSRRQGTDISVISRYARLYLKSIFKQVYIVKGIATSDFRKIWGIQEEYTKKERINHAHHCIDAITIACIGKTEYDKLAQYYHDEEAHRWGQSLDKAQFAKPWPTFVEDIKAIQDELLIAHYTKDNMAKHTRKRDKRKYIQGDTARASLHNDTYYGAIQYGDEIKYVVRKSLDSLNDKDVKHIVDDAVRQKVEDAISKYGNLKNALEVGIWMNQEKNIPIYNVRIFTPSVTRPINIRQHRDKSRHEYKRQFHVQNDRNYMMAIYIGHDKKGKEKREFELVNNIDAARYFKRSCCNNDELVPKTSYKGGYPLAYCLKIGTMVLLYDESPDEVWDLDKESLVKRLYKVTGLSSYILQQKYDYGTIELIYHQDARPSSEINKKSGEYRIGEEFMWKCLRTL

SEQ ID NO: 9606 - protein, 1533 aa, unidentified
  REGION 1..1533: note = Description of Unknown: Cas Enzyme sequence
MKKILGLDLGTNSIGWAVVNAEEAKRENESTYLKPIGISSTGSRIIPMSADILGDFDKGNSISQTAERTRFRGTRRLHERNLLRRERMLRVLKTIKFLPQHFAMQIDQYGKFIDNNEPKLAWRKENTGKMEFLFKDSFNEMLADFAVNQPQLVANGKKVPYDWTIYYLRKKALTHKITKEELAWILLQFNQKRGYYQLRGEDEDEQRDKLVEFIVQKVVRVEATDEKKGDDVWYNVYLENGMVYRRTSKMPLDWEGKVKEFIVTTSLEKDGTPKKDKEGNVKRSFRAPSEDDWTLLKKKTEFDIDNSNKTIGCYIYDNLLQKPNQKIIGKLVRTVERKYYKEELRQILETQIALIPELKDEILYDKCIEELYPNNETHRNNIARTDFANLFINDILFYQRPLKSKKSLISDCPYESHFDKDGKEYPIKCIAKSNPLFQEFRLWQFVQNLKIYQREKNLDGKMLTDVDVTCELLKTEEDYVKLFDWLSNRASIKQDTLLNSFFNFKKEKGEDHYPYRWNYVEDKEYPCNETRAIMLSGLAKCSIDASFLTREKEISLWHILYSVEDKTEIGKAMKKYAEKNGLSDSFAEVFSKVKPFKKDYGSYSEKAIKKLLPLMRMGKYWSVDNIENKTKERIDKILTGEYDENIKNRVREKAINLTNIEHFRSLPVWLACYIVYDRHSEAKEIEKWEKPEDIDNYLKGFKQHSLRNPIVEQVITETLRTVRDIWKQEGQINEIHLELGREMKNPADKRKRMTERILQNENTNLRIKAMLMEFVNDPDIENVRPYSPSQQDILRIYEENALDNLTKEDKDFDFISKISKSSQPSKADIIRYKCWLEQKYCSPYTGEMIPLAKLFTSAYEIEHVIPQSRYFDDSFSNKVICETEVNKLKDKQLGFEFIKSHKGEKVQISQGKTVEILSVETYEKFVKEHYANNRTKMKKLLMDEIPDGFIERQLNDSRYISKLVKGLLSNIVREKLENGECEQEAVSNNLISCNGSITDRLKKDWGMNDVWNSIILPRFHRLNELTGKECFTAISAEGHLIPTMPLELQKGFNKKRIDHRHHAMDAIVIACATRDHVNLLNNEAAHSKHNANRYQLQRKLRRFEKIIINSKEREIAKEFIKPWDSFTTDARQALENIIVSFKQNLRVINKATNSYTHYDENGKKVIVKQEKGDSWAIRKSMHKDTGWGEVNLRFKKEVSLNEALKNPKAIVNKDFKEKVLELLREHYDAKYIKKYVEDNKDVWSDIDIKKIEVYYYTKENKDRYFATRFMSDLVGYMSGIKEYDKAVAKIKGITDTGIQKILTAHLHAKDNNPELAFSADGIDEMNRNIVELNSGKPHKPIYKVRRFESGNKYSIGQTGCKAKKFVEADKGTNLFFAIFRTEKINKETGETETIRSYLTIPLNMMIDCQKKFGSQWRNNIEIYLQEQHLVASDAKLLFILSPNDLVYLPTQEELKEGIKVTDKKRIYKMVSCTGNQCFFVDEKVAKVIVDKFEFTSMNKMERAITGEMIKEICIPIKVDRLGNIIELNGKKLK

SEQ ID NO: 9607 - protein, 1098 aa, unidentified
  REGION 1..1098: note = Description of Unknown: Cas Enzyme sequence
MKYSLGLDLGTTSIGWSVVNLDKNRIEDLGVRIFEKPENPKDGKSLSVPRRTARSARRRLHRRRQRLNYLKDFIVDNGIMDRAEVEKTLTPHKGQKNPYELRRKGLNEKLEPDELVVALYHIAKRRGYKSNRKAVEESDSDGRKVLGAISDNAKLLDDGRKTVAEALLANDKFAAHKRNKRDSYTNSFYRTDFENEMKAVLRKQQEYYQQLSDGNIDKLLYEKNRGLFYQRPFMTPDLIKKMQGKCPFEKGQPRLQKASYTFELFRVAQDLAHLSFTARDEVSGKLEYGQMLTHDEIMACIEKCKATRKVTYKAIREVLGHKGDEDFSFDYIRGKQPKAEDLAGDKFAMEKNEFAQMKFYHDVKKALKNQPEDWSRIEKDIDLFDRIGEVLTFNKDDDGIRNELTELGFGDDSVTELLKLNYSGFGHLSSNAIRKITKYIIGDEQHEPMTYDKAVVAAGYEFKQKLHGDKSKLPPLSEDEQNQITNPIVKRAISQTIKVVNAIIRKYGAPDRICIESAGELAKNFKERNEIKKRQDENAAQNEKIKNRLINEFNILTPTGTQISKMKFYLEQDGKCLYSGQEIDLSRLFSDEGYCEIDHIIPFSRCGNDTRANKALVLNKCNQEKGNKTPFETWGGDPERWQRFCVEVESHKKISPYKKKRLMSEKLPKEDWNIRALNDTRYIERFLAKYFRKNLRFADRDYVSAGHDTQRIFTPTGQITTNLRRVWHIGSKNRDDDCLHHSVDATIIALTNQGTIARLARFYEVHEDQAEWHYDKKNHTYIDKKTGEVKDIDEVLPWPEFDKEIRLRESQPRENTAEAMRDWRDQFRDLYRDQDAEFVASIHPIFVSRMPKRRGSGQVNKETVKSPKSKDGGLRLTRKPLSNVNLSVLEKSVLPESDKKLYQQLKDRLLQYGDDPKKAFDEPVYKNDKKYDKNGRPLSPVSSIKVYDVSPETSGFTLKDKGREVGYVNNGGMVRLDIYSHVDADGQKRNYCVPIYVHQASKGSSRILPAPNPKKCARCVDDTFDLQLSLFPNDYLIVTLDGKKREGYYVKYGIASGSLVLKAHLSAGNNLLCSTHVLQAITIQRLDINVLGDNYPWK

SEQ ID NO: 9608 - protein, 1261 aa, unidentified
  REGION 1..1261: note = Description of Unknown: Cas Enzyme sequence
FLYFFAIFAKNKKQIIQYTMKKILGLDLGTNSIGWAVVNAEENWKPVSIESMGSRIIPLSSDDTNEFTKGNAITKNQSRTEKRTARKRYDRYQLRREYLTATLRKLKMLPDESLIKLPILELWELRGKAACKGQQLSLPELGRVLYHINQKRGYKHAKSDESSDTKQKAYVAEVNARYAMIKKRNQTIGQYFAEKLKESEIETPKGKFYTYRTKEQVFPRKAYEAEFDQIMACQKVFYPDILTEKEINKLRNEIIFYQRRLKSCKHLVSICDFEKQEYKNKEGKIVFGGPKVAPKSSPLFQICKIWEEVNNLTLKNRKNDELFISLEQRQAMVDFLETHEKLTLSDMYAILGISKKDGWWGGKAIGRGLQGNTTKIALKKALGDFENAERLLQFNLYKTDSNLVDDTTGEIIQIIDSKLEKEPLYDLWHTIYSISDKEEFGKALKRKYNITDEDIINRLYSIDFVKPGFGNKSTKAMRRILPYLQEGLKYSDACEYAGFKHSESLTKSENEARPLLDMLPSINKNELRQPIVEKILNQMINVVNALMNEYGKFDSIRVELARELKQSKDERNTTFLQNEAMQRLNESITKRLESENIKPTKRIIEKYKFIFPTKGCFDKRTGKFITKNFEDLSTINYCIYCGQPFSLSAALNGDGYEVEHILPRDLICDNSQNNKVLSCRRCNSIKSNKTAFDFMRSQEKNAFEAYLERVETWYQDGIISPGKRERLLLSHEDYLERKRLGKETDEDKKYWEEFVSRQARETQYISRESIRILKQCCRNVNATSGAVTAILRHLWGYDEILHQLNFERYKNAGLTETVIWESNHGKNKHSREQIVDWSKRVDHRHHAIDALVVACTQQGFIQRINTLNADETKGLMKKQIETAGLKYVEKMALRDKYLISLTPFKTQAVANAVNNILVSFKPGKRTATTGKRIEYKEGKRHIVQKGIIIPRGPLHEEGVYGSIKINGEKQIVKKYKLGKGAQGFVFTGKETYEEKVNKKTGEIQIEDKIKNVLDSIVDGNIRTKVLQRLNQGFEEGKDYRNDVKKALENLNNLDKNPIYADDNKTIPIHTVRCITGLSAIVPIKYNNQGKPIGFVKPGNNHHIAIYQDEEGNLKEHSVTFWHAVERKKYGIPVIIENPTKLWDEIKDKQLPESFLEKLPEVNWTFKVSLQQNEMFILGMEDDTYDVAMGNKDFTLISKFLYRVQSISESDYWFRLHIESQNDKTPQAKQAKKFHRIKSLKGFYQLHPHKVHISVIGKIKEL

SEQ ID NO: 9609 - protein, 1044 aa, unidentified
  REGION 1..1044: note = Description of Unknown: Cas Enzyme sequence
MGEYYLGLDVGTNSVGYAVTDEQYNLLKYKGEPVWGSHVFESVDETAASARRGFRTARRRLNRRQWRVHLVQEIFAETISKIDPRFYIRIQGAGLHRDDVPETDVNIFFTDKGYRDKDYHKEYPTIHHLLAELMDSDNPHDVRLVYIAVAWLVAHRGHFLNEMDKDKIDEVLDFHAAFTACSEVLQREELAQWDVDEDALQETLTAKMYLQDKEKRLLEILYDGKKKKIEEDTEVDESLFPKLLAGGKVPLSKLFPQMDIEDTEKVCFRDNEESFENALKMADDKAEILVALRRLFDWALLKTSLQGEKSISKAKIKTYNQHQKDLALLKRIVKNYLPQKYNVIFRMMPKEDAKNYVAYSYNLKSIHGKVLPKSKASQEDFCDFLKKELKDVSCGAKDKPEFDEMMNRIEEKTFMPKQVNGDNRVIPYQLYYHELSVILKNAEKYLTFLREKDASGFTGAEKLLSILSFRIPYFVGPLTKSDYSKNAWFVRKEEGKIYPWNFKDKVDFDQSEENFIRRMTNTCTYLTTEPVLPKDSLIYQKYMVLNEINNIKVNGEPISVEAKQGIFRLFETNARVTIRQIKEYLLSNKHMEKKDNISGIDLPVKSSLRSVHDFKKMLSGKQLKETDVEKIIERLAYSEERRRRMEYLKKEYPSLSNDDMKYISRLKYHDFGRLSKKFLCGLHGTNKETGETGTIMYFLWETNDNLMQLLSAKYTFSEEIEKIQQDNAGQSLSVLMDDLRLSGAVRRPVYRTLDIVHDVAKTLKHPPKKIFIEMARGGGEKGKRTVSRRNKIEALYKSLGKDFNDEVRELSELLAKKSDNELQREVLYLYFTQLGKDMYSGEPINIENLNNETLYNVDHIFPRSIVKDDSLDNKVLVSSKANGAKGDDYPIKKEIRDKMANLWASYEKKGLISKKKYERLIRSTPFSEEELWGFIDRQLVETRQSTKALATLLQRKYPESKIVYVKAGLTSEFRHEFGLVKSRLINDLHHAKDAYLNIVTGNVYAERFNRNWFLPEKRTYTLKTRELFSKPVTVLKKTIWQGAD

SEQ ID NO: 9610 - protein, 938 aa, unidentified
  REGION 1..938: note = Description of Unknown: Cas Enzyme sequence
MKRNTIGLDLGTNSIGWAIISQEEDQKPQITLGSRIIPMSQDVIGDFEKGNTVSQTSQRTTYRSIRRLYQRHHLRRERLLRVLHILGFLPPHIEHSIGWDKADVKTYGKFLSDTHIEWTPKENGTSLFIFQDSFQEMLAEFIKHHPGNSTKKIPYDWTVYYLRKKALTQPISRYELAWLLLNFNQKRGYNQSRNDETTEDSPKELKEYYKLKVTDVSIDDITKGKKPWYNIVLENGWIYRRQSNIPLDNWKGKEREFIITTKLDKDGRPKTDEEGQVIRSFSAPKDDDWTLVKKRTEQYLKESGKTVGWFIFDNILENPSEKVRGKLISHIDRKFYRDELTKILCKQIEFMPELSDDRLYQACLMELYPKNENHRHSLNETDFVRLFVDDILFYQRPLKSKKYLIDNCPYEKHSYVDKETGEIKEAAVKCIARSNPYFQEYRLLCFIQNLRILDEMGENCTGEFLNTPEDFSKLYDWLFLREKVSMNDLFFDFFGLAKPPKGEVLPYKWNYPDKDFPANTTVGLFAATLNKINIDTNILKPDFVYHLWHILYSVSEPNQLLKALIKFGDKYHLPEAFAEAFVKIKPFKSEYGAYSEKAIKKLLSVMRCGSHWHLEDINEETRQRIEDIISGNIAPEMAERIKNYTTFQRIEDFQGLPEWLACYVVYSRHSETAKVEKWETPEDLQAYINGFKQHSLRNPIVEQVILESLRVVHDIWKQVGNIDEIHIELARELRNPAKKRQDDSLRNMDNERRNLRIKLLLMEMSEDSRFNGVRPFSPTQQEILKIYEEGVLLKEGDQLPKEIDAILSSRQPSKSEINRYKLWLEQKYRSPYTGEYINLSRLFTTDYQIEHIIPQARYFDDSLNNKIICEAEVNQDKSNMLAHPYIKQNGGKEIYTSHGKVTILSLEAYEQLVKDLYSHNQRKYRNLMRDDIPESFTQ

SEQ ID NO: 9611 - protein, 1419 aa, unidentified
  REGION 1..1419: note = Description of Unknown: Cas Enzyme sequence
MEKILGIDLGTNSLGWAIREINNDLNNQIIDKGVLTFDKGVAEEKGIETPMVQKRTESRSKRRNYQAEKYRKWELLELLIANKMCPLSKDELDEWKHYKKGIGRKYPQSKRFIEWLRFDFNGDGKPDFNLLGSDIHESYYIFRALAVSDKLEHKNVFSNNPEILGRIFYQLVQRRGFKGRDEDEAQTMLKGSKDGTTKGRNDIITYIEKYKTLGAALYHLQEEQNVRIRKRYNLRSDIDAELKEICKTQNLDSKLHKGLWKAIVWQRPLRSQKGLIGICTFEQKTIYKNGKEITQGKQRCPISHPLYEEFRTWIFINNLKINVPIEIDRLKYIKEIVYPLFYNSSSDFKLSTILKQLKKDGAYIESNFKEDTKAISSRLLNSFEKIFGETWKHDLSWNESLNNKNKNCDYSFEDIWHVLFSFDSNEKLKEFAINKLKLDDEKAEKFSKLKLQQGYATLSLSAIKKILPFLYEGFIYSEAIYLANLPKVFGENGLNNDLIKDFSQIYTYLRNEHEKEKVLNACINELIRDELNSDYRYKIENSRELDESEKKLIEQKLVSNIGIKSWNNKSEEEKAIYKSYVQSHFRDFLQKPFYGKKDILFMPVPNFHDRIKNYLRDTFSINEKQLGYLWHPSKQESYPDAKEKRLENGVVIKVLGNPMPISNGFKNPMALKTLYKLKNLINYLLENGKIDYNTRVVVEIARELNDANKRKAIEKWQREREKENDDFKKTIDEINSECGTNFNREDKTLIDKVRLWKEQNMRCLYTGKQISLCKLFDGLKYDIEHTIPASMSFDNELKNLTIADSYYNREIKKKSIPFDCPNYSKEAIINGETYSSILNNIEYVFGKRSTVKKKKKGVEKEYVTYEKIEHLEELFYDWKKKTSDKKDIKDAIIQRRHLIKMELDYWKKKLDTFTCTEYKAGWRNSQIRDTQIITKYALPYLKTVFKKVEVQKGEITNDFRIIYEVQPKKEKKNRTIHAHHAIDAAVLTLVPPSATRDKILLAYNEEKDNNTGKIYHEKPQGWNNFDASHIISIADDILINYQAQHRTLSQTSKLVKKRGKQQYVKFKDENGKWHFKLDNEEKKIPLIAKGDTIRGQLHKESFFGAIKIPQYEERNGKYIPTTDGQGNFLFQENEKRKDPIFFVEREVNLTRFSQFDDFNIIIDPNLRAYLKREIQIRISSGMKFSEAMLKPIYAFGVNVDKNGNPLRPIRHLRVRATGSGAFINNPAQIRDKKSFISKRPYKCFDYAINGEVPVCALYQVIIDEKAIRHLETFSILKLAKSNTENNFEKSVDSNIVKKIGREEVIIPLYSVLLSGMKVIFYQESIDELKGLQNQELSKIMYLVVSFEDGKIYFKHHLNSMKEDEIKLELKKMGVSDKGASAFNFETPYPKLRLSKDNMNFAIEGKHFEIKLDGEIKWTS

SEQ ID NO: 9612 - protein, 1894 aa, unidentified
  REGION 1..1894: note = Description of Unknown: Cas Enzyme sequence
MKKILGLDLGTNSIGWALVEIDHEKKIVKIIGLGSRILQMDAGEITDFEGSGKIVSSTAQRTDKRGIRRNKERFLLRRDRLHLVLNLLNALPEHYKIEIDFERNGEKCGQFKSNKEPKLAYLQNSETKKFDFIFENSFKEMLNEIGIEYEKHKLIPRDWTLYYLRQKALTTEITLEELAWVLLSYNQKRGYEKIEVEDKASKENEIVEEIDLQVKSVTELLDKKGKKYFKIELDGIDNFVYSEYSDIQMTFKKDIKEIKVTTKLNDKNEVMGKEFTVVDIYSLQIKNVKYEKEEDKHSYTLTYQNGWEEIKNPKKYTFRYSNVIDKSFEYIVETVYDEKGNIRPIQGKDRKLREPDFSDNSNDWTLLKKKSEKEALAFNIDNGYINPETGEPCKYISTKIFNILKNDAQSGNRTKIIGGMFQVVERDFYREELAKIISTQKQYHDTLDDREIFEKCVQLLYPINEAHSKNLLANKNAIQQLLVEDILLYQRPLKSKKSEIANCKYEIRQWKDILDKKTGMPIEEVDNETGEVSVKKEPFYHKVVSASHPYFQEFRIWDKLHNLRLIQIEKEVGGKTQTNVDVTEEYFTNETYQGLFELLNAKNSLKQTGFFDFIKTIFKEKRENAKNFVWNFPEEEELKGNETRVSIVLRFKRCGFAEYADFLTQEKEISLWHYLYSVSYKERIADDFKSVKTFFTNFLDGIDISDDVKGNLVKDFANYPRFASKYCAYSEKALKKLLPFIRMGMNQFKGAFDISEFKLDLETVNYNKSKILTIIDFNPEKKAMLSSEEKRGIEINKQKLYDAIWKHSVNDRINEILTRLKKIDFSKDEIDFSVAVSNDKSNGNLPFPKGLFNTFKSFEKPEDFTNFNLTQASYLVYGRHSELAQAKYWTSPKQIQDELHQELKQHSLNNPVAEKVILEMMQIVADIWKYYGTKNPDDTYQKLFDEIHLEVGRELKKSAKEKQNITNNQKENKAQNKRLRQILEEFLANSNYNAILQNTDHFERLKIVEDGAAHSKNIDKKFFEGKSYNKKEIEEILKKPTINKDDFDKYKLWVEQGYKSPYTGKIIKLTDLFNGNKYNIDHVFPQASITNDSLSNKVVCETEINKLKSSQTGRDFVNNPIQRSIPCVAHKSKENTVGLIEIVDDDKYVSIVKSQFSGTKRFILLSKEIPKGFTNSQLSNTQHITRKAMELLSHIVREPGEIEFRSKNVLPVTGEITSRLKQAWRLDQVWKKLVSPRFIRMNELTKSNLFGQEQESKSGEKYFDCNIVETIREKDESYDIKRIDHRHHALDALIVALCTEEHVNYINNINANIKENDYGKQKRIEKYRETLKRKIMFSKPKKENPKEKDWFYMLPGQIRQTGEETSAIDTVLQKSYSYRNTTFNLDYKAMVLSALESTVVTFKQNLRVINKTVNRYNNSPDRNKFETQKDKETGNQYNWAIRRSLGKDTYYGKVYLQETETKQLHTTLNEIFTSPEIIIDNQLRERIFEIKRGSKSFIEFRKQINNEFSNRKIELKVFKLASREFLSEKFDRKKIREITDTGIQKILFNHLKQFDSIKLPFEEALQYYNALIEKFELEAVVNNEESKFKTLEDFAAYLRLNKYKNDKVDYSTLNVFIQQVPARDFRNDEQFKNNIDEHPEIAFTIENIDKMNQYENLKILNEGKNHTPIRKVRVSSGFGNQRPVSDDQQSIKSKQYVVNDAGSNLYLGFYEGTNEDKKGNRITERKFQDIGLIELIESLKQDKSKRLNPLSVKMFDDKKNTEYNWLFTLSPLDLVFVPNEEEIKNPSIVDLRNLNNEQKSRIYKYVDGNKDIANFVPYAIAQPIWKFHDDKKKKEIYSQLKEKHPLEILEKDLIKDEFGFGSQQTKNQNMIDGVTQIKKKCLKLKVDRLGNISI

SEQ ID NO: 9613 - protein, 1128 aa, unidentified
  REGION 1..1128: note = Description of Unknown: Cas Enzyme sequence
MAKILGLDLGTNSIGWALIDDKLNKIIAMGSRIFPVGVDNLGDGEGELSKNASRTGARGTRRQFFRKKLRKKVLLKELASLNMCPLTNEDFENWKTTKKFPTQELASWFALNPYELRHKALSEKLSFEEIGRVFYHLIQRRGFLSNSRSAGKDDGAIFKGNAKEGKIGIDETREQIENKTLGSYFYEIAPKTNQPFIDGLERIRNRYTTRQMYVDEFEEIWEHQKKYHSNLTHEIKEKIGGRKNDEGFKEDGILFHQRPLRSQKHLVGNCTFESSKTKCQLSAIPFELYRLHQWINTVEYNGHKLHSDERKLVFNFLIEKEKPSFKDIRKAINKLDTIYKFNYKDEDKIVGTHTISNLCSKKFFGKRWFDFTEKEQEDIWHVLYFFDSKDKVAAYAIANWGFDETQAEAISKFNLKDKYASLSRKAINNILPFLEMGFQYDIAVVLGGIKNAYGQNWEMLNSADKGLVLDNVYEIVRSNLKGGFIEPLKHFLKTDLHLSDKQLTKLYHHSANIDETVLLEKLPVNAKADKEIQAIRNPVVITALFEIRKLVNEIVEEYGKPDEIKVELARNLKASKSGRREERNRQQKLERENDRVKVELNNLSKHISHDNLLLYKLWEECKRTCPYTGRSISVTQLFSGEIQIEHIHPWSKSLNDSFMNKTLCFADENRAKGDKTPFEFYSLQGENKWHEVKERALKLFSDTAQYPNSYQKFKRFVQQKFDDDFASKNLNDTRYISKETKNYMSKICDKVAVSPGQMTANLRQKWGLNAVLNPEDKTKTREDHRHHAIDALVMACGTVKHLQKLSEWDRYDRKPENKNFPLPWEGFVKDAEIAVDRILVSHKKLNNIITVRTHKTEKNGVVYKNVGVAARGQLHKETVFGKRNFNGEEAFHVRKPIESLATEKHIEKVVDEAIRLLILKRVQELGGFVKDKVPANTFFVVDENGINQPQIFLPNRNGAPVPIMKVRMKENIGGAERLKEDINQYVNPRNNHHVLIYKDEKGNLKEEVVTFWTVVERKRQKQEVFQLPADGVAIVTTLQINDMFLLGLKEDEINWENPDYDVLKEHLYRVQSTSSKYYEFRLNSNSQSQLKVTPFYEQIRNFGVGKTGWTTFNPIKVKISVSGKIEKL

SEQ ID NO: 9614 - protein, 1692 aa, unidentified
  REGION 1..1692: note = Description of Unknown: Cas Enzyme sequence
MKKILGLDIGTTSIGWAIVETEEKTAHQQESETATDINNKRIGIHKDAVGVRIISQDTERFDKGLTLNDSKGSALTPTANRRKYRGSRRMKSRYKLRRDKLNRILSVLGMEPAKEYYTNVKGKRGENNDIGKAIYELRDKAIKEKISLQELGRILIHLNQWRGYSSDRFAKEDKPKFDYYVAQIINIDEANKISIYDEKNKEELKYYQVAIKIRFEEPYNKGTDESQQFVTELEGLIFKKEINFKNGDFITIKSPEFKQDKKGKTVITEYYKITLTTPDPTDWNYKYQTLNKTLSEWCETGSTVGSYFYHNFYKNQNIDRIRNNVVNREWYEKEFNTIWDFQFGNNKNCFENIDIVDVVKAAFKSYQPILNEVLKKKEAKEQLRFLIKEKIIFFQRPWQQAKNKGKCTFEKIKVKKEITIKGTGNKEIIEEHIGRTVIPRSHPLYQEFRIWQKINNVRIFLNTTTLRLDLFSEEIDFEKYIGKTIDDTKELLYHSLQNCKTKSWKNFCKDELGIKFIYDNADEAKARNKFLEHYDEESGEIVNAYFTVNFRKRKKDGSYDDIKLDGNRTKDSLRKILNDRADIWFDQIHSDKQQISNFELLWELIYDITNTDIQKVADLIKKHFELDDTLCLQLANIKFDDSGMGSLSAKAIRQMLPLMSNGENTTEKAKSKIISLINLNTSEEEKAKDYDEKLESLKSFISDKKARLKLSKFNKIGDFKYLNYWEAAAVVYGSHSTMRVEGRGKIEPVKQNSMNNPIVEKIVNETISIVNEIYKQYGFDEVRIELSRELKASMEERQQMWEAMNSNFGKNEWAKQMLRELKLDTEHSNSDLATSNKSNIDKIRIIEDVVKYQFPDEYTKKVKEYKLGEPTKSEIRRYLMWLEQNFRCPYTNQPIPLTDVFAKGKVVEIEHIIPRERYYLNSYSNKVITWREVNQEKADNGNRTAYEFIVSKRGSNDKISLSDGKTVVSLVKKEDWEAHVKTMFPRGAKRNNLLRKEIPEDPINRTLNETQYISKKLKEKLAEIVGQEKVWVTSGAVTDILRDRWHLNDIMKELLRYRFENFNTGENKEKLKLTYLTPQLNSKTGKYEDTEIFEGYSKRLDHRHHAMDAIIIACTKQNHIQYINSLNAITNANQESDEAKKGKYYRLKKEICIGDSSKKFYTPWEKEKFVKDVKARMNELLISHKNTRLLISPSKHRISKDINTIKVASIRGELHKETNYAKKKYFNQEHTDIKKLIPNLLKSKMENQNQTMVHLKSFDEIIKETVLKEKYQDLLMSLLLQYNDIVLNNRLCSEISKTILKEIETNQVLMNSKTKEPLTWLSTYSETDKSCRPNGLSMNLNDPKEIKDIADPRIKRLAQYRYNYVKEKCKEIDEINELDKREKDQQKAKIKAIPLFSNAIYEVRIKNEEHKFEWIELKDFDNDFNKIKYANNATTQLVKKKLQEVDLNELKQSYFKEPVFISKVQIPVKKVRQEAYFQDLYEITKGRFVYSLDVFMVYFFKEKNTIDGIEKRVPPKFLKFLDAVRILDAEKPIKIDYTKLIQKEKTIYEMQKGIEHELLFTLAKNDMVYLPDKILSQEQIDEIDWNNKKSILPFLFIVKDMNPSQKVVVFQQLHKADSIKISEADARSLFNNLELKEQKEEIKYGNVPMLQRCIKVFTDKLGKKVVPYWEFPQGCWDKSRAYELGLIVDYEV

SEQ ID NO: 9615 - protein, 1011 aa, unidentified
  REGION 1..1011: note = Description of Unknown: Cas Enzyme sequence
FKISDYLPATEASVKEAKELLGTKNNKGEVTLPEDWIVYYLRKKGLSEKLSFTELARIIYMLNQRRGFKSSRKDLKDENVEENKWVEILKIKSVEQETYEPNRNKNFKFKITSYSDKVQPWYVEKKKKPEWEEKDFTFLITEKIRIKNDGTKEVTPLTPQIPKEDDWALCVTAQDNKIGDEFPGVYFFNGLMNSVKNKTDFKIRQYAVYRSKYKKELEAIWEKQLELNEDLQKINKDGQLLKKIAEVLYPKQTELNKPKLKEIINNNLLHLISEDIIYYQRELKSQKNTKSECQYEKKKGIDGIYYGLKCAPKSSPEFQEFRIWQDIHNLKVFQREGTKTKLVNGEEKVFSIVDIDVTDTFIVEKLTEKLFELFDSTAKVTEKQIFTLINETSGSKIDEKTHRINMFFDGKDSLQGNETKNYFRKIFQKSNFELDGENVLNDKQKFYRLWNIMYSISLNDEEKSNKAILKALTNEYNKRRKKKNIIFNFPENVAKALSEAPEIENTKKYASYSSKAINKLLPLLRCGKYWDENLIDETVKIKVEKIKERLNDIDYNSNKIKNIADDEVPQQILKSFINQNNFLAGLKTYQACYLVYDRHSEKSDYTKYSDLKEFDVMKLMPNNSLRNPIVEQVIRESLFVLKDLWQQFGQPDEIHIEVGRDLKKNSKERQKATEKTTANASERKKIKELLKELMNDDFEQYINVDDDKNKIKKENATFETRPNPESPADIKKFTLWKNASGLSDTDFAKKVKEEKIPKSQEIKKYALWLSQKCVSPYTGKIIPLSKLFTAEYEIEHIMPRGLIKNDSLDNLIIAESAINKAKGRELGAVFISNRNGGCEHQGTHYSLLPYNEYVEHCKRNFRGSKLKNLLASEIPEGFIERQINDTRYVTRKISELLYPVAKGNPKATTDAEKGGIVFTIGSITDELKKNWGLKKEWKKLIKPRFERLEVLSGKTYIQQNEVDRNDIDFNVPENEDLNMKRIDHRHHALDALVIASTTIEHVRYLNSLSAT

SEQ ID NO: 9616 - protein, 965 aa, unidentified
  REGION 1..965: note = Description of Unknown: Cas Enzyme sequence
KGIEVNRTVDYKDLWHLLSVSTSDIYLFQYAKNKLGLDDKDAKAFSKIRLKKDFASLSLNAITKILPYVREGLLYSHAVFMANIESIVDESIWNDSNQRKFIQDKIAEIIENHTFENGKLEAINSLIKEFKTVGAFYSKEVESIYKSDLDKKIIAFVKFHKIESDKEAILSELFPVLIEQLKKYEYIKINRLDEKVLDFIKGKNDDGEIFCTNEKRINKLYHPSDIEVFKKKIIKDEFGNEKVVLGSPLTSSIKNPMAMRALHQLRKVLNTLIFDGQVDEKTIIHIEMARELNDANKRKGIQDYQNENKKNREEYAKDIRKLYFEECKKEIEPTEDDLLRYQLWLEQNKQEIYENGRNISICDIIGNDPKYDFEHTVPRSRSQDNSQMNKTLCSQKFNRDTKGNKMPIELNNYFEILPRIAHWKEESDNLTREIEIISRSIKAAATKELKDKKIRRRHYLTLKRDYLKGKYDRFIWEEPKVGFKNSQIPDTGIITKYSQAYLKSYFKRVESVKGGMVAEFRKIWGIQESFQENDKKYFHEKDRSKHTHHTIDAITIACMTKEKYDALANAWTHEDKGQLGEARKLLADSKPWKTFKEDLKKIEEEILVSHYTPDNVKKQSKKIVRIRGKKQYVAETVKDVNGKAIVQKDGNDKIIFKFDKDGKRIPRLQQGDTIRGSLHQDSIYGAIKNPLNKEEIRYVIRKDLESIKASDVENIVDEMVKGKVKEAIANKVLLISSNAQQKNKLDGIVWMNEEKGIPINKVRLYANSVKNPLKIKTHSELSKSRHEHKQKVYGQNDGNYCMAFYEGNDAKGKIKRSHLLINMMGAADYFKLSNSDKNIYPIAPEQDENNFPLKYILTKGKMVLIYDKSKDELLEMSSIMLLDRLFQITQIDVEKSAEIKLLHHIEAREKKEITEAMGLKTGMKGGKNIGGHKKYPWIKVGVNSFDCLVQDYDFTISASGKIILK

SEQ ID NO: 9617 - protein, 902 aa, unidentified
  REGION 1..902: note = Description of Unknown: Cas Enzyme sequence
LRRVVRRRAQRLASVRSLLVKYGLLESTDPDAFHHRKSAPDPLQARTHGLERKLGNDEFAAALLHIAKHRGFKSNKKSDTGQNAPDDNQKMLGAITANKELLVRYRTVGEMVAKDAKFRDRKRNKGGEYTHTHARDDLESEVRTIFAAQWRLGNAKATADLQNRYIDIAFHQRPLQDSEHLVGMCPFEPAERRSPRHAPSFEKFRFLAKLNTVKVRTADGALRRLTREELGKAVDDFGVASKSISWNALAKKIGLPKGVFFDGIDEKKAKTDVAASGGSAAGIKTLHDALGSTGWSAVGETPALLDAVATVIAFREDVASIEQTLGGLNGLNPRDLGALMDGVRCGDFGAFKGAGHISHKAARNVLPHLLEGMVYSEACAAAAGYDHTQMRKIGIGDIRNPVVQRSLREAVKQVETLVHHFGARPGRIVVELARDVGKSAEERGEITRGFNKRAAEKKRRRQELKELLNLAAEPNDEDLRRYELWKEQNYRCIYTDLEIAPQDVLSTSNAVQVDHVLPRSRSQDNSYANQVLCLSGANQNKGQRTPWEWKVRDEQDHQWWAKFEKNVDALHIKRHKKNLLKMRNFDERQQGFVERNLNDTKYAARALLAALRELYADRDEPDPVSEGYLGKTTRRLFARPGAITAILRRAWGLDRLKDRSDDRHHALDALICAAARSEWLLNRLTREFQRQEKENRKKWVPNVAQPWPGFCKDALAAYESVFVSRSEKRRGRGQGHKDTIYRVGSEEGCKVTYERKAVADLTKGDLDRLKDADGGNKPLAEALAAWIDDGKPADDPPKSPKGDAIRKVSFKRKGASGFDLNGGHVDNADMVRIDVFAKPNRSSKDEFYLVPMYRHQVMDQRRWPTPPRPRRQSAQAGRRMDTHRQLLRVSVQLISRRLRGIG

SEQ ID NO: 9618 - protein, 1060 aa, unidentified
  REGION 1..1060: note = Description of Unknown: Cas Enzyme sequence
MHWRLGLDLGTNSIGWWAVRVTKEESNQKAPWQAVESIDGGVRIFSDGREPAKGGRVGDSRAVARRLARGIRRNRDHGRNRMRRLVDDLIELGLLPENPGARDALFQSTSKSKGNPDRYNPYRLRAEALERPLTPHELGRALQHLGLRRGYKSNRKESSDDDGGKLRGRITALRARLNGHTLGQHLWETYQREKLKSVPAGVRFRAEDDTYPDRALYAAEFDAIRAVQEPHHVLTAKDWDRLRNERILFQWPLRSVERGRCEFFPDSRRHWRDTPIGHDFRIFQELNELRWIDAQEERHALDAEQRASVLDLLMRRASEVKFKSMRSQRRVDGMPLFPAGSRFNLEGEKRKGLKPHTIAVRLRREPLLMPLWEARQSGDGGRLDDVFESLQASHDNDELQQELVTKHGLDNESAATLVGLQLGAQTASVSRRFMELIVPVLRDQGLIYSDAVAKLRDENGKSLHHSLREDDRRWSRLPYYGEVLASSMLGSDPSADPDTQPEQRFGRINNQTVHVSLNQLRKVVNALVDRLGSAPVEIHVELTRALKQSRQRRNEENRRQAAEEKRNQEIKKQYERLGIHEPSARDIKKFKLWEELGEERQRRCVFSGEVISEEELLFNGEAEIEHLLPFSRTLDNSMANLTVSLRWANRLKGKHTPYEAFANGRCANQGFVWDEILERAKGLPDNKRWRFGSDAMVRYEHEGRFIARQLPDTAYISRVAQQYLRSLEGVCQVVPHRGGLTALVRGKWDLSGLLSDDKRKSRKDHRHHAVDAAVIALTDRSVLTEVSRLSGRGADDVTRLAVPDLDPKILAAIRARVPQIVVSYKPDHGLRGQMYAETAYGYVPPERRDPSLLEHEWVVRKALTDLSEKECETIRDRNLRDVVRNYLQQHKANGLKKALAKFAKEYGVRHVRILVKNQTISPVASAPYKGYAPVSYVCCDVWRVPKGHERGEFKGVFWSYAETADGQAPDKATKKPHPAARFVARLFKDDMVAYEEGGRTSIARVAGFSTTNNRLDIRPHHLAVSEQSYVGINVLGAKRLRKIRVSPGGLVFGVEGETIS

SEQ ID NO: 9619 - protein, 1052 aa, unidentified
  REGION 1..1052: note = Description of Unknown: Cas Enzyme sequence
MSKRILGLDLGSNSIGWALLKTTDAGKPTGLIDLGSRIFNKAVEDKTPTPKNQKRRNSRLARRVVQRRARRRQRMLNYLVSLNLLPASLKDHPKPESVLNALGDPYSLRAKALDSPLSVHELGRVLLHLVQRRGFLSNRKTRLGREMLDDPDVQAVLAELEEDTTGGDRDRTDEEKEENAFKQDISQLRKTIEASGCRTLGEYLASLKPSQSKRNRQRDGGHLRTDRQMYQEELDAIWEEQKKHHTVLTDKVKEQIEQIIFHQRPLKLQADRVGKCSLEPRCTRARIARLEYQQFRYLQDINNLQFFDPYTETWSALSDENRATLVTLFESTPTLTFPGLRRALGLARTTEFNLEKSEVKKLKGNTTACKIRKVLPEWDAFSQDKQYALVEDLLTIQKKSVLKKRLIGHWQFDSATAVNLCMVEFEPGHGNFSTKAVRKLLPYLEQGEILSEARVEAGYGYEQEAITAKDRLGPPPTIANPIVQKGLHEIRRVVNAIIAEYGKPDAVRIEMARDLEMNTKRYAARLKQQRANTKANEEAAQKYAEMRQKNPHLGLSENSSRNDKMKYRLWKDQEEKCVYSGRQIIVSELFGPAVEIDHILPYSLTLDDSYMNKVICYTEENRDKRNRTPMDAFGSNEDKWNQITQTISRWGKSLKSKRERFYKREADLQERDFINSQLTDTRYISREASRYLSTLGVEVTFPKAAFTGWLRRQWGLNSLIGTTDEKERTDHRHHAVDATVIACVDRGFHQRLVRLAKKLERSHSELNLRDISIDIPWQTFRQDVHDQLQSLIVSHVPQRKISGALHEETGVGFIAGNGVDGPGTVYRQALDTDFKVTQIDKIVDPVIREQVRKHLANNGNDPKQAFADGKGVVHKNGKTPIKRVRVRQSKVPDLDTLKKTKFGVRDRQGKVFKWMAYGNTHHVEIIRHRKTEKYEGRFVTAIEAAHRARGINGSKRLVIQTDHGEAYEFVMALHINDLVSTEADGKTEFYRVQKFEQDGSRLELRLHTAATLENKEEGLRKSISTLMKDYSLQKHLVNAIGKLRNDKTDHRH

SEQ ID NO: 9620 - protein, 1070 aa, unidentified
  REGION 1..1070: note = Description of Unknown: Cas Enzyme sequence
MKLIFGFDIGTTSIGFAVIEHDPEQSTGKIRRLGVRIFPEARDPKALVPLNQDRREARMRRRQLRRRRSRRQELGALLNQHGFLPRRGDTEAWDTVMGADPYLLRKWAFNLQQPESDLQAEQVNLPEWAFEGEGLSPHAVGRAIYHLAQRRHFKGRDIDEIAGDDGTKPSNRAADQDEEDKQAMSAREATRKTLEQEGKTLGAWLAERKPNERKRDVHALRQNVEEEFDQVWAPHLPNNQIRAKVRKAIFDQRPVFWRQKTLGTCRFLPEKKGRDLCPRGSWLSQQRRMLEKLNNLQLVSPEQCCLDQEERQAILAKLQTQASMTWAGVRRALKPLYQQRGQRGDTRLMKFNLEQGGENKLLGNPIEAKLAKIFGDGWPDHRHQQAIRDALHEHLWNADYEWLGRERVVIRPEKEREKRREQVARYFMETFDVSHEQAEQVKALTLPTGWEPYSTEALRRILPRLEEGKQFGQIINGHDTESVRWRKETFPNHQENTGHGCGRLPSPKNEQECKHIASLRNPTVARTRNELRKVVNNLIDMFGKPDQIRVELARDVGLSKREREEMQTGMNRQEKRRNAARKDLKEKGISEPSRKDIEKWMLWEECDHQCPYTGDHICFEALFRNNEFEVEHIWPRSRSLDDSFRNKTLCRKDFNARKGNKTPFELLSSDEEKWAAIGQRLEKMKAKRKGEKGMSPGKIKRFLAQSIPEDFTNRQLNDTGYAAREAVAYLKQLWSPDETTGTVVQAVSGRVTAHLRRLWGLNNILGDTGEKNRADHRHHAVDALTVACTHPGMTQKLSRYWKDKDNPRVQKPNLPPPWETIRNDAEKAVQDIVVSHRVRKKISGRLHKETIYGDTGEEETTDNVTYQYFVTRKKVEALSQKELKEQICDDRGVGTIVKDWVEDHGGDPKTAFKNSYPTVGEHGPQIRKVRLRIKRQSKTMTKASTGYADLDGNHHIALYQLPNGKIDCEIVSLLRASQRLASREPVIQREHSGSAKFIMSLSKGDSLKLTEDNKIVIVESIWSSGQITIVDHSDAKGSSKKQPKARSLLLRNKAKKISVDPIGRVHSSND

SEQ ID NO: 9621 - protein, 1098 aa, unidentified
  REGION 1..1098: note = Description of Unknown: Cas Enzyme sequence
MVIPYRLGLDLGANSIGWCAVKLDGQGSPCGVLDAGVRILTPNDEAGRDPKSKASLTANRRDARSMRRRRDRFLRRRKRLMTLLIDNGLMPADEQERKALERLDPYWLRAAALDQRLEAHELGRALFHLNQRRGFQSNRIADADDGEKSATRDGMRDLGQALRKSGARTLGEFLAKRHRRDKDGRRLLQNGKAMTPEAVRFRPSIQGTRNLYDFYPSRDLISAELTQIWEAQAVHHEYLTPALFDKLKRVILEQRPLKKPLVGRCMLRPDVQPVRQYGIDLDLGERAPKAHPLFQRFRILQDVAHLRVVLPGMPERPLRLPERDMVAAYLMNHGGSTIELKKLRSAADLPDNARFNYEQSGRGNLPPDQTAAKLAAKKAFGKRWRALPRERQIEVVERLLAMEDDVELTAWLRKEHGLSDVEAETVSAIRLPQGHGKFGRSALDDLVKEMEKQSKEAEDPNTGEVYERPLIHNEAVEAIGRHHSDLRPAEKATRLPYYGEALVRHVVSLPAAPEGSQERIGRVPNPTVHIGLNQLRRLVNALINKYGLPQSIAIELARELKLSKTRKAEIQKENKKNEQKNIERRKRLAELGIPDTPDGRLRLRLFYELPCSNRCCVFTGTKLSIEKLFDGTIEIDHILPYSKTLDDSFMNKVLCIRKANRDKRSQAPAEAWSGDELQEIVERAEQLFPKKAWRFQPDAMRRFKDEGGFLARHLNDSQYMARLAKTYLKHVCSDVQALPGRMTAMLRAKWGLNTLLPYHNYTGTNRKNRKDHRHHAIDAFVVACTDRGLLNRIAREAGRAETLNLGRLFPKGSFPDPYDDYRDDLADRLNNIIVSHKADHGLLPGGQLNMHATSGQLHEETAYGVVDDEEINGKPYNLVTRKSVEALTREEIDSVRDDALREELQEELKRVAEDAKKAGQELKKEELKKKALANFVARINIRRVRVLKTNQSVREVRHGSAFIKAYIPGHNHRIELFELPDGSWSGEGVTVYDAHQPGYAPAWTREHPDAGLVMRVHKGDLIEANFGEGTEIYRVYQLWAKMLCLAAHNEAGSIDVRHKDPDDPLRWIFATWKKLQGAAAKRVHVDIIGRVTAACDAP

SEQ ID NO: 9622 - protein, 1441 aa, unidentified
  REGION 1..1441: note = Description of Unknown: Cas Enzyme sequence
MKKILGLDLGTNSIGWSLIENDAQSLKGAIISAGSRIIPMSQDVLGKFDAGVTESQTAERTRYRSTRRLYERNKLRRQRLHRVLNIMGFLPKHYAQDIDFEKRLGQFKEGTETKLSYRKIDQAVATAGYEFIFQDSFNEMVKEFKEKGYNENIPYDWTIYYLRKKALEEKISKEELAWVILNFNQKRGYYQLRGEEEADKNKHFVQLTVQDIIDTGEDIKGKRLYEVLFDNGWVYDKKITKTEDWVGRTKEFIVTIKDLKGGDKKYTYKTVNSEVDWLAIKSKTEQDIDNSGLTIGQYIYSKLLDKPDQKIRGKLIKTIERKYYRRELREILRVQEKFHQVLMDETVFEKCLIELYKRNEAHRNNIKSLSLSYLIEEDIIFYQRPLKSKKSTVGGCQFEYRTYYKNDADSGDTIQQRVPLKAIPKSHPLYQEFRLWQFVLNIKIIDQDLELLQAKNADITQELLSSDEEIVELYEELNGRKEVEQKNIIDYFIKKSKIDKSKRGNFRWNYAKDKKYPCNETRAEILKRLKKVNGVKPHQFLTKEIELKLWHIVYSVTDRIEYASSIENFAKKNGLHVESFVLAFGNMPPYSSDYGSLSHKAIVKILSLMRMGKYWDPDVIDPHTFDRITKIISGEYDESIRDRVRDKAIMLKSINDFSGLPYWLASYVIYNRHSEGSDTAQWTSASDIDEYLKQFKQHRLRNPIVEQVVTETLRVVRDVWLKYGDGAKDFFDEIHLELGRSLKNSAEKRKSISTKQNENENTNERIRQLLEELGQDDSILGDIRAYSPSHQEILKIYEDGVYQNPDAKYGTVSEDEIYKIRRNKTPSYNEIQRYRLWLEQGYVSPYTGSIISLSRLFTTEYQIEHIIPQSRYFDNSFNNKIICEADINQDKGNLTAYDYMTRMSEEVRDGHELLSKENYEAHCQKYFKKNRVKLANLLSEDIPEGFINRQMNDSRYIAKYVKGLLSNIVRDDGEQESTAKRLLPVSGAITAKLKQDWGLNDKWNDIIAPRFMRMNEITRTSDYGYYDKKINAFRITVPDKIRKGFSKKRIDHRHHALDAIVIACITREQVNYLNSLNSERENYSLRSRLLVKNKHGDYTKHFRLPWSNFPIEVQQSLEQMIVSFKQNIRVINKTNNKTWQWIYEDGRYVKRRVRQEGKNWAIRKSLHKETVSGQVMHIPTSKGKIATASRVLLSSITNKKHIDKITDVSIQKILLNHLSSYLDDKGKPQYDVAFSTEGIEDMNKNIKMLNGGVSHKPIKKVRQYEIGSKFQVGIKGNNHKKYVEAAKGTNLYFAVYWNENINKRTYETVPLNEVVEHQKQTTHISKSEKHPFQPDNSKGKFLFCLSPNDLVYVPDEDEILNSGLVSVVSLRIKNIYRMVSSSGNQVFFLKSEVAKSIANKLEFSGLNKMEKDINGVMIKSLCWKLVIDRIGNILNIKKGIL

SEQ ID NO: 9623 - protein, 1447 aa, unidentified
  REGION 1..1447: note = Description of Unknown: Cas Enzyme sequence
MKKILGLDIGTNSIGWSLINQAENENEVSHIIKLGSRIVPMDGEESNFKRGEPQTRNAKKREKKGARVGNKRYKLRRNKLIYVLQKLDMLPDQIKLNKSFDNALKIQKVNVLPIKEGTFQLTDNEFLQLRVKAIHEPISKKEFGRVLYRFNQLRGYAGGDHEDLKEDLDEVLGLTSTKKIPTQISTINNYYIVKLLKTDEIKGKKKKVVYEITVKNENGEILTGSTIVDGLKQHETVELQQKIRQNSKTGVVSSREFSVPNKTGWRKKMENIEDALEKHALSKGRKTYISEYLLDLSNEVETKKIRDNVILRSRYQEEFDAIWQKQSESLIKDVPKETIIEIANFLFPGKSITQIKLRNEAIKKGLYHIIYNQIIYFQRPLKDQSHLISSCRFEDGEKAVPKSHPLFQEFKIWEQINKLSLNQREQIGVRRNGKPKFRFKERTISTQFKEYLYLELQVKQKISFGAVFKKLKETEQFHEGKTFFNGLSTKGELRGNDTKILLKKRLGQYWNFLHLDDINNLIALWSILYNGKGNEYDINSDRNKKLSSFLITMGINESREFEKVVIAISSIKFKRDYASISLTAVNKALMLVRAGEYYNLNKLDEEVYQKISKILNENVTDNFEKALQRYLENNESQILNEGGFINAYALMLLYGKHTAKEISSSDVFSSYSEITPLKRHSLRNPLVEQMINETLMICKDVWREFGQISVIKVELARELKNSKKQREKIHQANKDGRIANQKIRQRLSELKYELSSSNVERYKLWSRQPNRNPEYLATYESTKSEENKLKLWEEQGHVDPYTGKPIPLSHLFNKGLYDIDHIIPQSRYFDDSLANKVVCARKVNKDKGNRTSMEYFENGSTECEILSKEIFMDNAVNKFFGKKRNMMLATSIPNNPIDRKKKDTQYIAVRVREELAKIVGSENVKTTTGGVTHYLRNHWGVTKIFKGLLKNRFEDYYRKKAEKEFDQLQKKGESVVVFLIDLATRNLNQDSSNQIINKMLTYDEINLELFTDFYIDCNLFMKGNNQIMLGYSKRYDHRHHAMDALITACTNPEAVKRLNELNKHLSDWLKKNINKYNVDLNVSNEDLLENFLQLEPGVKDVVLKDVKNFRKVEIPWVGFHKDVEKALSETVVSIKPKDKILIQKKEEKDDKGVLYKTKEKIIRIRGPLHEETIYGLSSGYETVRVSLQKFASQNFDTVGNLKKIVNNDVRRILTNHFEVLHNKSKSEAFGAEGLLGLKKTLSSIGHPEIKSIKVYRKKPVKNYKISLQKLEREKSYNQSLYVKTGSNYLFAVMAKDNGNREYDILSLFDAVSLIKDAFVEEPDKSKFSKDDVLKCYFEQKNKSKLMFSLKHLDMVYLPDEGEEIVIDETSPLFTPFWNSPERVKNIFSVTKFTGKEIYFNHHTTAEVIEKQVELGSQNMLQTLNGRKIIQYCIPITLDRLGNIIKVM

SEQ ID NO: 9624 - protein, 1535 aa, unidentified
  REGION 1..1535: note = Description of Unknown: Cas Enzyme sequence
MKKILGLDLGTNSIGWALTTQDFEKKTGGIDGIGVRIIPMSQDVLGKFDAGQSHSQTANRTSYRSVRRLYQRSILRRERLHRVLNILKFLPTHYKESIDFEKHFGQFKKNTEVKLNYKLNDEGKHEFIFMESFNEMVAEFKAAGQETKIPLDWTIYYLRKKALTKRISKEELAWLLLNFNQKRGYYQLRGEDKDDDIDKNKTFEALFVSEVKDSGDLIKKTGEPLFDIYFENGWKYDKQTTKPESWLNKKKEFIVTTKELKNKEVKRTFKLVDSEKDWIAIKEKTQQEIESFNEEKNLVGVGQYIYETLLEKPTQKIRGKLVKTIERKFYKEELQKILGTQIKFHPELKDRELYNACLNELYPRNEAHQNNIKDNGFDYLFLDDIIFYQRPLKSKKSTISNCPYEERVFIKDGVRNIQNVKCIAKSNPLFQEFRLWQFLKNLKIYQKENSENKKIDEDITDAIFTCDNDWVLFYEFLNDKKEVEQKHVLDFLVENKKIAKSDKKNYRWNYVEDKKYPANETRASFLSRLKKVKNYNESGFLSKEKECALWHIIYSVKDKKEYEAAIKTFALKNDLDKDSFSEAFIKYPPFKNDYGAYSEKAIKKILPLMRMGAYWDETKITDTIKNRIKRIHERLESIDYDKEVFKGDEKDRLKTIVDDEIPKQFIKSFIEYKDRNSLTGLNTYQACYAVYERHSEAGIIKPWKSPNDIDTYLNEFKQHSLRNPIVEQVVTETLRVVRDIWKHYGKGKTNFFNEIHVELGREMKNSSGKREAMSKRNIENENTNERIKSLLKELKNDSSNDIRPFSPSHQEILKIYEEGVFQNPDVSFSKITEDDISKIRKSNSPTKSEINKYKLWLEQGYLSPYTGEIIPLSKLFSIHYQIEHIIPQSRYFDNSMTNKVICESEVNQLKDNKTAYEFLKGEGGRLITLSNGDTVELLDIESYEKHCKQYFKKNRTKLNNLLSEDIPEGFINRQLNDSRYISKVVKTLLSNIVREDGEKEATTNRLLPVTGSITSKLKQDWGLNDKWNELIAPRFMRLNELTNSKDFGEWDSKINAFRTKVPDEISRGFSKKRIDHRHHALDALIVACCTKKHTNYLGSLNSERENYGLKASLLIKNKKGDFTKNFQLPWSNFSSDAKENLEKTIISFKQNLRIINKTNNKTWQWEPQADGTFRKILKKQKDSTNSNNKTNWAIRKPMHKETVSGAVKLKKIKKELGNINRYLDKSELIVDKSIKRKVKSLLTLFDNDLKKVKKYLKETPLLVEGKETNKTQVFEWTEKATATRVPLNEMFTRKQLESVTDSGIVTILERHLQNYIDNDQKERFDLAFNPNGMDALNKNIKVLNNGKNHYPIYKVRLYEEGSKFSIGESGTKATKFVEAAKGTNLFFAIYYDEDKKKRVFETIPLNEVIAYQKQSASIPKEKRLPIQPNNLKGKLLFTLSPNDLVYVPTDEELENKSLINFNNLSKEQVCRVYKMVSSSGSQCFFTRNDIAKPIYNKKEFSALNKMEKDIEGYMIKELCWRLKVDKLGNMLEILK

SEQ ID NO: 9625 - protein, 1031 aa, unidentified
  REGION 1..1031: note = Description of Unknown: Cas Enzyme sequence
MQTANKQRVLGLDLGTTSVGFALIDYDQSLHSGSIVHMGVRIFPDTRDNKTEVPLNQQRRAKRLVRRQVRRRRKRRRELNEFLNLHGLLPKYGTEEWHSLMRLDPYELRRRGLHEELSPFEFGRALYHLSKRRHFLGRAIETQDFDEPDGEDNKTREDRENVLRELKEHEMTLGEWLATRTAPDKKRNVKASRDVVRQEFQRLIDHQEQFHKETIQDYSSLKSHLEQIIFEQKPVFWRLNTLGQCRFFPESELCHSGSWLAHQRRMLEMFNNLLVVGNLQPLDDEQREAILEHLGSRSHMTWTQVRKALAPIYETRSDEGYEKTIKFNLEEGGARHLLGNPVEKDLKEIFGDDWDSFPLKQEVRDQIHTDLWNCDYKKIKNQRVVINSQEIRQSKRQALAIELQERYGITTAKAEALTKLSLKTGWEPYSVEATKIFVEMLEKGYGMGSLLNSPDWAEWRNSNFPHENEGSTEQFDRLPSPKHPSEQARLRAIRNPTVVRAQNELRKVVNNLIDTYGKPDRIRIELARGLKLPKAVRSKIQKRNKENESLREAARKNLEENHIVNPSRRDVDKWVLWKECHEECPYTGSHIGFESLFGANPSFDIEHIWPRSRSFDDSLANKTLCLSSENQIKGNKTPYEYLGSNRDRWFHVEKRLEKMRAKGNNIGMSVQKIRRFRSPEIPDDFANRQLTDTSYVSTEAVASLKRLWTNEENARNVLVQAVSGRGTSILRKLWGMNNILSGTDAKTRDDHRHHAVDALVVACMHPSIHKQLSEYWSRKESHYSRPLALDPPWPTLRQDAAIHLESIVVSHRVRRRVSGALHEETVYRRTGNVSGKGNVEEFDIRKPIVNLTSTEKKNVRDAKLREVVLKSDKTSEIRLGHGPEVKRARVIKNKDPKLLRNVSNGYVESGENHHMAVYRDEHGRTKYEVVTRFDAAKRLSQREPVVQRTRPNSEFINSFSIGEAIQIDAGEYIGVWIVKMLRADGRVYLIKHDDARPKPSAIGLAINQLITKHKIRKISVDPIGRVRPSND

SEQ ID NO: 9626 - protein, 990 aa, unidentified
  REGION 1..990: note = Description of Unknown: Cas Enzyme sequence
MSRTLGMDLGTNSLGWALIEEVEGNPVSILDAGVRIFQEAVDLKTRVPKNQDRRMARAMRRRFQRRRMRRELLVKQLVGAKLLPDSADERERILLDSSEYHPYRLRALALEVELTPYQFGRILFHLNQRRGFKSGRKSGKKDEEGVVKESIAAIRAAMKGRYLTLGAYLNSLDTQRGKPDAPRYTDREMYIEEFNAVWESQQRFHPQLLTDELRARLFKTIFFQRPLRIQKYLIGKCTFEPSRPRAARALLEAQRFRILQDLGNLQVKNPITLKYRPLLPEERNKLFKALDIRKSMTWQQMRSTIGLHEGEIFNLEMGKRTELLGNQSAHALRSVLKKQWDTMTPEAQTQLVEDWLTIENEGGFLRRMQEHWGFDEPTALALAAKEPPKGYMKLSRKAINRILPYMREDGLPYDKAAEEAGYNHSRPFEHIGEAIRLGAPDNLRNPVVQKALWEVRKVVNALIREYGRPEVIRIEMARDMKESKKQRSETQRKQLENKKKRDRVKEILEREFGMQRPSREDVIRYQLWEECNMTCPYTGKTISKAMLFSPEVDIEHIIPYSISLDDSFLNKTLCIASENRLVKKNQTPYQAYGHLEKRWEEMLLRVRNSSLHKRKKELFEKKEVDLDEFVERQLNDTRYICVEVKEFLAPLGSDIQVSKGMATAALRKFWELNRILAPDGDGEKNRADHRHHALDAVVIALTSRSLFLKLAKLSKASPSKGGLMDGAFPVPPPWPTLREDIVRALDKIIVSHSPNRKISGPLHEDTIYGYAGQTEDGKSELLVKRVPLATITLPQLTKIRDPYIRQLAEQRIGETRGDLKKAFADPENPLMHHDGETPIRSVRILLNKHPLSMHKKGRNRKGKPEQVLLYGSNHHVEIFEHEETGKRIGRFVTTMEAARRVRIEKRPIVDKTYEPGWRFVMSLGINDMVVVDGKVYRVQNLDGTADRVVLRTHNSASSEKDITRLQKSINLLRCRKLTIDPVGRMSECHD

SEQ ID NO: 9627 - protein, 1112 aa, unidentified
  REGION 1..1112: note = Description of Unknown: Cas Enzyme sequence
MKILSLDLGVTSCGFSVINSIEQNSYKLQDFGVVMRDNPSDGGTQKDRSGYLQSRSLKEKKKNRVNKIKTLFILAGLNYKDKINYDIWYLRAVKSFNEKLSNDELFALFRYFAKHRGYKSLKIEDLIAEIESQEKIGDCEGGEIIPPKDLEKFSDTLAYLDALKCKHKEKTVAQILWEIESASPTPTFRNHDNYRYMIRRDDIGKEIETIVRTQHTYGFFDPGFDIETFIDSLKKIILYQAPVRLNEALIGNCTIYKNEKCAPIYSLAYDRFNAYKLINDLKIGNNSATSEQKERLIAYIDNKIAEAKNLVGLSVKELKAILDINDEALKLNNHGEYRTIKGKKEPNHLIKFSFVSKLSKFDSDLLKTLLSHQERDQIFDQIATIIQRNINPENMLNAFKELFQTIRLNTDEDTIRTFALSLFKEKKSGSGNYSFKALGDLTRLLLEGKNETDAKTVLGVSSSENYESFAKGIKYLHVNQYENDEAVISNHIVKSIASWAIRIIKDLHDKHGPFDQINIESTRELSQPEEIKRQIKSSNDANEKEWQELIRKYTPHAIQKGINLSQSPSYVLKLKLWEQQKFFGIYSHQPLGIDDILSEKTEIEHIVPRACGGSNAEYNKAVDLKNENMQKGNRLPLDYLHDERRSIFIGFVAELKETGLINWKKMKNLLAESLDETYKEAKDTISLHATSYAEKLLGEIIKRYYPFMDESKRRNGIGVMHISGRATSYLRRILSIENKSRDTNFHHAEDAIILGLMSRSYLQNISTNFTENYAKTVQEAKENFKKIIPLIDGAHPNEIFAHLRKSYEQEIETNPFYKGLDGSLRIPSYWVSKKPIGTKAHNETIQSAKNFAYYVPVASLLGRIKPNHKMHPDDFKKSYDTEVLEKLQVFQTNPKDHTAKAFVARRDETIAILNKANFITSKDEQSEIDKALRSAYNAPILDVNGNPMRRVKRVGEEASISVRGGVAYTAPSLLSMRCEYADTTKLVLKRIDIRAFASSDQIKAHQIDIYNNDLIEIFIIKSKSIESKVIGILKGFTESKGGRANIRNPKFPALKEKQPKIYQNEISIGSICGIKKYKTDATGKVLGFYYLGRVKEESAELFSPVVAYRKLL

SEQ ID NO: 9628 - protein, 1385 aa, unidentified
  REGION 1..1385: note = Description of Unknown: Cas Enzyme sequence
MDKKIENGKSKDKNVRNDYFIGLDVGTDSVGWAVTDTEYRLKKAGGKPLWGAYLFAQAETAENRRGFRTGRRRTARTRYRLRLLQSLFGAEIEKVDPTFFIRLNNSALFAEDKDDRIATKYILFGDADYNDKDYFKQFPTIFHLRKYLTENAPQDIRLLYLACHHIIKSRGHFLFDNENMNVVSTDTVRMAFGNINAALAEGVTDDEQFDASPVFSMSDEKFAAACEIVRSKKTGSDKQKKLAEIFGINRSDKRALSVLRLICGNTCKADDLYGKELDDNVKIDLSAIDDVKFSQIQEMYDDGCLLDGIKAIYDWSVLSDILGGEKSISAARVHSYDTHKYDLSLLKKYVREQCADKYKNVFRYDVNAKNYAAYIGMDKHKSYKKATRDAFYKFMEKQIFVDGKDGFIRWLDDNGANDARVRYERGEFLPKQKLFSNGVIPHQLHLNELSAILNNAKCKYAFLSETDSRGKSVAERVEELLKFRIPYYVGPLGGGKFAWAVRHEGMQNVKITPWNFDEVIDKDASEEKFIKNMTCKCTYIPTEDVLPTGSLLYGEAVFLSELNNLKVNGQKDDKLIDWVYELAHTEKKITKSKIWNALKIHGCDMTNITKESITGIDGDMKSSLSSYILFNKTLEGNIENEREMCEEIILWSTLVSDKDRLKKRITAKYGKKLTEKQIKEICGFTFTKWGRLSRTLLDGITSEKALGAAGECLTVIQSMRLNKTNLSETLTAARWGFDKAILEYNERNASGDKQKIDDMYCSPSVKRALRRTLAVVKEIVKIMGCAPKKIMIETARGGTKEQKGKRTVSRKEKLLGLYKSVKSDTREFAKAIAEIDGREERDFSSKRLYAYYMQNCRCMYSGERIEINELFDKNKYDFDHIYPQSKVNDDSFDNNLALVKKEYNARKTDKYPLPADIQIKMRGFWDDLHKHGFISDEKYKRLTRTSELTPSDIADFESRQLVITQQSTKLVAQILKANFGESEIVYSKASKAAEFKNRFGEFAEKAGCAEKYRAELVKVRELNNLHHAKDAYINIVVGNVLNTEYGHDISAYYKNKSEKEMKSDYALFRRGVKGAWDPVRDIPLVFDTYYTDNCRVVRFVNEDSGQLFDATIKTAGTNDKLIPLKAKGKISDTKKYGGYNKVKIAYFALVKSKDEKGKAILSLEPIPVMATKLSDGVQRHIIEKSGLADPKIVIPKIRLSSLLIVNGSPVYIKSKTNKSIVIDNAAELYIDKEMTAYLKKVGSFNNKYNEAKKYKKTIKLDEKYDGITRDKNVKLYDIFTEKLGMKIYAGLSMVGQKKTLENLRNQFQEKSTEIQCVILCKILSFMKAGGQSLDLSDFNKANGSAYGSQLGVNTIPSKLKDHIKLVVQSPTGQYRQVIDFDKFLP

SEQ ID NO: 9629 - protein, 1438 aa, unidentified
  REGION 1..1438: note = Description of Unknown: Cas Enzyme sequence
MKRILGLDLGTNSIGWAVVNEAETNEEKSSIVKLGVRVNPLTVDEKSNFEKGKSITTNADRTLKRSMRRNLQRYKLRRDALVGLLRENGWITEDTVFAEQGNFTTFQTLGLRAKAASEKISLEELARVLLSINKKRGYKSSRKVQGDEEGQLIDGMDIAKVLYEDGKTPGEYVYEKLSSDINYKAPDFYRSDLQNEFDRIWDAQKAFYPDILTDGLKEELRNKNEKQTWAICREPFQIEGIKRTAKGKELVKENYEWRVRALSEKLDLESLAVVLQKINSQIRNSSGYLGDISDRSKELYFNGQTVGQYQMAQLEKNPNHSLKNQVFYRQDYMDEFERIWECQARYHTELTPSLKHQLRDIVIFYQRPLKSQKGLVSICELEGRQVEVEVDGKKKRKTIGPKVCPKSSPLFQEFKIWQILNNVNVNRRYLTQEEKEELYDRLCTCDKLSKSEVMKYLKPDEYNTEWAQDSLFAPDEMYDPEILSRKHRNKKEINLNYKELEGNRTMAALLAAYSKIIVATGHEEYDFSKKKFSEAVKIISDVFRGLGYRTDFLHFDSSLEGKAFEEQASFRLWHLLYSYEGDNSVSGNYRLISKISEITGFEPEYAKILAAVSFAPDYGSLSSRAMKKILPYMKEGNTYSLACEYAGYRHSKRSLTKEELENKEYKDKLESLPKNSLRNPVVEKILNQMINVVNGVIDEYGKPDEIRIELARELKKSAKEREEMTAAISKSSREHDEIRKKLIDEFGIENPSHNDIVRYKLYDELRINGYKTLYTGTRISREKLFSKEFDIEHIIPQSRRFDDSFSNKTIEARQANIEKGSSTAFDYVKAKYGEEGANGYRGRVEKLLAEGKISRTKYRNLLMTESEIPDGFIDRDLRDSQYIAKKAREILESIVRDVVPTTGSITDRLREDWQLVDVMKELNWKKYDSLGQTYTYYDKDGRTVRKIKDWTKRNDHRHHAMDALTIAFTKRSYIQYLNNLNARISKSVDDAPSIDLSDYELRYIPKSEMTKVVRAIEHSCLYRDNKNKLRFCPPIPLDEFRAEAKRQLENTLVSIKAKNKVVTRNTNKTKKQGGVNSKVQLTPRGQLHNETVYGSIRQYVTKEEKVGSGFTREKIATVANAIYREALLSRLATFGNDPQKAFTGKNSLEKNPLYADDLHTVQVPPKVKTVNFENVFTIRKEVNFENFGKSGNKKLDKNGVIGKLHSIIDIKIREILIKRFEESNFDAQTAFSNLDENPIWLSKEKGISIKRVAIRGVNNAEPLHEKRDNNGNVIVDSKGQRIPSDFVQTGNNHHVAIYLDTDGNLQEQVVSFYEAVARVSMGMPVIDREYKKDEGWEFLFTMKQNEYFVFPNPETGFDPKEIDLMNPGNYSIISPNLFRVQKIATKYYVFRHHLETTVDDSSVLRDTTWKRIQNCNGLKGVIKVRINHIGQIVQVGEY

SEQ ID NO: 9630 - protein, 945 aa, unidentified
  REGION 1..945: note = Description of Unknown: Cas Enzyme sequence
MKKILGLDLGTNSIGWGLVEQDSDNHKGRIIGAGSRIIPMSQDILGKFDAGVTESQTAQRTAYRGTRRLYERNKLRRERLHRVLNVIGFLPSHYAEAIDFERRLGQFKEGDEVKLNYKKVDTKDTKFRYEFLFLDSFNEMVSEFNKIGYNDNIPYDWTIYYLRKKALKQKITKEELAWIILNFNQKRGYYQLRGEEEADKNKHFVQLAVQELIDTGEEVKGKKLYEVVFDNGWKYDKTITKTEDWIGRTKEFIVTIKDLKSGEKKYSYKAVDSEVDWLAIKSKTEHDIDKSGVTVGQYIFSQLLANPNQKIRGKLIKTIERKYYRNELKQILKTQEAYHTELRDEKLYASCLKELYSRNEAHRKNIKSKSMAYLIEEDIIFYQRPLKSKKSSIGGCQFEYRTYYKKDQNSDEVSKQRMPLKAIPKSHPLYQEFRLWQFVQNIKIIDRDIELTVKKQEDAYVTKELMSTREDIVDLYDELNSRKEVEQKNVIDYFVKKGKIEKANKGKYKWNYIEDKKYPCNETRYELLKRLKKVNGIKPHEFLTNEKELKLWHLIYSVTDKVEYEKSIENFAKRNGIDVASFVDAFGNMPPYKSDYGTLSHKAVNKILPLMRIGKYWKEDAIVPQTSDRIQKLINGEYDESIRERVRQKAINLKNVSDFSGLPYWLTSYIVYDRHSESADIAKWRTTEDIDQYLNNFKQHRLRNPIVEQVVTETLRVVRDTWDKYGEGKQDFFDEIHLELGREMKNSSEKRKAITTRQSENENTNERIRSILEELQKDNNVNGDIRAYSPSHQEILKIYEEGVYQNPEANFSIVSEDEIYKIRRNNSPSHNDIQRYKLWLEQGYISPYTGAVISLSKLYTAAYQIEHIIPQSRYFDNSLNNKIICESDVNQDKGNMTAYEYLTRNGGEIVDGHELLSLENYESHCQRYFKKNRTKLANLLSEDIP

SEQ ID NO: 9631 - protein, 1346 aa, unidentified
  REGION 1..1346: note = Description of Unknown: Cas Enzyme sequence
MKKILGLDLGTTSIGWAFIHESESDSEQTEIIGAGVRLVPLSKDEIAEFSAGQQISTNANRTLARSARRGLQRYKLRRAALLNVFLQNGWIKPENHYAEVGTLSTHSTISLRAKAATEKIEFTDLLKVLISINKKRGYKSSRKDKFLAENGVAIDAMVIAKELMTKKQTPGQWVHKYFAEAGFAKVPDFYPSDLKNEMKLIIESQNSFHPDVINENLIEKLSDKTSKTAATFFTKELNIELSEHLGLRSDRIKNLYLLRSRALSEELPLGDIALILSEICGQISGSSGYLAAISDRSKQLVVKNQTVGQYMWELLSSNPHDRTKGLIFYRQDYYDEFETIWNCQSQFHPELTQPLKEEIRDVIIFYQRKLRSQKHLISNCELEENRKCIPKSSPLFQSFRIWQNINNLEITDSSTGEKAMLDEEAKNHLFSFLNQRDKLKGEEAKKVLGLSKHHELNFKEIQGNRTRAAIIDSFLKICDLEGHSLERDLKSAVAFEESLSQMLLHFNMPADLLSFNLTDTKVYNDLEKGWFHQLWHILYSAEEDQFVKKWFQEKLSFSESWAKAFLATPLETDFASLSAKAIKKILPFMTDGTRYDEACVLGGYNHSKSLSKEENANRILVDRLTEIKKNSLRNPVVEKILNQMVNVVNAIADSEKYGKPDEIRIELARELKSNVAQRKTMSSSIADNTKKNEQIKNTIRKEFGDGYVTRNNVLRFKLWEECGKISIYTGKPIQGSELFDSVYDIDHIIPQSRLFDDSMSNKVLCERSLNIAKGNKTAYSFLLEKYGEESTEFQQFLSRVKDLKFRGLIKFSKSQKLMTTDEKIPNDFVDRQLRETQYIAKKAKDLLNTFARNVVSTSGEITDKLRKDWGIEELLKELNLERYSSRPDLISKSTNAQGRVITRIENWSKRDDHRHHAMDAITIALTKRAYIQYLNTLSAKTDKNSITYALENKYLVRDTDGKLKFISPIKDIRSAYKQTLQKILISHKVQAKVTTKNANRIKTKNGVISVTRNQGSVRGQLHLETVYSQFQRYETSFIKIGASTTLEQINSISNQRYRNAIKKRFDEFGKDSKLAFGGKNAIAKNPIYLDEREQFKIPEKLKITNIVEDYSIRKPIAPGLKLDKIIDEGIKKILQKRLAEFGGDDKKAFVNLDQNPIWMNKEAGIFIKSVKIKGISNAISLHEKRDHFGNTIINKGKAEPTSWVNTGNNHHVAIYKDENDKLSEDVVSLLEAVTRKNLGLPIILEEHPEKGNLVLSLKSNEMFLFPSETFDPFAIDINDPNNYSLIAEHLYRVQKFSSFYYVFRHQYETKISNDKDIKDITFKRINSMEPIRRIRKIRINHIGEIV

SEQ ID NO: 9632 - protein, 1429 aa, unidentified
  REGION 1..1429: note = Description of Unknown: Cas Enzyme sequence
MVKQKNKETADLQSFMPIQVGIDLGAQNTGVAIRYGNQTEGHLIRIDPEAVKKKWVTVSMKGRTLKRHQKRGLKRRKLAKRLLRVILSQGLHFNLNAKLSANQTAEQFFFGCLNRRGFTFDDDVDESHRELENQELIREDLAEIIASVPSLGRQIDRLFRGKASTFTLSKLLNQAIQIPGVLESMEEELEEGIKNNKNLKKNEFFKYLRVRISHLLNTRDGKKHRTVYFQEIDDLIKSTLQRLPSEKKAELCRDLPNLDQLCHLIGNISNLQLRVLRRYFNEKEYQGSKDRWDPKRFYKIWQRSIVSWHPNGDSEVKKQRKDLLVVLKELSESTQSESVFDSVTLALLKIHPRQTIPPFEDQNNRRPPEPNTLVLSYSRVLASQWGRYLEYWCEKLERANPSWTLGLPKSIQIPSLANNQKDAPQAMNQQIKALFLQRILDRSRAHDPYHLRYLSGLQSRNEDVTSSQGFQNLKTSFIGNKEATLSFIDFAKTYYEQDRLIRDGGFQEGLLFERVSGHLKMKKNSEPELLTARLGSTVRLGSSQIWQIRHAFDSKIEGLTTVKTVARILSDVESEYGARAIDELTSILKIEDEKLQRQEFTLWTTAIPKITIKKSLKDKEDKIRRSIKIFQNALHSNGIEFDPRYLDSEFDLIHLYNLLFTDRTGFCKELSWVQAENHWRNKKIQDQAGNLHAHCKKLQEDTAKPIDGVIQRLFSIQTRLIAKAIWKAIGKDWSGHIDFVIEENAFQSRRELLEVKIKDGINVKVRKEKNDKLELTEQGRTDEKFARIDRFSFGLCPYSGISLSSHQREYDHIVPRSWSMKKYGTIFNSEMNLISVSGKANQKKGNSLYRLIDLSEKYLKKAFNGRDLKQVESYLISNWKLIHKKLESVQFRHLAEEEQKIAKHVLFLPESSEEWKQAVHYLNRSSQQKVNGTQKYFIKSLMKELRYLESQENSTKARISGFKSALIRSEVVSLERKRLANQNPILEKKKDTGQSAYSHVVDATIALQIFLSQQNGEVLEFSEIAPQSVRIHRPESRSPYKAGYFSKDTWNRVSWFKETFYRMNSIPIWITRKGTLGIGFKPNRLAMIKEEVKSEFWDTVSPYLKDFGRLDLNKGLNVLIQQSKNQDAYFLIDVKKYSELLRKFQNDPKSLGTVERIISDLVYYTNRCELFDNLGKPKAHLEKGLVEYAKLNIKIEKEWKTYLDGGNIEFELPDYDRLKRLQEQYERIKSRCHDKIEIKNRTIQEGKKIFGWSEKGSNFRGRHHTSFSVPLISKKSGVLAAIRRQSIMGSEVIQIQTLMAEVLPVDSSGRECLVGPLKASQRVTLLKNSVQGNGEPLKDPWAKVSQTKKHAEVLGHDEKIQASRHPRRLRLDSKLALKILKKKIWEEIGPEEGDFESELLTQISKKPRKDGKLKLLFLSNETIEIYFGT

SEQ ID NO: 9633 - protein, 1233 aa, unidentified
  REGION 1..1233: note = Description of Unknown: Cas Enzyme sequence
MPNTELTFGFDLGTNSIGYVVIDQSKKEKILGAGVNIFPEGVNRDTKGAEISKNEKRRLKRQTRRQFFRKKLRKAKLVELLVHHQMFPNVEALYQTTFDKPVPKFKVALFELLNLETLPEPLLDYFFNNGQNNPYLLRDKAVKGEQLTKQQLGRVFYHFAVRRGYKESLQTPLEDGKTLKTGDKKTGKIGIDATQELVNEHQYFGAAMYSIDPENPENKNKYVEDRIRNRYTLRNWFVDEFDEIWQQQKAFYPNLLSDDFKNELDEHVKDIIFFQRPLRNQKFLLGSCIFEKQKPKCRKSALHFEEFRMHQTINNIKIKDKKLNEEQRLILKDMFYTKDFKTEDILKKLKIEKEDINLAEKQSIKDNETYNGFAKIFKKDVWKKMSDAEKEHAWHIKINADDKEKTVAYIKTKTNWKFSETQLKQFFDLRLNKDFASVSTKAINHILPFLKKGYLYNDAVLLGGFVNALGKEEWNSWDDELRKATEKEIVELIKNPTGETIKVKLKEFCLERFSFTNKQLNKLYHHSDLELTKTTGSLPKDDELINKVRNPLVANALFQLRRLTNALVKEYGKPCEIRVEMARELKASLNQRDEIRFGQLKNEELNNKAKATLDEYNLPHTGKNIRKVLLFEEIYKQNGQAINPFSLGEGSTESFGVSDIFHKMQIEHIIPYSRSLNNSMGNLTLCDPNRNRNKSDKTPFEYAMAEGKDWETIKSHIFKVLPYKKAKRFISEENIVDESFISRQLNDTRYIAKFAKEYLKHICKKVNISQGGATAYLRDIWGLNSILNKTFLVEGVYNDGTEYYAALNEANELIESSLTEWQYSENDKENKKIQQQLLKQGKVIQGVIRKGKFIPKKVRDDHRHHAVDAIAVACTEKKFLQEISYMHGQYERGDQAKKAISNFPEPWLGFYQDARKAIDNILIYYKVNNKVLSKTRKKVFDKKTAKHKENKDGSKRYGQGITARGQLHEETIYGKRKAPFEQSHGFHIRKNLADLTSAMLDKIVDPIVRHQVYEFAANHPNAEWDAKGKLNIKKVEFFKFDETENISKPLVFMPQKTDKKTGELKPKRPIKKVRIRQESSNAIQLKNINQWVEPGNNYAVVLYDNEDGKRYGKVITFWEAVEAKRNGLDPINQNVNGEYLMHLKKGDMVLMDYESLDFDGLPDNLKLSKSLYYLRKFSSSGGQIKLIFVKHNYSNVEVDRAKFPIVIRKVPNTLKCIKVEISLTGKLVRPKVL

SEQ ID NO: 9634 - protein, 1283 aa, unidentified
  REGION 1..1283: note = Description of Unknown: Cas Enzyme sequence
QSRRKYYRRKMRKGRLLRILIQQNMCPLSIEALDKWTKHVKGEAKIYPTEKAFIDWLKINPYEARREATKEKVDAFVTGRALYHIVQRRGFKSNRKDQSDEKELGKVKGDIAELKENMGDDFLGTYFHKILEQEITEEIERNTIEDKERKPIEAKVRGKYTGRDIYLEEFEAIAKQQQLSDELITKLRNEIFIHRPLKSQKHTVGKCTFEIKKNRAPISSLAFEEFRMLQFINNIKYKNLDDETPDWITLSDEQKAEIKPLFFRVSKASFDFAEIADKLTPKDKKGRWRFNYKLKQNVARCICTARLKNFFDKHISKDSWKALSNVVSKDQISKHDVWHAIFSFNDSENLKQFGIKHLQLNEVDAEKFSKITFPQGYANLSEKAINKILPFLRAGFIYSHAVFLAKIPDIIGKKMWERKHETIIKTVRNLIDNEQKNNMINRIANDSIHYFFESGFNAGDVYVLDEDDKHTILQKVKDYFGANAWIEKKENDKQAILQEIYDKLTKQLRLNVPKVSHRYLKIPRKDERIKDYLKQNYAASDEQLKLLYHPSDIDQFAKAKKNKNGDFQLGSPVTPSVKNPMAMRALHQLKKLINYLIREGKINERDKVILETSRHLSSANERAAIDTYQRIREKENQEYKKRIIEDCHIANPTETEILKYRLWEEQKEICIYTGNNISKCDLFTDNPKYDIEHTLPRSKSYDDSQANKTLCEKTYNQQIKKQKLPVELDNYEDILQRVEPWKKKYEALDIQVKKLSRVGGSYEEPEQKKSRIQKKNRLIIERNYWRNKYERFTLKEITKGFTNSQLVDIGIITKYSRAYLKSLFSRVYTVKGTTTADVRKMWGLQEGSDPKNRTKHIHHTEDACVITFLEPPLYDVLANAYHKAEEFKNVKKDIKLPQPWDSFVQDIKSLQNDVLVYHHKQNHLGKHTYKKWRVNGKIQKRFEWGKDENGKPYKRYLNLKDEKANTIYTKGDTARVPLHMESFYGNIMYNNEADTDKEKWQKLSQEGKGIYVKRKPLEFGDLGFKTEAQLQNIVDKVVREKVFNHINQYKNEKGKIDLKEALSKPIWMNEAKQIPIKKVRCFAGDVKNPIKVKKQRDQHSKIRKPYKEFFYAKNEGNVLIAIYKGIVKGKEKRGFELVNNFDASAYYKESNYAYRNQYPIVPESKDGLQLAQTLYKGNMVLLYESTPDEINWEDKKELSRRMYKVTGLTISVIKRGESEYMFGVIVLKHHMEARKTSDLKMLDGAFKIDDNKIFRKLSHNQLNCLIANEDFKLNIDGTIEPVV

SEQ ID NO: 9635 - protein, 1010 aa, unidentified
  REGION 1..1010: note = Description of Unknown: Cas Enzyme sequence
LDLGTASIGWAVVDLAKGEIKGSGARIFPEGVDRDKSKREESKNAKRRLKRQARRQGFRRKMRRKMLANVLISNEMFPQVDGFEKEMQSLRLKAELRAFFHIDPYEKRAAGAEGKKLSLMELGRVFYHIGQRRGFQANLKAADAEDGAMQTGKPEEGKSGINETEEGIKKFRTLGSYLYSLRPSENHSDPRRRNRYTNRDMYQREFDVIWDQQKSHHPEILTDELRSKIGDHKTGILFFQRPLKSQKHTIGKCPFEKKKTRCSKSNILFELLRTHQFINSIRFADSVLSSDQKEIVFELFKTKNNACKFKVIKKKLQLENAKFNYENDYNIPVMKSFASLRKAFGAKDWDAKSLEEQEFIWHIKWQATNREWLENYARDHWNLTDKAIAGLVKFKMADEYAHLSKRAIRQILPWMEKGLEYHTAVVLGGIARAFGADAWADLGESDQNALIVQVDRDILTKKSKEITQKDRLKNYLRDEYGLSRNALNKLYHHSDLRIDLEQRDRLANPPNLRNPIVNSALWEVKRVVNSLIDEYGKPDQIRVELARELKSSKQHREDIWRNNLDRENERNAFKIELLEKNIAVNPRNIQKISLWHECQKTCPYTGDSISFNDLFGQQLFEVEHIVPRSRSLNDSYANKTLCHINENSRKGNKTPYETYSGNERTWEEIKARTKKLLPFRKYQHFVKKNRPELEEFISRQLNDTRYISRASSSYLQSICNDVRVVGGGVTAILRRNWGLNSILSPGQKVEGLPDGEYAFGFDKEEQLIAYEAITPSTQKAVVEKMKKNAVVVTGRSKAGKILYDKSRIDHRHHAVDALVIACTQEKFLQEIARRSAGNQDVSTIGDYQHFPLPWEVFRPEAKTAIRNILVSHKQVDRSFSLSRKWVQVKVKGESKWIKGQGMAARGQLHKETVYGRRCDGKGGYYFHIRKSLDELTNAAQVNKIVDDRVRKIVKDHLEKEGYDLSKKYKIKPNTFFDILDNKERVPKLYLPNKNGAPTPIRKVRLRERSS

SEQ ID NO: 9636 - protein, 1376 aa, unidentified
  REGION 1..1376: note = Description of Unknown: Cas Enzyme sequence
MKKILGFDLGTTSIGWAYVHEAQNDEETSKIIRTGVRVVPLSSDEQNEFESGKDVSTNVARRMYRGMRRNTDRYQLRRDQLIRIFREIGFIDDHTIFAEDGKDSTHETYFLRSKAVREKIRKDELVRVLLMINKKRGYKSNRKGQEDEDGTLIDGMALARKLRDEGMTPGQYLATLDEHKLQVGIDFYKSDLVAEFDRIWNIQSEFYPDILTAEHKKELEEKNRNDTARYLEKRMGIQRADPKGSRMEKRMMNYQWRAQAAVREITLPELAYVLTELNNEINQSSGYLNAISDRSKELAFNGMTVGEYLYHQLWQNPHQSLRNQVFYRQDYIDEFNAIWEEQSKHYPELTERLKKKVGEETIFYQRRLRSQKGLVSICELERREVEIHSNGKTSKKWVGPRVAPKSSPLFQVFKIWQVINHLRVTKKSAPGVVHDLTLETKIELFEELDFVDRMTENQFLRWLFGGNKDENPDDWRVNFPALEGNRTRHSFHTVYVKMMMLEGNDKVTVGRLTKNDLRVFFEDHGIDARILDFDPSLEGQALIEQPFYKLWHLLYSYEADQSKTGNQSLIRALMNQFGFSEEQARIVAGTTFEQDYGNLSVRAMRKILPHLQDGLAYDKAAAMAGYNHSGSVTADENLKRELAERLDLLKKNSLRNPVVEKILNQMINVTNAILDDPELGRPDEIRIELARELRQTQEQRRETTSAIARATRDYEKMRERIKEDFGLPYVSRNDLIKYRLYKELEPLGYRTPYSDTYIEPHELFSNKFDVEHIIPRSRLFDDSFANKTLELRSVNIEKGNMTAYDYCEKKGWLDGLRTRTQKLLDAPNGINFTKARRLMMKAEDIPDDFLNRDLGNTAYIARKAREILLDITRRVTVTSGKITARLREDWGLIDVLKELNWPKYKAAGMTYYEENRHKQQLRRIEDWTKRNDHRHHAMDAITVAFTKPGIIQYLNNLNAESRKGFIEHNLEKKHLYINEKGRKLFKKPFPGIRQAAKEHLEATLISFKAKNKVTTLNTNTYKIKGGVARQETHTPRGQLHKETVYGRSKVYVTKMERVGGRFDRDMISTVANQAYREALMKRLEEFDDNPRKAFTGQNSLKKNPILLPNGQEEVPERVKTVWLEDQYTIRKDVNPDNFKNQGHINKVVDVGVRRKLQERVELFDGDFKEAFSNLDENPIWLNKDAGIPIKRVTMTGVSNAIPVHFKRDHFGKKILDERGEPVPADYVSTGNNHHVAIYRDENGDLKEEVVSFFEAVVRRNTGLPIIERDHPMGWEFLFTMKQNEMFVFPDESSGFDPAEIDLKDPVNRAVISPHLFRVQKFATRDYWFRHHLETLIENKKELSDILYYRINTPKNLTGIIKLRLNHLGEVVQVGEY

SEQ ID NO: 9637 - protein, 916 aa, unidentified
  REGION 1..916: note = Description of Unknown: Cas Enzyme sequence
MEDMIYLKVQNTTDKGSIPHQLHLLELNKIIDNQSKFYPFLKEIKDKIVSLLTFRIPYYVGPLNRTSEFAWIERSDQKIYPWNFEEVVDKEKSEEKFIKKMINKCTYLVKEHALPLQSIIYQEYILLNELNTIRVNNKKLSIEAKLDALEQLFKKNNTVTITKFKNWLQIYFGENKAYSVTGLSDEKKFNGSMSSWNQFTNIGFDLTNKDHLKMAEDIILWATIFSEKETLKKKIERTYPQLTKQQVKSILSLTFKGWGRLSYQLLDGIYFTLSNGDKTTILERMRNTNFNFMQIINDKENGIATKLEELMADNISELDILSQIQELPGSPAIKKGIQQAVLLVEEIKKIMKKEPKKIFIEFAREDREKKGTRSRYKRLEEVYKVLLKENDRMYREDVYQELKNLKQNEEKLNNQKIFLYFLQNGRCLYSGKEIDLNTSDLEIDHIIPRSYTKDNSLDNLALVLKKENQRKKDDLLLSEKIIQKNKKWWNYLKRKQLMTEKKYLNLTREKITLNAQKGFINRQLVETRQISKHVKNLLTNLYPETKIQTLKAQFNSDYRNSNKLYKIRSLNDYHHAHDAYLSIFLGEFIDRKLPWINNYDPKYRHFYDKQIKSIYSDKKFLNRDNKYGLLELIYQSNEKVNWEADVQNKKVKKYLNYKDCFITYKVEEKSGEFYDQNLSPAGKDKMTEQKRGRDPEIYGGYKSQYPAYLTLIRFKNRVRAIPIPVQINQLIKDNQLTLQDYIKSLDSSYEIIRECILINTLFELNNHPFILRSSSERINGKQLIISNNLHQLLYYVERGLTYDQKQEDFKKYLKVLIDKLTTQYTELSGSERLAKLIEEHLEELYVLSDEEINTFVNESLKFFQVNSENPNFKGIPIDAFKKLTSRYGRMNSINWSQDITIIDQSITGYYESRLKL

SEQ ID NO: 9638 - protein, 370 aa, unidentified
  REGION 1..370: note = Description of Unknown: Cas Enzyme sequence
MSNMKNVNDYFIGLDIGTASVGWAVTNTHLDLIKKKGRNFWGSRLFDSGQTAENRRFYRSSRRRYQRRRQRIELLQSLFEKEIEDVDQKFFKKMNKSWVSNQDETRKKPADFIFEPHQNKEKESYYRQFPSIWHLRRHLIESQDEKIDIRYLYLAFHHMIKYRGNFLYTDAEFQQTGVAIESQIDRFIEYLEENYEISIDRNNFVTAIKDTLSDNNITTAEKRDRLKESFKNYKLISKQLNQFINAILGYNINFKTLFLLDEEVKGYVKDGFEDEKFIPVLEHLGTYDDLLEVISNIYSWGILRKLLPNENNHFISLEMVKRYEEYGQDLLELKQLFQEYLGSKEKNAFFRRPQNPKAKNYYNYNLSKKM

SEQ ID NO: 9639 - protein, 1398 aa, unidentified
  REGION 1..1398: note = Description of Unknown: Cas Enzyme sequence
MFSQRNNPYCEWLQIVFKYIILSDKIKIMKKVLGLDLGTTSIGWALIEEAEQENERSRIIKAGVRVNPLTVDEQRNFEQGKSITTNADRTLKRQMRRNLQRYKLRRKQLLHILRSNHLITEKTVLAEHGKNTTFQLWELRAKAAREQITLDDFARVLLTINKKRGYKSSRKAKNEEEGTAFDGMAIAKALYDQKLTPGQYALNFLRAGGKANPEFYASDLRNEFDRIWQFQKQFHSELSDELAVKLRGMNATRTKEILKSAKFPAYEPVNKGRLEKNMEFLELRVKGLTQKLELDQLSEVIIELNKGMSNTSGYLGDISDRSKELYFNKQTVGQYLWEGLKNDRHYKTRGQIFYRQDYLDEFETIWETQAKYYPQLTPSLKEEIRDVVIFYQRKLKSQKGLIAYCEFESKLIEVSTPTGTKKVVSGPRVIPRSAPLFQEFKLFQQINGIRIKPKGSRTELALSEDDRMALFEELNWSKSMTPEAVLKRFGYKKEEAFLNYKSIDGNRTNAALLEAYEKIMEKTGHDIDLSKLSIANKLEAIAAVFKEIGINTDILNHNSSLPKEAYEQQASVQLWHLLYSFEGDDSKSGNEKLKAKLHEKFGFPEEVTAIMANVTFLDDYGSLSAKAIRKLLPHLIDGKLYSEACEAEGFSHSHAETAEERDNRPLKDQIELLRKNSLRNPVVEKILNQMIHVVNAIITTYGKPDEVRIEMARELKNNAEQRKEMFDGMNKTQREHEEIKKKLQNEYGLGYVSRNDIIRYKLYQELRPRGYKTLYSNQYIPAEKLFSKEIDIEHIIPQSRQFDDSFSNKTLEYRMVNEKKSNKTAYDFILDEKGEDGLKLYETEVYDLFKAGGINYAKMNKLLRKGDALKDGFLNRELGDTRYISRKAREILHDAIRITSTTTGSVTSRLRKDWQLENVLQELNWDKYDKLGLTYYEVNKEGKRLPRIKDWTKRNDHRHHAMDAITVAFTKPSHVQYLNNLNARLQGDRETNSIRGIEQKELYQTTEGKLKFKPPIPVDEFRREVKEVLESILVSHKAKNKVVTRNINKFKTANGVKQQLALTPRGQLHNETIYGSARQYVTKEVKVGGNLDEATIYQVSKKSYREALLERLKAFENDPKKAFTGKNSLDKNPIWLNEAHTEQIPEKVKLVSLETIYTIRKTVAPDLNVEKVIDAQAKRVLEKRLAEFGGDPKKAFVNLDENPIYLDEKKTTKLKSVKITGIANASALRPSHDHLGNLLVNAQGKAIHSNFINTGNNHHIAIYEDEAGNWHEEVVSHFEAVERLNQGQQIIKLKNENGWKLAMTLMQNEMFLFPEDESNSSNSPNRNGIEASFSSRLFRVQKLSSKDYNFLHHLETQAPNQNNSNLGTHKRIRNTNGLKPLKKIRLNHLGHIEKIDND

SEQ ID NO: 9640 - protein, 1090 aa, unidentified
  REGION 1..1090: note = Description of Unknown: Cas Enzyme sequence
MARPFADAPCATHGAATYRLGISLGAGSLGWCAVRLNEDGDPASLLDGGVRVFSDGRHPKTGSPLALDRRNARGMRRRRDRYLRRREVLLQELVRYRLMPSDDLTRKHLEQADPYLTRAAALDERVPLHHFGRALFHLNQRRGFKSNRKIDASCDDIELGLVARGSSNLDAAMVAAGARTYGEYLALRHSLAPSKHNATERHTRVRRLEESGDYAFFPLRRHLEWEFDALWDSQQFHYPDVLTEEARSRLRRIIFFQRAFKLPPPGRCAYTTQTRIAQAHPVFQRLCLIKTINELKIEQIARAPRSLTLSERDAILGAFRTRKATKRQMNWNAMRSAAGLPAHCRFVGEDEKGKGIAGDPLEAELVALYGADWRTLTPAEQWRIVSRLVHEEDYSVLLDFLQGEIGLKKEKAVGLAAARLPPGYARIGEMAATRILAQLEADVISEREAVVRCGWDTLGSGAAELFDQLPYYGEVLEHQIPPGTQDPADRPEQCFGRVSNPTLHIAFGQLRRLVNNLSERHGRPHEIFVELSRKLKLSGKQRQKANRVAAIKASLAVKRGAVLQSIGVENTGANRAILRAWEDLHPDPDARKCVYTGVPIDISMLFSGETAIDHILPIAATLDDSNANRLLAIASGKRAKGGRTPYQAFGVEAEWEAILERAQALPPNKRWRFAPDALTRFGSDHALLARQFEDSSHMAGLVHGYLAALYREVDEGGKKVRCISDQVTDMLRRQWDVNALLPDADFVKTNRPKSRLDHRHRLIDAFATAFVEPAFMRRVAVAAGEHDLFAIPPSSGVIPEPWSGFRRDLQALLERVIVSHRPDHAGLPTSAERSAGRDRTAGRLHNDTALGFTGEVDANGNELVVHRVPLASLADDQTFAGVRDRRLREELVGAVRDKCGKERRTTLRQFGEDRPAYRDIRHVRIIEPAKTVKIRDKAGRPYKGFKGNSIHHMDIWRLPDGEWVSQWEDSDGNEISSAVQMFYAHQTQSGAPEPRPHPAARKILRLHQNDMIALEHPLYGECICRVVKLRETGQVTLARHSDGGNLISRNKSAEDSFKYFSPSASGLKKARARRIRVDETGRVWDPGPRD

SEQ ID NO: 9641 - protein, 1075 aa, unidentified
  REGION 1..1075: note = Description of Unknown: Cas Enzyme sequence
MDPDYVLGLSLAREVLGWAIVGRAESGVWNLCDGGVRVYTDGRDPKTVVPLADERRVARRARRRRDRYIGRRKALFRELVRIGLMPPDVESRKSLQSIDPYRVRMLALDEMVPLHSLGRAIFHLNQRRGFKQSRKRDRYREDADLGVVLAGLDQLDNLMGAAAARTYGEYLACRHALAPQDYRAAKRWTRVRGSHEPRYAFFPGRHHIKYEFDAIWRFQQVYYPEVLTDDAYHRLVRIIFFQRELRNRPIGRCTFNDEPRIPKAHPLFQRMKLFKTINELVIEQVGQRPRALTLEERNKVLRALRSPSETKCNITLSQVRKAAGLPRDSHFRGEKGKGGRLIGDEVEAAMVSAYGPEWRDLSTGEQWQIIDCLINAQDEQALCSLLESQFGIGADWAEALIQAKLPTGFGRIGQTAAQTILAELEAEVITEREAVRRSGMGSGDHRTAGPYEKLPYYGEILARDIPCGTQDPPDHPQYRFGKVANATLHIALGQLRRVINAILAKYGPPREIVIELPHELRTSGGEQNETAAKVKRSRDAAIRRASELENRGIPNTGANRAMLQAWEELHPEPAQRACIYTGKPISFVDLFSGAVVLDHILPIGSTLDDTHANKIVTSREAKVEKGQRTPFDAFGHTPNWPAILARVQNLPASKRWRFAPDAIVRFEQDGGFIARQLNDTQYLPRLVKAYLAALYPEAADNSPHVRVIRGRFVEMLRRSWDLNGLLPDQAYVQTAKRRCRTDYRHHLIDAFVAATINLPLMQSIASAAERNSELGHPKVLNNIPVPWNGFREELKALLDRTIVSHKPDHGSLANAMDRANGRDRTAGRLHNDTAYGFTGQKNANDIELVVRRVPLLSLDSSEKIASVRDGHLRQELLRAIQGTSGKATKAALTRFAEEHPVYRDIRRVRVLEAARTIKIFDREGRAYKGYKGNSIHHIDIWRLPDGEWISKWQDEHGNTISSAIQMFDAHQAGNDRPERRPHPAAKKILRLQQNDMVALDHPLYGECICRVVKLREAGQVTLAPHMEAGDLSRRNKRTEDPFKFYSPTAAGLKKARARRIRIDELGRVWDPGPRD

SEQ ID NO: 9642 - protein, 1125 aa, unidentified
  REGION 1..1125: note = Description of Unknown: Cas Enzyme sequence
MAQILGLDLGTNSIGWAIIDDKENKISGMGSRIFPMGVDNLGDGDNELSKNASRTGDRGTRRQFFRRRLRKKVLLKALSKHNMCPLTEEDYKVWKKTKQFPSEKLSHWFALNPYELRNKALSKELTLQELGRVFYHLIQRRGFLSNSRKGGKDDGAIFKGKPKEGKIGIDDTLLSIQDKTLGSYLYEIQPKENKPFQEGLERIRNRYTTRQMYIDEFETIWEKQKQFHSSLTEDLKTLFGGRKQEGYPEDGILFHQRSLRSQKHLVGNCTFEPNKTKCPISAIPFEMFRIYQWINTVECNGEKISKEEREKLIEILLTKEKIAFKALRKAIGKESTEFKFNFKDEDKIVGTHTISNLSNKKFFGKQWFEFSEKQQEDIWHVLDFFDSKEHLKKYAEKYWSFTETQAQAISKFNLKDGYANLSRKAINNILPFLKLGFTYDVAVVLGGIKNVFGSKWETLEDEKRNFLTDNIEDIVRSKISGGFIETVKDLLKKEHQLNDKALKKLYHHSASIDAKILLEKLPVSPEADKQIQDIRNPIVITALFELRKLVNELIKTHGKFDEIKVELARSLKNSKTERNRIRKNQQHLERENDRVKSEVEKYTRVTHESMLKFKLWEECKKTCPYTGESIPIHELFTGKWQIEHIHPWSRSLNDSFMNKTLCEANENRNKGNKTPYEFYSHDEANWASIKERALKLFSDTKEYPNSYHKFKRFVQKEFDDDFTSRQLNDTRYISKEAKNYLKQICKKVTVAPGQMTAVLRHKWGLNSILNDENKKTREDHRHHAIDALVMTCSKVSYLQELTKWNRYNKNPKANNFPMPWKTFRKEAEQAIDKVLVSHKRLNNVLTVRTHKTEKDGKIYKNVGVAARGQLHKETVFGKRTAPFSEEAFHVRKPIESLTTQKHIEKVVDETIKQLIFKRIQNLDGFVKGKIPANTFFVVDEESIKQPQIFLPNENGNPVPVLKVRMKENFSGAEKLKDNINQWVNPRNNHHVLIYKDEDNNLKEDVVTFWTVVERKRKGFPVYQLPADGTKIVTTLHINDMFLLGVNEDDINWEQPDYILLKEHLYRVQKLSSKFYVFRLNTEASIQNNFHPYYIRIQSFGDGKTGWFTFNPIKVKITVSGKIEKL

SEQ ID NO: 9643 - protein, 1035 aa, unidentified
  REGION 1..1035: note = Description of Unknown: Cas Enzyme sequence
MFKKILGLDLGTNSIGWALLEEDNGKPFRIIDLGCRIFTKAVEEKTPTPKNMKRRNARLARRVIQRRARRKKRMLNYLVKLELLPKELQEHSQPEVILNDIGDPYVLRSRGLNKDLTKHELGRVILHLVQRRGFLSSRKTLLGDMVDDPDVQAELAELEASGDETISSEQAKEENAFKKDISELRDRIKNAGCRTLGEYLASFGPHGAKRNRQRLGGHLRTDRQMYKEELDLIWARQSQCHPFLTDEIKEQVEKIIFFQRPLRLRSDRVGKCSLEPRCQRAQLAKLECQRFRYLQDINNLQYFDLGTDTWQPLNDGERGKLIYFFENHASITFPGIRKVLELDRKTEFNLESDTKKLKGNITACEIRKALPAFDSLSIDQQHALVEDLLTIRKKSVLKNRLLNHWRFSTTESVKLCLLELEPGHGSHSLKAIRKMLPFLEQGQIYSDARQSADYSYNPDKVNPADRLGAPPEIPNPIVLKALHELRRLVNAIIAEYGKPDTIRIEMARDLEMNTKRFKEFMKQQAANTRANDEAAEKYKEMAGKNPHLKLSSYPTRDDKIKYRLWKDQEERCIYSGRQISLSNLFSPEIDVDHILPYSKSLDDSYMNKVVCYAAENRYKGQRSPVEAFGGSDKWTQIIQSVRRWPKQLRSKTNRFFVTEEELQQRDFINSQLNDTRYISRLAREYLLQLGTDITVSKGITTSWLRNMWNLNSLLGNSQVKERTDHRHHAIDAVVIACIDRSFYKTLVDMSKWAERRNPEFRMRDIHFDPPWQNLRGDLAQILGRTIIAHSPQRKLSGALHEETGVGFIPGIGNVNRVNLDRDFKMTKVKRIVDENVRKLIEEHLSRYGNNPKEAFAEGITLYHKDGKTPIRRVRIVQSKTTLNKLEVSKHGVKDSRGNIFKWLAYGNIHHVEILRDRGNDTYHGVFVTAMEASCRVRGINMPKQPIIRTDHGDGLEFIMALHINDLVRLKNGGTNDIYRIQKLDSANKRLELRLHAAATINNEVETLPDRESTIPALMNAEMVKLRVNCLGKIIQ

SEQ ID NO: 9644 - protein, 1022 aa, unidentified
  REGION 1..1022: note = Description of Unknown: Cas Enzyme sequence
VKNDKVKANRAKVVREGSYVLGLKLGCASLGWAAMTLDSEDKPISILAMGARKFPIGASGDVDSGREAGNNQRKRETRSVRVRLARRVQRLRELWTLLQGAGLLPPGKFKERDGILKSLDDALRQTPYELRVKAIGGPVTPYELGRAIYHLAQRRGFQPSRKDGAQKNEDDTKKSKKEEELGIVKKSISELQVAIATQGSRTLGEHLLKKSGKEPLRRRWTSRTMLRDELTQILDTQAPWHHSVTDSLKKKLHTVIFHQRPLKSQSHKIGKCDLEPSRKRCALANLDAQELRVLCRVNDLRLVDDVGAEEVELSLEQRTALLEILKSGDATFPAVRKALGIPKTVRFNAERIDDEKLLGLRTEAKLSKALGTTWDGLTQGERAALVEDLTTIEDDGALERRLVKRFTEEQAAALMHTTLEPGHSRLSHKAVCKLLPLLRSGVAYATARKEVYPKADTHKETATLPLVQSAYPHLSNPLVQRALSELRVVVTALTKKYGRPHSIRVSLMRELRLGKSIREKTWIKNRIRNKQRAAAAARILKDLGVQEPARFMVDKVLLADECGWVCPFTGKAISMKSLVGGEPQFETVHLIPLHTSLDDSFENRALCHVSKLSGLRSVEPTTMRQVEVEGRFEKMVGPTAKEKLRRIRLTPEEISKELSEGAIEGRFVDSCYASKLAVDYLSRLYPSSRQAVTAVRGAITGYVREGCGLHRVELPRGSHKYAALDAVSVALCGPGTVKRVSRAAKEATEAPSGRRRLNPEVMLPWPRLVEDVSKTLDNMVVSARVRKKVSGALHEDTFYRLEGEEKGKPVYSVRKHLWQLSPSDALCIVSSEIREVVGKRLSELRESDPRKAFAKTENLPTFRGAAVRRVRVERRDSLFSIGKGAQKRYVATDRNHHACVFLRKTRGDKEIADRVVVSQFEAQTRLSKKQEVIQAPEGAKAVPGLRTIALLETLDCTAMGKGLQTIRCVSKDPSIVLTRLDDARKLAEIGDEKLRMSVEQLRVKGARKVVVTALGEVRFDGT

SEQ ID NO: 9645 - protein, 1393 aa, unidentified
  REGION 1..1393: note = Description of Unknown: Cas Enzyme sequence
MKRTLGLDLGTNSIGWAIITEVNGKKYINAHDPEESIGHNPVLAGSVIFSEGVARVKGHEVPSVSTRTGARRTRRLYMRRRMRKQRLLEHLIKNGMCPLSEGGLHLWKKEGIYPKEDGFTSWFMLNPYELRAKGLQEKLMPLELGRIFYHIAQRRGFRSNRKGGDGEQKTLHEGSPDRGITGYDETKKLIERYDTLGKAGAELHKTHTPIRNRYVMRIDLVDEFNKLWDAQKDFHKELLSDALKAELGDGKNGDLFFQRELKGKKGDVGRCTLEPGNKRAPMSSPIAEVFNVLHAVNNIKVNGENLTEAGRKAVLPCFFRKSSPTFPIGDVRKALKKAKIEGELNYEKWEIRAAKENKEVKLTGAHTIAHLAALWNVEGVDILRAYGPMRTEDEAERKKWDDRWNLIHREQNAWGEISERKAKGQYVRKAESKYEQRDLKEYAKNVWHLTDEQVKDRKNFDLKQGYHNLSARAMGRILPYLYQGIPYHDAVLFANLPTVFKVVHKKLDANGRPLTDKNGDFITELRTGPNGKPEPYVDDRWADMNEDQRERIRNGMREQVKGQRQYSVETILLNGLIRNYRDQFNDKGRRRDFWNGDWDQRLGLAIDEAFSNSQKQEMGDSGRAQLAASIKAAFLHHIESHDKVLFEKVASMEDRIKFWLIDTYPEYELAKTIDKRGLKRRVDQLYHHSAISMYRERDDRLGSPLTRGMKNPMVYRALHTLRKLVNDMISPDDPAKRLIDKKTVVHIEMARQLDSANKRRAWENYQAEMKTYNEEAEKELREHFEASGNPHNPTDDEIERMWLYQEARHLFGEAKCVYTGKPIGVNDLFNGSVEIEHTLPRGKTADNSMANKMLCDTRYNRDVKKVGLPGSLPNFSMPARAANRDCPAINDSTKPIYAKWMKYKREVEVLRNKSKSATTKEQKDKAIQKRWYAQFFRNYWRTKYEHLMADEIKPRFLNRQLVATAQITKLARSYMNSYFEKVVCYKPEALSAFRKEWMGESFVKEKDRSKHSHHAVDAAVCAAVDRSVFDALAQYYEVHDSTDPTASFDHPWTSFGTDMHKLRDGALIYHVDKASIGRRSTFNTKMKLKDGTWKEVKATGDTVRGSLHEDTFYGRIKHKKVETKSYELQTVIRKSLLGVTQFPFTEADKANVVDPAIKALLADKDLDEIKKNGGFDMNTKNGDAFTIQKMKKVRVMIQSRVKNPVGIKAHRDQLPGFEHKHQLWVTGGGNPIAAVYADERGRPYGYVFSQLELAQYAKTAQCHTRASLPQLIPHTHPEHPEWQVIKLSGRPFIVHTGQKVVMYKSGPEEIMRDDAEDMNRRTYVIDELQVNGNNIRMLMTNVLDARDPKLIPKETESIWNPANPLKRLRFALSKLKCQFDGIDIDLSPLPTTV

SEQ ID NO: 9646 - protein, 1117 aa, unidentified
  REGION 1..1117: note = Description of Unknown: Cas Enzyme sequence
MQQEKTPYTLGLDIGIASVGWCVLGENRIIDLGVRAFDKAETAKEGDSLNLVRRSARLMRRRLRRRAWRLTKLARLLKRQGVIEDTHLFQPQHPFPHSLWQLRVDGLGRLLSAEEWARVIYHLCKHRGFHWISRAEEKKAEADSKSEGGKVKQGLAGTARLMREKGYRSAAEMVLAEFPDAQRNKQGDYGKALDRTLLGEELTLLFRRQRELDNPHAGTGLEAAILGSGDRKSGLFWAQKPALSGGDLLKMLGKCTFEKAEYRAPKASFTAERHVWLTRLNNLRIVADGSTRPLNDQERHLALPLPYQQAGDFTYKQLRSALVKAGRLPDSFRFAGLSYPSEKQKAEDKAKDPESAALIKFPAWQEMRLTLKKAGLETEWQGMAGAAMDSRPELLDRIAWVLSVFKDDEEVAGELRKLPLPSAGKMVEALLDIRFDKFHALSLKALRNIVPHMEAGLRYDEACEEAGYHHSQLHKVGEGEHKYLPPLYSGRAKNGRMVFNEDMDVPRNPVVLRALNQARKVVNAVIRRYGAPQEVHIEMARDLSKPIDERRKIEKDQTEFRVRNEKDKAEFVAQFDIVGLPKGGDFEKWRLYREQQGKCAYSVEPIDIDRLLEPGYVEVDHALPYSRSFDDSKNNKVLVHAKENRDKGNRTPCEYLGGEENSPRWQKFVAFVESTKAYRLAKRSRLLRKDFGSKEAEEFRERNLNDTRYICRFFKNYVERTLQLAEGSEAKRCVVVSGQLTSFLRARWGLIKIRGDNDRHHALDAAVVAACSHGMVKRLSDHARRKELEKVREGFVDVETGEIVNPAMFHQLRQHFPDPWPYFREELEARLKIDDPALLRTEMQRLDTYPAEALEELRPLFVSRAPQRRNGGAAHKDTIYGQPERLKAQGGVTQKVQIASLSLKDLDQLIDPHRNEKLYAAIRARLEEHGGKGDKAFPPGNPLRKPDRDGNPTGPIVRTVTMVIDKLSGIPVRGGIAKNDSMLRVDVFAKGGKFHLVPVYVHHSVAKALPDRAIVAFKDENEWTLIDDSFGFCFSLYPNDLVRIRQKGKEPIFGYYGSCHRGTGNLNIWAHDRSQNVGKDGMIEGIGVKTALAIEKFDVDVLGNIYPARLEPHRGLA

SEQ ID NO: 9647 - protein, 1000 aa, unidentified
  REGION 1..1000: note = Description of Unknown: Cas Enzyme sequence
MPHAKTVLGLDLGVTSVGWALLTTSFDEEGSIISREITDAGVRIFPATTEDKTNAPKNHKRRTSRGQRRLVMRKAQRRNDLRAMLADNGLLPAIESATSAESFQELGDPYELRVRALSEKLTPYEIGRSIYHLSKRRGFLSNRKSGDANEDGKVLGGIARIREELASGNFKTIGQLLSTKEKKRKHFTHRAMTEDEFESIWSTQSAFDPTLLTDDLKMRVKNTIFYQRPLRSQRGLIGKCSFETDKKRCDLARQEAQRFRYWQDLNNLQIQNRATLNWRILKDVEKELLVKELENIEVLKYEKLRKVLKLDDDVRINLEANDKKIKGNSTAYQFRKALKKTDKPWDDFTAEQQDRLIEELFRIDNELALKRRLSEHWQFDDEQIHKLEGVWHKLEDGYSRLSLKAIRKVLPLMMAGKRYDEAASEAYGDHRKTFGAGNSLKLQLPPKDLRNPIVFKALCEVRKVVNAIIRKHKLPDEIRLEMARDLKLTKIQKERSMKQQNENKRINVQAEEFFKQKFNLENVSSTDKLKYRLWKESGERCPYTGKNIPPESLLDDGLVDIEHIIPYSKCFDDSYMNKTICDAKFNREVKRNQAPGEIYDRESQQFFELMERVKMLPSPKVRKFEQSKEELAQTDWAGRQLSDTRYICKEVRGYLRQLYPYSPDESKYVQVVAGGATANLRHVWHINAILSDGDIEVKNRTDHRHHAVDAIVIALTDRWLYQYISKLAGRNRELMKRKLSGFELPWESFLSDVEDALNSIVISHAPTRRIRGQFVEETAYGPTVTPGVYVTKKELSSMTPKMVENIIDETIKELVKARLSAFDGDFKKAFGDETNPLLHSDGKTPIRKTRIYVKMSPDTLVPIRDTSGKEYKYYPLAGNHHVRIYENTLTEDRKAVLVPRFYAAQRSWKPADLGPEWRLLFTLCSNDYVEFLGDDGRLRVYRVQKMSGGQNWQVQLRPLEDTRAGYIPGITVVMTGSNALRKITRKLQVDPLGHLTQAND

SEQ ID NO: 9648 - protein, 1301 aa, unidentified
  REGION 1..1301: note = Description of Unknown: Cas Enzyme sequence
MAIGKTLGLDLGTNSIGWAIVEHSAGTKSLAEKGVVVFQEGVAREKGNEKPATQDRTLARAQRRGYFRRRMRKQLLLEELVKLNMCPLPLDAVVAWRKGGEYPLGHEAFLLWFHMNPYELRAKGLDGKLTLHELGRVLYHMAQRRGFRSNRNDGVGELEGLKEGSEDRGIKGLNDTAHLIAEHGTLGKAGVALAKQHQAIRRRYTMRTDYIDEFDAIWAAQAPHHAVLNEGVKRRSGDPKDGLLFFQRPLRSQKGNVGRCTLEPRKARAPISSLQAEVFNVLQIVNNMRVDGVPLNSEQRALVLSKFLLKSPNIKAGDLRKALNKAKLGGTLNYKDDVQFQTAHCIPILADLFDAEALEVFEAVCNKQTDAVSDDPELKQWEDRWAVIYNAEETDELSKLEAEGRDIGKKRDLLKYAKEVWGFNEEKLSALKKVRWKSGYHSLSRKAMGKIIPYLAQGVRYDEAVLFANLGAVVNGWNEMSDADQHALRRGIMDRMAAWDLERSRVDLLNSLVKRYRDELTPKGGAEDFWDEGWTASLDKAIQGMSTHQREQVDLTWKNGLVDEFIAATQANSRPEFFSKQALRDVLKEFLQDQFGPEGVHFDRMYHHSAIDRYPVAKDERLGSPRVPGLKNPMVERALHTLRHLMNELIATGKVDRNTRVNIELAREMDSANRRRAWELWQKDRFDKRQKAINRLREHYGKDEHWNPEESMIEKMWLFQEAEEIWGKPICVYTGETMSVEQAMGNSMDVEHTWPRAETVDNSKANKFLCYAWYNRNVKKEKLPATLPNFEEDRELNGKHAGAIKPRLAPIEALMEKYEKDMRRARWFAKQKTTKDAKDREIQKAEVARFHYHYWRTKFEHLNSAEIRSNFLNRQIVGTGMITRMAREYLGSYFRKDDKPRVYSYQGEATAAFRREWLGESMEKPKDRTSHAHHAKDAAVLAAIDRSEFDRLARHYRENDTKHTDKKLPEPWDGFCETVNTLDQDILVYRASHDRVTMKSRYYLGKVNGEQRWATGDAVRANLHKDTYYGRILRPVEGTEEFTEHTVVRRPLKDLKDTDLLKIVDPELREQVKRYGLARIAEQGYMPVQVKEGDKKVEHQIRRVRIFDTAPVAKNPIKVKMHRDRVEGREHKHHLYAAGGDVYGMGVYINAKGKRSYLNYSAMELIGAMHSMGVKKPAEVWPEVHPDKAGYQIERRNGHPVILISGTHVLMYKETPEEVDAQSTSDLYRRLYVVRNVEGDGRINLTHHMDSRPVEEMKKNKLSAWDPEAPVNWLRLSLGNFDALVEIADFKINDSGSVIMP

SEQ ID NO: 9649 - protein, 1026 aa, unidentified
  REGION 1..1026: note = Description of Unknown: Cas Enzyme sequence
MGMKYRLGIDLGTSSLGWAVVRLDASGNPCAIVKTGVRIFSDGRNPKDGSSLAVTRRLARQARRRRDRLLQRKNNMLDALINLGFFPTLEANRKALEAIDPYFLRAKGLDEALTPGEFARALFHINQRRGFKSNRKADSGDSDTGAMKSAISGLRSDIQDKGLRTVGELLNKRRIEGLPLRARYLSQTVQESSGRNKTEKWYTLYIDRQMIENEFEALWQAQAALNPVLFSQSSHDRLKNILLHQRPLKPVPTGRCSIFPDQQRAPRALPSAQQQRILQELNNLRFIDSQGASHALSIDQRNLIFEALNSVAKLTFEKMRTLLKHDASWTVNLADEKRDHLKGNETSAILGHKDRGFGPTWFSFDLEKQDQIVSRLVDEQDEAVLVNWLMDETGIDEELATTIANAKLPDGYGSLSAKAIALILPELKSKVITFAEVKHQLKLGEFATVTSKNEDGSKFKASSTTGEIVEKLTLLPYYGETLQAHVGFGTGDPEDTPEVRFGKIANPTVHVGLNQVRVVVNELIKRYGQPAEIIVELARDLKQTKKQRDDESAQQAKNQKNRERIRKEISAHLGISETAVRGRDIEKYILWEELGSSAADRQCPYSGQQISVAMVLSEATEIDHILPYSRTLDDSKANKVLVTSVANKIKTNRTPFEAKSDFERKGWDWDDIQARVASWKWEVRKAKQAKFREDSMETWLGRSDTFLARALNDTRYLSRIARIYLSDVATESCRVIPGRMTALLRAKLGLNDILSSDSLKNRSDHRHHAIDGVVVAITDQGMLQRFSEASSRAEEKHLNNLVDTIQAPWPNFYESVKASIDKIVVSHKPDHGYQGSMHNDTAYSMRPDGKVAHHKNVDGKRVNVFETLKVIPFSSTSNPNRHGTNPDGSPRAYKAYKGDSNYCIEIYADESGKWRSEVITTFQAYQIVREHGEERLRDRTLTASGKPLVMRLMRDDVVELQIDGVKTLCRLQSMVSDGRMAFSHLNEANVDARNRVGEYSFINKSAGSLQKARARLRTINPIGFKH

SEQ ID NO: 9650 - protein, 1153 aa, unidentified
  REGION 1..1153: note = Description of Unknown: Cas Enzyme sequence
MARILGLDLGTNSIGWAIVDDQENKILGMGSRIFPMGVDNLGDGTNEISKNARRTGARGIRRQFYRRRLRKKILLKILSEYDMCPLKKDDFDIWKQTRKFPSQKLVDWFSLNPYELRNKALNERISLQEIGRIYYHLIQRRGFLSNSRKGGKDDGAIFKGNAKEGKIGIDETRESIQDKTLGAYLFEIYPKENQPFVEGLERIRNRYTTRKMYVDEFEKIWEHQKQYHEELSDDLKTIIGGRKQDGYLEDGVLFHQRPLRSQKHLVGNCSFEPSKTKCPISAIPNEMRRIREWVNTVECNGKKILQEEREKMIAVLLSKEKPPFKNLKKAIGKVEANYKFNYKDEDKIVGTHTISNLSNKKFFGKQWFEFSEKEQEDIWHVLYFFDSKDKVKEYAIAHWGFDEKKASDISGFNLKDGYANLSRKAISNILPFLHMGYTYDLAAALGGVKNAFGKQWISIDENEKVYLIDTVESIVRSKTSGGFIESLKELLKEKYNLTEKQLNKLYHHSANINVAEVLEKLPVGKEADKEIQAIRNPIVITALFELRKLVNKLIAEHGKFDEIRVEMARDLKVSKTKRNEIRSEQQRLERENDRIKKELNYLGERITHDNILKYKLWEECKKTCPYTGVTIPVHKLFTGGVQIEHIHPWSRSLNDSFMNKTLCWADENRNKGDRTPFEFYGDDEANWTTIKERALKLFSDTKEYPKAYQKFKRFVQQKFDDDFTTRQLNDTRYISKEAKNYLKQVCEKVNVSPGQMTATLRHFWGLNSVLNEENEKTREDHRHHAIDALVMACGKTRYLQELSKWNRYDRQPLSSNFPLPWESFRYDVEQAVDGILVSHKKQNNIITVRTHKTEKNGKVYKNLGVAARGQLHADTVYGQNKNCQNEEYVYRVDLKRLSFSQLSSILDERLRRVIINQIKKYLKEDEKEFLDRMMAKEKNLDKTFQRTIKGKVDGVLKENPFFMPNEGRRYKKLNKIEPLDFERKPVPIKKVRVKKVLGKAERLNDDIKQYVDPQNNHHVLIYKDAEGNLKEDVVTFWTVVERKRKGFPVYQLPPDGSEIVTTMQINDMFLLGLDEEEINWEKPDTSLLKEHLYRIQKLSSKFYEFRLNTEASIQNNFQPYYIRIQSFGEGKTGWVTFKPIKVKVSVSGKIERL

SEQ ID NO: 9651 - protein, 1449 aa, unidentified
  REGION 1..1449: note = Description of Unknown: Cas Enzyme sequence
MSKNILGLDLGTNSIGWALVQQDLESKQGKILGMGSRIIPMSQDILGDFGKGNSVSQTAERTSYRGVRRLRERHLLRRERLHRVLHVLGFLPEHYAAEIDFEKRLGQFLDETEPKLAWKKNAEGKFEFIFQRSFDEMVDDFKANGQEIKIPYDWTIYYLRKKALTQKISPQELAWIILNFNQKRGYYQLRGEEEEENPNKKVEFYSLKIVDVVADEEPNKKGDLWYSLHLENGWIYRRSSKTPLDDWKDKTRDFIVTTDINDDGSEKLDKDGEVKRSFRAPKEDDWTLIKKKTEQEIEQSNQTVGSYIYEALLDNPTQKIKGKLVRTIERKFYKSELKKILEKQIELQPELFTEDLYNACVRELYRSNKAHQQQLFRRDFLHLFIDDIIFYQRPLRSQKTLISNCSLEYHKIKDKDGNEEIIYLKAIPKSNPYYQEFRVWQWLHNLKIYRNDGDVDVTEQFIKSTDDLEKLFEFLMSQKEVNHIDVLNYFIAPIVKVKFPNAKARALKEEIAKEIGKYRWNYVYDADKDESKVYPMNETGFEFRKRLVKVEKLPKNFLTRDIEQHLWHIVYSVTDKIEFEKALKTFAKKYDLHEESFVENFKRFKPFDSEYGSFSEKAIKKLLPLLRVGKYWSWDAIDNNTKNRIEKILSGEFDEEIRSRVREKSIHLTKEQDFKGLQLWLAQYIIYDRHSEANIAGKWNSVADLEKYLSEFKQHSLRNPIVEQVITETLRVVRDIWKQYGKGAKDYFDEIHVELGREMKNNADERKRLSSIISENENTNLRIKAILEELMNDTSVENVRPYSPMQQEALKIYEDGVLNSSIEIPEDIEKISKKSEPTKSEIQRYRLWLEQKYHSPYTGRPIPLSKLFTSAYEIEHIIPQSRYFDDSFSNKVICESEVNSLKDKQLGLEFIQNYYGQKVTTSTGEVTILTEDAYKAFVKEHYDKNTSKRNKLLMEEIPEKMIERQLNDTRYISKFVSQLLSNIVRSEKNDEGVNSKNIIPVNGKITGILKQDWGLNDVWNDLILPRFERMNQLTNSTDFTSWNEKHQKYLPTVPLELSKGFQKKRIDHRHHALDALIIACATRDHVNLLNNKHAKSKNERYDLQHKLRHTKPWKDKQGIERTKFTEFKKPWDSFTKDAKNELDRIVVSFKQNLRVINKATNYYEKIVNGKKVKVQQKGVNWAIRKPLHKETVSGLVDLPRIKEAKGKILTATRKSLDPSFNEKTISSITDTGIQKILLNYLKVKGSPALAFSPEGIEEMNQNIRLYNEGKFHHPIFKVRVFEQGSKFQLGETGNKTKKYVEAAKGTNLFFGVYWDEKKQKRSFETIPLNIVIERQKQGLSSVPEIDEKGNELLFYLSPNDLAYVPENEEVFDESTIDVRRIYKMVSSTGSECHFIKHDISTLIKNYDAKSKIGEMGSLNKLETTIDGIYRIKEVCIKLKVDRLGNISKA

SEQ ID NO: 9652 - protein, 1310 aa, unidentified
  REGION 1..1310: note = Description of Unknown: Cas Enzyme sequence
MREKFNEKLYNIGLDIGTNSVGFAVTDLNGKLVKVKGKNFWGVRLFEEGKTAALRRQYRSTRRRLQRRKLRIKILQEIFADEINNVDPDFYKKLNQSFRHYTERNYKYNIFNEVGFNDKSFYEKYPTIYHLRYDLVKSSSKYDIRLIYLALHNIMKYRGNFLFEGQNLDSNKIDLKDEIKKYLNQIEDSTNETLNYTDSDVESYISIITNNNLNKIDKLKAVVIKTNDKVINASLKEFSRAILGNKFNFNKLAMLDDTEEKIEINFSDEYDENEVLVKISGYEDYYNVVYNLYNAILLSKITYNSEYISESMIKRFEKHKKDLAILKRFIKNNLKDNYNYIFRDIISESNYPNYINLPSKHNYEQFYKFILKVITSSNKNFDSDKDYKYIKDEIEKENFLRIIRIKDNSAIPYQLHLKEMKQIIDNQSKYYPFLKEHEDKIVKTMQFKIPYYIGPLSTKSEFGWLEKKTDDRILPWNFESVVDVEKSAEKFIKRMTNKCTYLINEDVLPKHSLLIQKYELYNELNKVRVNGKLITPSLKEKIVEQLFKNQKSVSLKALEKFLNLENNYIVVSITGTQKKDKFASSLSSYIDFTRIFGEINQSNIGMIEEIIYWITIFTDKKILKAKIKYSYPNISDNQLDQIMKLNYAGWSRLSKKLISGITTKLANGERKTILDILEETNLNFMQIISDDKYDFAKKIAKANEKNFLDKLTIEDVNEFVNSPSLRKGVWQAIKIVEEIISIMKSTPVNIYLEVTRREDKKVRTESRVDKLLKIYDVMKSDNEIYYLSSIHDELKNIKKKNEKLDNERLFLYFTQNGKCMYSGKSLSLDKLHTYEVDHIIPRFLKPDDSIDNKVLVIKGENQRKGESLILEDHIRKNNEKYWRYLNEKGLISDSKLYNLQRAEFSEKDIAGFVNRQLVETSQIIKNVALILSEYYKNDQVDVRLVRSQTLSFLRKDLKLYKIRNLNNYHHAHDAYLASVLGEFTRKYIRDNVYGKFVKEMKSNKYRESLGWVVGRFKQLIYDEDGQVLWNGEEKISTIKKTLNYKDCFITRKSEEQRGEFYNQTIVPKSSSKKIVPVKADRDPKLYGGYNNVNEAYVLLLEIKDLNDNTSYIPVSINRLEDQILRSDNNKLDEILSGKVDLRGKSYKVIRKIKKYQLAIVDGHLVYITSLNELNNAKQLYLSWSDIELLHKIEYNLLENNSENEEKLVELLKTLIEKMNNEYPFFRNIANKLLESIPMFKELDLNKKCSFILEVIKIMSPGAENADFRSFGINGLSDRVGRLRKSFKVNNTIFVDQSITGVYERKTKYGV

SEQ ID NO: 9653 - protein, 1448 aa, unidentified
  REGION 1..1448: note = Description of Unknown: Cas Enzyme sequence
MKKHILGLDLGTNSIGWALIQQNFENREGKILGMGSRIIPMNQKILGDFGAGNSISQTAERTGYRGVRRLRERHLLRRERLHRILHILGYLPEHYDTQIDFIKRFGKFIPEAEPKLAYSKDGFLFQNSFYEMLEEFKNSQPDFLKDKNGNDCLIPYDWTIYYLRKKALTQKIEKEKLAWIILNFNQKRGYYQLRGEEEEENPNKLVEFHSLKVVDVVADETKNNKGEIWYSMHLENGWIYRRSSKTELFDWKDKVKEFIVTTDLNDDGTEKLDKEGNVRRSFRAPSPDDWTLLKKKTEKDINDSHKTVGTYIFDNLLLNPKQKIKGKLVRTIERKFYKDELKQILTKQKEFHSELQDENLLMDCVRELYRNNEQHQQMLSAKDFVHLILEDILFYQRPLRSQKSSVSNCSLENRKSKDGIIFPIKVISKSNPYYQEFRLLQWLQNLVIYRKEDDANVTKELLPNQNDWEELLEFLNTKKEIDQKQLVEFLLKRKLDIKKVPKTETERYRWNYVEDKTYPCNETRYLIQSRLDKTENVPADFLNFENEMALWHIIYSVNDKTEYEKALRKFAEKHNLNVESFFENFRKFPPFKSDYGSFSEKAIKKLLPLMRFGKSWNWENIQQGSKDRIEKIITGEYDENIKNKVREFAEKHRLVTENDFQGLPLWLAQYIVYGRHSEAAILGKWNSVKDLEEYLNEFKQHSLRNPIVEQVITETLRVVKDIWTKYGNGAKDYLSEIHIELGREMKNTADERKRLTNLVTENENTNLRIKALLAELALDRDVENVRPYSPMQQEILKIYEDGALSSEVEIEEDILKISKIAQPSKSELIRYKLWLEQRYRSPYTGQIIPLNKLFTHEYEIEHIIPQSRYFDDGFNNKVICEAEVNKLKDKQLGFEFIKNHHGYKVSDRISILEVADYEGFVKQNYAKNRAKRNKLLMEDIPEKMIERQLNDTRYISKYISNLLSNIVRDDKEGSNDDGFNSKNILPGNGKITTRLKQDWGLNDVWNDLILPRFERMNQLTNSNDFTAWNEKHQKFLPTVPIELSKGFSKKRIDHRHHALDALVIACATRDHINLLNNESALPKKGKSKHEQKKFRYDLQRKLRLQETYLDKDGKERTTFKAFIKPWNNFTMEAKNTLEKIVVSFKQNNRVINKATNYYEKFVEKNDEKVKGIVKQEGTNWAIRKPLHKETVSGKVQLDRIKIAKGKILTATRKSLDSSFNEKTIGSITDTGIQKILLNYLKAKGGKPELAFSPEGIEEMNQNIALYNDGKQHQPILKVRVFEQGSKFALGETGNKKDKYVEAAKGTNLFFGVYVDKEGKRSYDTIPLNIVIERQKQGLNSVPETNEKGHHLLFSLSPNDLVYVPEEGEIFDKVRFDCKRIYKMVSSTGGECHFVHNSISSLIKNYDAKTKIGELGSLNKLEVTIDGLYRIKEVCIKLKVDRLGNISKA

SEQ ID NO: 9654 - protein, 1705 aa, unidentified
  REGION 1..1705: note = Description of Unknown: Cas Enzyme sequence
QTLLKNTYISGSLNKTTEMKKHILGLDLGTNSIGWALVEIDHNNKTVRILGLGSRILGMDAAEIAKFESGAKIESAASQRTTKRSPRKLNERYILRRDRLHCVLNLLNSLPTHYKLSIEFENSKGKRSGKFKKGVEEKLAYCKDENGKSVFLFDDAYKLMESEFKTRHPELFYTKKGKQTQIPFDWTLYYLRHKAVTNPEFELTKEQLAWITLSYNQKRGYEKVIGQDEKVQKEGEISDTFVGKVKSVVQVESQGIFEVTLIDNNDESIELFKYKEESLFPITETGDLKEVERIAKYNEAGEVDDKKTEYIINEIRELLITDVKNTGQKRKENFVFEIVLETGWIKEQQSRFTPKWKDTKRDFIIKTKYDENGNRILKGADKGRNIGIPSEDDWTLMKLKTETSLVNFNAKNNTVGIASFVYYNLLQNPKQKIKGDLITVIERDFYREEIEQIYKNQEKFHPELKNRELYEQAIKLLYPNNISHQNTIKELDFNDLIREDILFYQRDLKSKKSLIADCAYESRKYFDKDTNILTTVPVKVIHKSNPFYQEFRLWQFVKRLKVIKLQDSQDGENNFNVDVSHQLLTNEVKEKLFEYLNDKDSVTEKNVLDFLSKQFDDKSIKQDSYKWNFTSEKELCNTTRYEFILRTKRIKGFDYKTFLNFENEYKLWHFFYSVKRKDEFQKGLNSLFTQLLEKSGLSLGFLPDLIKNFSSFGGYSNDYGTYSEKAIKKLLPFLRIGKYWNEESMEKILSQRPEEIKEKADEIVYEKVLDKEGINGELKDFQGLWISSACYLVYGRYSEVGDVQYWKSPYDIENFLRNEFRQHSLNNPVVEKVLVETLHIVKDIWKYFGEQLGEDEKGNIIYKKLFDKIHIEMGREMKKNNKQKAKDDTRNKENRKANERIIELLKEIKKENSALEIKSPFQQEKLRILEEGLLSSIEYDKDTTEYKLENSTISKKQIKEITSKEFSKISKSDFERYKLWLDQRYQSPYTGRFIKLSDLFDRKKYEIEHIFPQERITLNALANKVICETEVNKEKKANTGYGFIANAREKEIFCSAHNEKVRVLSISDYEDLVKTNFTGKKQEILLSKDIPEDFTNSQEKNMQYIAKMAMKFLSNIVREEGEDAYRSKNVLPTNGMITSTLKRHWKLNDTWNEIIEPRFQRLNNLTDSNLFGYYREINGHSVFVNTVPEGTSANFDPKRIDHRHHALDALIVALTTEEHVQYLNNISSQDKDDDKKLETRKGLKYLLTNSRRGFNDEKEWYFLPPAQTKSSNGIVEFEYQFKDSKGKIFKDIAKIALEDTLASFRQKNRVIRQRWNKYQTYEDGKLIQRSEDNLKLKSKFNIRKPLHLDTFYGKIKLQNNPHNNKNVVEIDIRKALEERYDIYDTVIRQKVQDLKSQGLTQQEIIENLLKDHKKIKVYEKFVASRFGNELTSLVDVASDKISKTIESITDTGIQKILKNHLKNFENKFDEEGKLVAPQTLAFSPEGIKELNDNIVALNNGKPHQPIFKVRMADAMGTKFLVSEDGTKSSKYVVTASGSNAFCGVYQKGNDRKYYVPTLRESVANLKESFEPCPESHPEDSDYKLIFVLNPSDLVYVPTEEEIENPEAVDWNNLSVEQLIRIYKFRDGSINNKGGVQYNFMPSNWATMIFKGNKDIEKISLTGGGELKGEITLTTDKDKSQNSLDAIQIRSVCWKLQVDRLGNISK

SEQ ID NO: 9655 - protein, 1450 aa, unidentified
  REGION 1..1450: note = Description of Unknown: Cas Enzyme sequence
MKTNNILGLDLGVTSIGFAHVTESEDINNSEIKQIGVRINSLTVDEQTNFEKGRSFSINADRTLKRGARRNLDRYQDRRKNLIEVLTNSGLINSETKLTENGKSTTHETWFLRSKAVTERIEKEELARIFLAINKKRGYKSSRKAKNEDEGQAIDGMAIAKRLYEENLTPGQLAYELLKEGKKSIPDFYRSDLQAEFDKVWDFQKQFYPEILTDEFYKELQGKGQRATSAMFYTKYGFNTAENKGTREEKKIQAYKWRSDAVSQQLEKEEVAYVLTEINNNLNNSSGYLGAISDRSKELYFNKQTVGQYLYQQLQENPHTRLKNQVFYRQDYLDEFETIWNTQSKFHSELTNELKEEIRDIIIFYQRKLKSQKGLISFCELESKEVVIDGKKKTIGFRVAPKSSPLFQEFKIWQVLHNLKFVNKQTGEIQEFKNDDYNEVKQTLFGELNLKGNLSANEVLIFLDYNSKEWSLTNFKLVEGNRTNLALYDAYFKILEIDGFGEIDWEGYKSVKEESAKTIFNYFNFTRKAEEFITGKIKSFNKYTSSEIKEIVKNIFRYLNINTEILEFNAELDGKSFEVQKSYQLWHLLYSYEGDDSHSGNEKLYELLEKKFGFKREHAQILANVSLVDDYGNLSTKAMRKIYPFVKENNFSTACEYAGYRHSKHSLTKEELGNRVLEDKLELLKKNSLRQPVVEKILNQMINVVNALIEKNSIKDENGNITEYFKFDEIRIELARELKKNAKERAEMTTNINNAKNENEKIRAIIKRDFPNVPNPTKNDIVRYKLYQELTINGYKDLYTNTKVDYFKLYSKEYDIDHIIPQSRLFDDSFSNKVLVPRQANLDKSNKTAFDYMSNKNEQDFQNYTSVIEILYKEKKISKAKYQKLLKQESEIGDGFIDRDLRESQYIAKKAKELLFKITKSVVSTSGSITDRLREDWDLVNVMKELNLPKYRALGLTEMQERKFGQKVEIIKDWTKRNDHRHHAMDALTVAFTKHNHIQYLNYLNARKNENHKLHGNIIAIENLETEIKIDDEGNRKRVFKEPIPNFRQVAKEHLENVLISHKAKNKVVTKNKNKTKSKNGENVKTELTPRGQLHKETVYGKYCFYQSKEEKVSAKFDLETIEKVSNSKYREALIQRLAENGNDPKKAFAGKNALSKTPIYLDEEKTETLPEIVKLTWLEEDYSIRKDVTPENFKDEKSIDKILDEGVKRILKSRLKEFGNDPKKAFSDLDKNPLWLNKEKGISIKRVTISGVKNAEPLHYKKDHFGSDILDDKGNKIPVDFISTGNNHHVAVYRSPVIDKKGEVVLDENGEPKYELQENVVSFFEAVERVNQGLPIIDKTYNQHLGWKFLFTMKQNEIFVFPNEQTGFNPNEIDLLAPENKKLISPNLFRVQKLATKNYMFRYHLETNVEDKKELVGKAFINIRSTNPLRDIIKVRINHLGDIVSVGEY

SEQ ID NO: 9656 - protein, 160 aa, unidentified
  REGION 1..160: note = Description of Unknown: Cas Enzyme sequence
MTKIISPIAIDMGGKYTGIYMPHYLRGTLPEPENSVMATIVASEDGDKITWSQINRTQTRHRIRSNKRRKLAKRMLMVVLQHALNRELTANEWNALSGLLNRRGYNRLEVEIDLSCLENTNEEFFAAILPEFFTDQASLIEQWVELTDNIPQLRELQEAV

SEQ ID NO: 9657 - protein, 1220 aa, unidentified
  REGION 1..1220: note = Description of Unknown: Cas Enzyme sequence
MQEAVEKALDAIDYGHQHRLKYLESIKKELLKDARLKEIRDLLGADELYRLIGNISNFQLRNLRWYFNNESMKQGDSFKAESLKVTIVRWLQYWHPKTAEEKNNRALALKSFQENEVLYALKYTDPSLTIPPYEDQNNRRPPKDQTLWLNPKAISIAYGERWKIWSQKLERLHPEWGEGIDENLKRVDRKSRLSSKNELPITDYHATVFLQRILDRSSVLDPYALRLISKNRESNKAQEYIEKLKRDLGGQHIDEFLAFAKKYYQEVADAKNGIWFEKPENILERADINPPSKEKIKHLLIGNVLSCEFSEETFNEFLTEVWNAKVIGNSRLKNLCKAVEEQRKKQGNAFKHLLSRISYRIQQDPSQEKKLKGDEKEIWQASQKAERAAEFIKQKLQHKDVQYARYNNSFSMAQLYTLLETDRHGFSKTSLAAHFENNWRMQDVTTLEGKESARCSRLPADSVRPFDGILRRTLERQAYEIASLKLQQIKAQGSDITQVFIPLIAEENRFEFSLGLASIKKNRAKEKELLKRLETQRDIWSDKLDRIKQAVSTVCPYTGRNISQYGEIDHIVPRSASRDKSRTIFNSEANLIWSSRQGNQQKLDQRYGLHDLHDNYLQQAFGTTNKNQIKIHIETVVSQLPERFIFIELSEEQQIAVRHALFLEADSPIYQKVFKSLATQQSTRVNGTQAWLLKRLIELLKSNLNQQGVSVDFVVARTQAEATSKIRTQLAELDNRFEKQQPQPIASHSLDALCAFASAASDALVEELALGGSNTNQGDSLEEDIELLNQLVAEEVSILRIERKPRYEKDEIQSQPIFKDGIYAEHFLPIWLKEGGVFIGFDGYNKDQLIQLISKEPVQFLETINPVLVAPKNAIEELLKTVQPTKLEVDKNKAFTLFDKVAKQACSEEELELVQVLETLRYTTSNKNCADYIYDSGKKAFKTSKEILKPKSFDINVSYSAKKLGKLKGKLQLPAFNDWYALINNPAIKDKLGTKTPALNWQGFLEDYFNSGSKRSHNKTRRVYSLPIIDAPSGGYRVKRKTPQHETVWQLMAIDGTSSKGFLVHDHKILWNQTAPIEALNKGNLTEVGGRYYSDFDEYVSFSHWLDINIEHEDIKRVRMAPGTKDRRYIEITQSIKSFNRWLKHSGEEEFSNSWTIHSELKIKNPKAFLDAHGLSVLGSPRSNLFFSKIGENVSYSYIVESSNAAMRKAYQVAYENQIS

SEQ ID NO: 9658 - protein, 1387 aa, unidentified
  REGION 1..1387: note = Description of Unknown: Cas Enzyme sequence
MSKNLGIDLGTNSIGLTLREDDIFSWYGVYTFRKGVGEGKSGEFSFAAERTKHRSSRRLYNSRRYRKWETLKVLIEYGFCPLQEDHLKNWKNYRKGIGRVFPIKDNAFDRWIKLDFDGDGKPDFVSPYQLRRLLISERLDLSVEENRYKIGRALYHIAQRRGFKSSRKSGANEKTAVYKGSNETKTIGRNEYENLITENGSLGAAFAHLEDKNIRIRNRYTLRSDYQNEVHKILEFQNVPDTDFTEKVQKAIFFQRPLRSQKGLVGKCTLEPNKSRCPISHPKFEEYRAWSFINNIKYRTEDNNQFQPLPLELKEKLYNEVFFYKSKKELKFSDLRKIIKDNGGKDWELNYSHRMDEISVPSCYLSSRLKAAFGGDWTNFEKIVIRKNNKGEDETVKYTIEEIWHILFSFEDEEYFTEFLETVLELEEEQIKELLILFNNFPVGYANLSLKAINNILPFLREGLIYSEAVILAKLPELLGKDTFEASKTDIIRALENEIAENRYQKTVVNITNNLIFKYYALDYDEKFGWKDTAYKLEDSDYKEIEIASIEHYGEKTWTQLEDDHKNRLLNDVAVQYQTFFASSKREHIKQPHLVNQIKEFLDNHFNVPQKLLDKIYHPSQIDIYPSKEGQISLESPKTAAFKNPMAYKTLYKLRDVINYLIEIGKIDNETRIVVEIARDLNDANKRWAIEKYQRDREVENRAFASAIEELLKESNFSGYANSKSDTDIDKFRIWTEQLENFDEVKTEINSIENNKKISASDKDIMKYRLWKEQNCVCMYTGKMIKLTDLFDKNKVDFEHTIPRSKSFDNSLANLTVCYADYNRNIKKNKLPTELPNYEQATNEYSAIKPRLQAWEKKVESLLKQIETQKRNSKVALDKEAKDKAIRLRHVLQMEYDYWKNKVDRFTRTEIPKGFVNSQLTDTQIITKYAFHYLKTVFNKVDVIKGTQTAEFRKIYGIQPKGEAKDRGKHSHHAIDAAVLTLIPSARKREEILKKSYEFAENNNNKQYHEKPFAEFSYSMIEEIEKNILINNIADKDQTLTPGRKIVRKRGRIVWLRDKDGKLLLDENGNKIPKIAQGDSVRGELHQQTYYGKIKIAIKDDQGSLKRDENGNVVYNQIAGKDEVWMVIRVSVTDSKFNVDNIVDEALRNHIKEQLKTKKVTELTDFQGNPIRRVRSRVKSGRGYMNPDNVTVVKEQVYKSQKDYKNYIYTDSGENFIFGLYENEKGDKDIISINKFEAANYLKIGIPNSKTELFKQKEPIIIKKKEARLVHIFEVGQKVIFYNSFNELNDIQNEPQEISKRLYFIKRLHQASVGNMLFQHHLEAREDEELTKAFPKEIFKSAGKDGFSKYQTDFIVPRILFKPTNPNFIIEGKDFEMKLDGSIEFKF

SEQ ID NO: 9659 - protein, 1127 aa, unidentified
  REGION 1..1127: note = Description of Unknown: Cas Enzyme sequence
MKKNILGLDLGTNSIGWALIEVDHQNKNVKIIGLGSRILPMDAGEIGDFERSGKIKSTAAQRTEKRGPRRLNERYLLRRDRLHLVLDLLDALPKHYKLQIDFSNAKGEKSGKFKKNKEPKLAYLPKQIGKKAEFIFKESYQEMLDELGIENKKKSRIPYDWTLYFLRQKALSEKISLEELAWVLLSYNQKRGYEKTEVEDKSTKEGEIIEELDLRVKEVIPKTDKAGKQFYEVHLDGNDNFIYQEYSDIQMTFKNDLKELVKTSKVDEEGNTDYKKTEFTVVDIYPLEIQDVHYEKEDGKHKYILTYQNGWQETKQPKDFTFRYKNALNKSYDYIVETVYDYQGNLKTQQGKERKLREPDLSDKSNDWTLLKKKTEKEALSFNVEKGYLNSDGSAKSYISPRIYDVLKNDAKTGSRTKIIGGMFQVVDRDFYREELKQIISTQRAFHTSLRNKKIFEQCVKMLYPKNKNHQDALLKNKDAIQHLLVEDILMYQRPLKSKKSEIANCKYEVQYWKIVEDKDGKPIQEVDIETGELKDKKEPVYIKVVSASHPYFQEFRIWDKLHNLRLIQLEKEIDGKKLTNQDVTKEYFKSEKEYQDLFDELNNRKSLNQAQFLAYCKKKFKIDYKPKESNYAWNFPEDEEIKGNETRVSFAARFKRCGFANYSEFLTQQKERELWHYLYSVNYKERTANNNKSLTTFFNNYFKGFEIADEIKEKIIVDFANYPKFPSRYSAYSEKALKKLLPLIRLGKLEYEDVWAKESWYQKWRDGLVERQEEILKRIKNIDYDTDKVDYEKVVNTNVDYQKGELPFPKGLFNVFRDFQSTDDFQQLNLTQASYLVYGRHSELAQAKYWTSPEDIRNQLHQELKQHSLNNPVAEKVILEMMQVVADIWDYYGQGAPNFFSKIHLEVGRELKKSAKEKEAETKRMSGNKAQNKRLRQILEEYLSHSPFKANPRNPDHFERLKIAEEGAEHTKNNDRKFFDENEELKGAKISKKDIDDILKKPHITKEDFEKYKLWIEQGYRSPYSGQIIKLTELFDGSKYNVDHIFPQASITNNSLSNKVVVEVNLNKLKDDRTAREFIQAQQGKSYLGIPVCTDDEYVNIVKTQFSGTKRLILLSKEIPKGFISS

SEQ ID NO: 9660 - protein, 1131 aa, unidentified
  REGION 1..1131: note = Description of Unknown: Cas Enzyme sequence
MKKILGLDLGTNSIGWALIEEAENKNEKSRIIKLGVRVNPLTVDEKTDFEKGRPLSTNAERTLKRGARRNLQRYKLRREQLIKELIENDFINHNTPLTEVGSKTTHQTLLLRAKAATERIELEDLAKVLLTINKKRGYKSSRKTNNDEEGSAIDGMSIAKELYDRNITAGQYVLEQLEKGKKYIPDFYRSDLKEEFDKIWNSQKLYYKEILTDELYSELQGKSSKQTWAICKEPFDIVGITLNGKAVEQRLKKYQLRVQALSEKISLEHLAIVLQEINKEQDSSSGYLGKISDRSKELYFDKKTVGQYLYQQIESNPHTSLKNQVFYRQDYLDEFEKIWSVQSNFHKELTPPLKEKIRDIIIFYQRKLKSQKGLLDFCQFESWEQEYTDKVTGKTKKRIVGRRVISKSSPLFQEAKIWQNLNNLVFTNEETNEQIIINELDDNIINEIFEELNIRGTQKPNDILKLLKKYMKITKLSDWKCNFENIEGNTTNQALYKAYYNIAESEGYGHEWPKKSAREIKDELKAIFSEIGINPQILDFDATLPDPMFEKQASFQLWHLIYSAEEDFKVSEEDRIIYGNSDVSLKKNLESKFGFKPEHTKLIASTPLIQDYGNLSSKAIRNIIPELQKGYEYSDACKNVGYNHSKSFTKEELDKRVLKDKLEILKKNSLRNPVVEKILNQTVNLVNQIIDEFGKPDEVRLELARELKKSAKERSDMTRNIAEGTRRNDDFRKIIIKEFGIPNPTKNDIIRYRLYDELSANGYKSLFSNRKIKREDIFSKKIDIEHIIPKALVFDDSFSNKTLAYREVNLEKDKSTAFDYISNYKNTELDDYIARVESLSKAGKISRAKRRKLLMTAEDIPSDFIERDLRNSQYIAKKAKEMLFEVFSTVVSTSGSITAKLREDWDLINVMKELNFPKYEALGLIKTEKRFNKGTEKYVEREVIQDWTKRNDQRHHAMDALTVAFTKHSHIQYINNLNARYNTNHKMHAQILNIQKSITDMVSSRNSSQKRRFTPPMENFRTEAKKHIESILISYKNKNKVVTKNINIYKTKEGLQRKVQLTPRGQLHKETIYGKIKRPEEKATKINARLDLDKAKMIANPTQRELILNHLKKFNNNSKKAFSGKELKNNP

SEQ ID NO: 9661 - protein, 950 aa, unidentified
  REGION 1..950: note = Description of Unknown: Cas Enzyme sequence
LKKILGLDIGITSVGWGVIDENNNIIKTGVRLFDEALAANNVDRRTFRGGRRLIRRRNQRILDMKELLVRNNIVDDDFTPTKNPYKLRLKGLSKKLDNDELATILLHLAKRRGSSLEVVEEDSTSNGELSTKAILSKNEALLKENNYVVNVQLDRFKENQQIRGTNNVFKTEDYLNELKEILKHQNLGEELNKQIISIISRRRHFSEGPGSINSPTKYGRFREVEGETLQEIKKYLNREYQNKYLKEKFNFKFENKEYVAFKDGRITNAKPYDLIALMRGYCSIYPEEVRAPKMAFSAELFNLLNDLNNLKISNRISEKITNEEKEAIISQVRKTGNLTVNNVLKYLNADILEVSGFRLDKNEKPQISEFKGYKKLLKIFKKLDLEMLEDKKLDQVMEVLTETVIEEERFEKINKIVGNKILAQELSILTGVNEYHSLSLKAIYELNEEMLNTSLNQMEIITKSGLRKPKQIKKLSLDETAILSPVAKRAHREALKVVEELINEYGNFDRIIIETTRDKNSADQRRRIREIQKYFENSRKEAEEVLGDYAQNYINQANILKIRLYKEQDGKCAYTGKPIDLLTLIKDPYAYEIDHIIPLSISLDDSYNNKVLVYPSANQAKGNNTPFKYFQSGYKIKDNPISSWEQFETIVNNNKNYSRLKKQNLLFLKDITKYSTIQEFVNRNFVDTSYATRSLMTTLKNYFQSNEVDTKVFTIKGKQTNLFRKIGRSIWNYKYPNNDFNPFVKDRDKYIHHAIDALIIAGLSNQRHLRKLYELDFDENEEYYISRKTGEVFDGLNNDEITKYLLKVSKIKDEDVNYSWKIDTKPNRSLSDQTIYSTRIKDKEHHVVKKLDNIYELDDKKLKTYFEGKNREKLLVYQHDKKTFEKMEKAYLQYSHEKYPFQAFYEDHGYLTKYAKKNNGPIIKSLKYLDKRLGNHLDITPGSAKDKKVV

SEQ ID NO: 9662 - protein, 1060 aa, unidentified
  REGION 1..1060: note = Description of Unknown: Cas Enzyme sequence
ETVGENLYRQIIEDKHTSLRNQVFYRQDYLDEFEKVWERQAKYYPKLTAKLKSEIRDVVIFYQRKLKSQKHLISNCQFEKQHKAAPKSSLLFQEFKIWQNLNNIEFKNSKTKEIKILSDDLRISLFEELNLRGNLTEKAILIFCDLSSSWKSNFSKGLEGNNTNKVLYNIYQHIATEEGYGFNWEKKTAKEIKEELKSILPLINIDANILNFETSIEGEFFDKQTSYQLWHLLYSAEDDTKISEEDRLLYGNTNVALKKKLYGKYGFKPVYAGMIANASLQDDYGSLSAKAIRKIIPFLQDGTEYSKACTLAGYNHANSLTKEQLEKRILKPRLEILEKNSLRNPVVEKILNQMVNVINQIIDEYGKPDEIRIELARDLKKSSKEREETTKFINSATKVNDDIKALILKEFGFTATKNDVVRYKLWLELKNNGYKSLFTNKFIPKEKIFSKDIDIEHIIPKAILFDDSFSNKTLAYRSVNLKKADRTAIDFIEQDFSNEEVNNYKLRVESLFKSGEIKKGKYKKLLMGLTNLPTDFIARDLVNTQYISKKAKSMLFEVFDNVISTSGRITDKLRKDWDLINVMKELNLPKYKLLGLTETQIRKNNIKIEIIKDWTKRNDHRHHAMDALTVAFTTYNHINYINNLNASRIKESELYGVRNTITKVYENATGNKKRKFIPPIEAFRIQAKKHIGSILISFKNKNKVVTKNINKSKLKGKEQFNIKTQLTPRGQLHKETVYGTSKRKMKTQIKLNKKFDLEKLKLIIEPNVKKLLIGRLNVYSNKPEIAFDAKTIKKDPIIYKNLPLTKVFCFEEIYTIRKIISPDNFKTEKDLNKVIDKKIREILKYRLSEYDGKSKEAFSDLDKNPIWLNKERGISIKRVTITGVANAEPLHYKKDHFGNEILDEKGNKQAIDFVSTGSNHHVAIYKDEKGKLQEKVVSFYEAVARVNEKLPIVDKEYKTSLGWEFIFTMKQNEMFVFPNDDFNPSEIDLLNEKNATLISANLFRVQKLGSKDYNFRHHLETTVTNNIKFTFKRINNCNALGELIKVRINHLGLIVQKGEY

SEQ ID NO: 9663 - protein, 1079 aa, unidentified
  REGION 1..1079: note = Description of Unknown: Cas Enzyme sequence
MSQITQKQTTSKMPSYTLGLDIGNASVGAALLGEDKILGLHVRTFDRAETAKDGVSLNLIRRESRLTRRRIRRRSHRLAMFRRFFHRLGAIDSPTFEDFISSESPWQLRALGLDQVLESKQWVSALYHILKHRGFQSNRKSEVKSDEKAGQMLTGVTRNREMLTESGLRTIGELIATHPDFTQAKRNKGGDYSHTVSRDDLVIELGLLFKCQREFGNIYATDVVETKINELILNRQPTLSGERLLNMLGNCTFEPQEHRAPKASFSAEQFVWFTKLNNLRIIGDGESIGLTDEQRNLLIKMPFIQAKLTYKQVRKALNLGEEHKFNGLNYQTGDVAKDPEVGSLFEAKAYHAIRKAYSGAGLDLEWDKDKGNEQTLNNIAYALSVFKDDAESRPWLLDRGISEPIIEAILDLSFSEFIRLSTKALSNILPHMRDGQRYDEAVISAGYQHHSHFDSDEKSKYLPQFDDDFTTNPVVARALNQARKLVNAVVKKYGSPTSVHIELARDLSRSLRDRQTITKDQDAYQQTKAKDVTAFEELFGFTPKGVDLAKWRLYREQNGQCAYTQNPLAPYGDITQLFSPGQVEIDHALPYSRSFNNSMNNKVLVLTVENRNKANRTPFEYLNGEEESTSWRNFEAWVKSNKSYRIGKKNNLLRKNFGSEAAQGFRDRHLNDTRYICKAFKSFIEQHLLLSGDVKQQHCVVVSGQLTAYLRARWGLLKVREDGDLHHALDAAVVAACSRSMVKRLSDYSRKGELEHTRSQLPDPETGEIVDIAALRKLEQQFPMPWPVFRDELKAKLSDNPHMPISEKLWLAHLLEDKVQPVRVSRAPTRRGLGAAHQETIRSARQIDQQLSHVKTPLTKIRLKDLPNIVGYEDPRNHAMIDAIKKRLVEHNDRSDKAFASPLYKPGKNDGQGPLICSVKLLSTQKSGIAIRQGIANNGDMVRTDVFTDGKKYFLVPIYVADAAKKDLPNKAVSRDKPECDWTVMDETYQFLFSLHKNDWISVQGKPKTKPFTGYYAGMDRSTGAISLWSHDRNQAEGKQGLYRGIGVKSAESFTKYHVDILGGLHKVQEETRQPLGQH

SEQ ID NO: 9664 - protein, 1114 aa, unidentified
  REGION 1..1114: note = Description of Unknown: Cas Enzyme sequence
DDIIFYQRPLKSKKSLISDCPYEERKYLNNETGEIKTVPVKCISKSHPLFQEFRLWQFISNIRIYQKERWINEKMHTDVDVTSEFLKNEDDLTDLFDWLNNRKEIEQKAFLKYPGFGLKKEADNYRWNYVDDKPYPCNETRSLILNRLEKVENVPANFLSKENEEALWHILYSVEDKHEIEKALKSFAIKHNLDDGFVDIFKKFPPFKKDYGSYSAKAIKKMLPLMRTGRYWNEDSIDTNTKLRIDKILTGEYDEKIRTRVRDKAINLNDISNFKALPVWLVCYIVYDRHSEAKEIAKWEKPEDLDAYLKSFKQHSLRNPIVEQVITEALRTVRDIWKKHDDFSEIHVELGREMKNPADKRKRMTEQINENENANLRMKSLLMEFLNPEFEIENVRPYSPSQQEILRIYEDDVLKSGIEIPEDVEDILKKFKETDTKKQPTRSEVLRYKLWLEQKYRSPYTNEIIPLSKLFTTDYQIEHVIPQSRYFDDSSSNKVICESEVNQLKDNCLGYEFIKNHHGQKVELNFGKTVEILSVDAYEKLVKDNYSRNRGKMRKLLMEEIPDGFIERQLNDSRYISKVVKSLLSNIVREEGEEEATSKNLISCTGGITDQLKRDWGLNDVWNTIVYPRFERLNELTKSNQFGQWENKNGNRVFQTQMPLELQKGFNKKRIDHRHHAMDALVIACATRSHVNYLNNEAAKASAKESRYDLRRKLRRIETVQIEKSIDGKKVLKNIEVAREFYKPWVTFTQDAQTALENIVVSFKQNLRVINKTTNSYQHFDENGKKIVEKQKSGESWAIRKPMHKETVFGNVNLKKTKTVNLSSALEHPELIVDRRLKSKIKQLLFDGLDNKKIQKYFKDKTEEWSEINFSKIELYYFTNDTTEKFVATRKSLDDSFTSKKIEESITDTGIQKILLKHLENNSNNPELAFSPDGIDEMNRNIKELNDGNKHQPIYKVRVYETLGNKFNVGTTGNKSSKFVEAAKGTNLFFAIYVNEEGKRSYETIPLNIIIERQKQGLISVPEANEKGEKLLFWLSPNDLVYLPTPDEIDSNSLLWEIKKDRIYKMVSCTGYIGDFIPAFVANAIVQTVELGSNNKAQRAWTNEMIKEICVPLK

SEQ ID NO: 9665 - protein, 962 aa, unidentified
  REGION 1..962: note = Description of Unknown: Cas Enzyme sequence
MKLSVYCGLRAIAYIITQGSNVVKHGIKRVNIPYENYYEFIAGLPVSKRINRRLKRQARRNLWRYKSRRERLKKLLIKEFQCSPKNRTRTDNLLIRVKALSEIVTAQELVDIISQLQKKRGYKSLRGVSDNENSEYLQEIERHQENLKQYRSIADYLLTIDSSKNIIFMRQSYEQEFNAIMDMQATFHLNLASGQKLRERLYNLIYFQNPLKKGKVGKCSYERNREVCHASNPVYQEFRIWRDILNIKIFDLEKNEIEITFEQRNRWFNKCFAGSNITKAGCLKDLGLKKPTLYSWMSGKQIAGNPIAKCFSELKLMDNTPFEAYALWQDLYSATDNDRLAKLLHKKYQFSDYQINELSDLDLNKLGYADFSMKAIRKLLPHMQGGMKLKEAIMHVYGKVDFENVALRNVVLEQHYDSCKSLVTALKKEYNINEVQFEIDHLLKQGNKGRKAISQNKRKEEKFAKQHPQLSQYDRIKLQLWEECGGISPYEPDVIIDKKDLFSDKYNLDHIVPKSKLFERSYANQVLCPRHLNEKKSRKTGIDFAKELNIEEQYRDAVAKFPEGKQQYLLMGENEIPDNWISIRQNSDYNTKCFAALFNGAVNIPNKLINRYAVQWNQNKFNEQDARHYLCKAWVMANMCAETITYFDNIKNESSNIDSVSVYDIQPGLPEIDMNNYLVVMPKVKFSRKTKFGYSPRFALHQESIFGKRISRSRNAKGEIVEDVFYKIRQPISKLTPAMVNKIMDKAIRNKISERIQQAGTHEEGILSLVEEPARHNNKPIHRVSVMQNSEKIFPLHSTDGKGNTAKFSAHERKVDFVFGENNFCLKLWYDENEKLHKRSVTLMEYITALNNGESLEREFYLQVNDIVLLHDKYWYVIGASDALTLRPTTTLSATDTYRVKTNDWKDLQKVKVNQIGKIINTIFAQANHKKAKAAVKSTLHQQHVGVFLYHSVEGEHAAFIL

SEQ ID NO: 9666 - protein, 1528 aa, unidentified
  REGION 1..1528: note = Description of Unknown: Cas Enzyme sequence
MKKILGLDLGTNSIGWALIQQDFIDKKGEILGMGSRIIPMSQDILGDFGKGNSVSQTAERTRYRGVRRLRERHLLRRQRLHRVLNVLGFLPENYASKIDFEKKFGQFLSEKEPKIAYKATWNEEKNKYEYSFQFKNSFAEMLLDFQKSHPSYALNGSSNERLIPYDWTIYYLRKKALTQKIEKEELSWILLNFNQKRGYYQLRGEEEEENANKVVEFYSLYVVDVLADDPVKGKSDIWYSLILENGWVYRRSSKTPLYEWKGKLRDFIVSTDLNDDGSIKVDNEGKEKRSFRAPSESDWTLQKKKTEKEIDKSHKTVGTFIYDSLLKDPSQKIKGKLVRTIERKFYRAELRQILQKQIEFHPELRNEDLYNECIRELYRNNNAHQLLLDQKDFLHLFLNDIIFYQRPLRSQKSSISNCTLEFRKYRDQQNNENIQFLKVIPKSNPLYQEFRLWQWMFNLAIYKKEGENNVTSEFLNKAEDWEGLFDFLNNRKEIEQKPLIKFLLEKAGIKGKQLSSDIEKYRWNFVEDKSYPCNVTKALINSRLAKVMDNPTEFLTRKIESHLWHIIYSVTDKIDYEKALRTFAQKYDLDSELFVDAFLRFPPFKSEYGSFSEKAIKKLLPLMRLGKYWSWDNIDKYSKKRIENIITGEYDEQIKDRVREKALNLTSEQHFQGLQLWLAQYIVYDRHSESDSAEKWNTVSDLENYINNFKQHTLRNPIVEQVITETLRVVRDIWLKYGNGGKDFFDEIHVELGREMKNTADARQAISKKISENENTNLRIKSLLAELINDSTVENVRPHSPMQQDILRIYEEGVLSSNIEIDEEILKISKTAQPSSADLRRYKLWLEQKYRSPYTGNIIPLNKLFTPEYEIEHIIPQSRYFDDSLSNKVICESAVNKLKDKQLALEFIKNHKGQKLQIGESKSVTILNIEEYEDFIKLNYSKNQGKRGKLLLEEIPEKMIERQLNDTRYISKLVSSLLSNIVRSENNDDGVNSKNMIPGNGKITSELKQDWGLNDVWNELILPRFERMNVLTNSNHFTSWNEKYKKFLPSVPIELSRGFNKKRIDHRHHAMDALVIACATRDHINLLNNKYAESKVRFDLQRKLRHYKQVTYTHPQTGMVIEREVPTEFIKPWPEFSKDALKALEVIIISFKQNLRVINKATNYYEKWAEKDGVMVKERKAQEGTNWAIRKPMHKETVSGLVKLRKKKTVLLSAALEDYSNIVSKELRDKVIELVDVNYNKKMLHKFFTDRNKKWEDQDVSRVEIYYWQEDNVASRVSLNDTFNEKKIETITDTGIQKILLNHLNNYKNRLDIKGKEIAPELMAFSPEGIDEMNKNIKALNDGVPHQPILKVRTFEPLGNKFPVGSSGNKKDKYVEAAKGTNLFFGIYENGEGKRNYESIPLNIVIERQKQGLSSVPVENENGEILLFGLSPNDLVYLPLEEEKVNPTLIDFSHLKEHQVNNIYKVVSFSGTQLFLIRHNIATSIVNKGEFSSLNKMERAIDGTMIKEVCLKLNIDRLGNILKLTARN

SEQ ID NO: 9667 - protein, 1063 aa, unidentified
  REGION 1..1063: note = Description of Unknown: Cas Enzyme sequence
MGLCVDYSCMNMDSALSKWSGHPFYREQVVLGLDIGIEGIGVFVRKGPTPIYARTFIVALPESAPMAGRRQKRAMRRSRTSARHRDYLFRLWCKEFGLPVVDGDAKARTDAWAIRYRACTKGVASAEAVSVALRHCLSRRGFSYHRDGDAQFPWGDEMEYTPIAKWLNNAFFDLKYANELKWKLDGLDWMSSEKKRQAILEAIDACVAKYDTGPLVAHIKAHLDAPIHRRPRAWDIILPRDLIEQHTADIIQKHSKFFGSPEKSELARIAYFKILNYARNKPGALAERKVKKCPYLAKLDEGYSGKILCAMASNHSVRRLNLIEFLAQRGFADSGGSKLKANRDIFEVLDKHLAADANAIDSARTKERTPRPKLGLVELKKIFTKAYGVKLEKDTEGLNGHYFEQLKDIVTPPMSTLSGRANLSEKAAKILLERALSHGWDGLDLKDTWGDFFVWRRDVDRGIGLYPQVEFLMGRRSKKGVQAVQGVIRKIFAKLAPELGQDRPDVVIAESVRDVPRNADHRKDRERKMLERREARKELFERYGLADGGTDQDRRRVSLYEQQKGLCPYTGKELGSPLNPSLQVDHIFPRERGGVSEMDNLVLTLSEVNRKKAKRTPHEARSDFPEFSKFAQNCRWGTKKLELFLRKEADIPDWKNLTRTSQIARELREEIAQWLGIKGDAEKVRARIGAPSGLQTAICRRSKAWRAKLPEVDGKKDRTNMRHHLWDAAVLSHIPPGEGTQSVAFGGIFYQEKEDKPGDLGWQALGLGPDLLAFEAATAQQCLVEKPRQRRSKQSRTEETIYGMNDQGRLTVRKALIDGLGMVNKNAAKWLEHSGIPAAQLPKKRLEKFLEQEADAKRLELNSGSFVDKVRIVAPEESPVSMLPHRNRQGDVIGWKIMGSPYTRMEIWKAPDLDKKGLPVFQRRFVPNPRGLAALHRLAKEGKGPWWKQKPSADTASLRRKVIGAPMAKFSKKLTSVQLGDLLFVPYNGLGESISSAWNPKTMKFERPKAAHWVWLRVSSINSSGQIHTSISEKLAVDTIKPVNPSSVSVIAAYRQFALEQKS

SEQ ID NO: 9668 - protein, 1091 aa, unidentified
  REGION 1..1091: note = Description of Unknown: Cas Enzyme sequence
MKTYILNGATHGGGPSSVKWSEAPFYESALVLGVDIGLEGIGVYLRKGREELFAKTFLFDVPETGRLEGRRQKRAWRHARKNRATRRKRLKSLMEKHGLPWVADEVLTKTDPFQLRHRAITNGIASPEALSICIRHLVDHRGFDYFAFAEEGAFPWGDSDSAKETVKWISTNFIDEESEKYILDLVAPLDWSGEELAKVSSELSARKEWCAANGIDQVLAEYSREKKSNLRKAARRNNFPRAMVEGHLREIITKHSQLLKDAPEFVEALFLKPKDKREKGQAIFHYNRKTRPEAQLVWERRINRCPYAAELGLGNPRVAKGSDAEVGAWKALEFLSTRRVEVVGKDGIKLIHRISPETIRTLVDIAWSNRTLFLAKAKMPPFKEAKDFILKDIISVHGKGVKPVSSKDSAFNETFFTQLQDIIRPVAANLRGNASMSASAATRLFAIATAEGSDFNPEVIRERLNAVEFYNKRRTVLSTHLGLYPQVEYLLGKRKREGGGFRQVAHGRLHRLFGEIAEKLDGKTAPDFCVVEVIRDAPRNQRQKSEFQKLQKSRRADREALFAAHGITDSGSGSARRRITLHAQQNGICPFTGRPLPAPLDPELEIEHLFPASRGGLSCDENLVLTFREVNGQKGERTPREAANANLAGWLTWDLMLKLSAPMRWSSRKRDIFAFDPSEGTSVPDFGNVTRTSQLARQLVRELAAWMGVEGDPEAERERIGTPSGWLAAQARRSWLEPDGYTKIRSSLVHHLVDAAILSHIPPAAGLNHVRYGGIFFESPDRKTRALPELAPRIAHWLGEETALCPVEKQRSNSRTRSLGDETFWKILPEDEKGKRRTRQRTKLDHNDYQDGIALDAELRRMKIPAEKIPSVKALDAWLDRVKGGIEAPLILLDGTPVRNVHKFDSKGEFTMPLGWSAKTSDTGSLQGARLLDGKFDRLELWVGWNSRKGKWEYFRRLIPSRTALRHLEQTLPGWWKKNRKNVCGSLPGFARRVAMIRKGDTFLLPLGKDGKLDLESTYVRWWFEVTSTRADGVVEMKSMARKKVEETLMEQAGARALVQTPSNPAVLAQILALPGADTKALDLGLKPPRD

SEQ ID NO: 9669 - protein, 1087 aa, unidentified
  REGION 1..1087: note = Description of Unknown: Cas Enzyme sequence
MLVLGLDIGITSCGWALVDEEDQKIVASGVRIFDRAENAKDGKSLAAPRREARLTRRRLRRRRNRLNQLAILLARAGIVSCDTNVHHPTVSTKLDVWQLRVDALDRSLTGEELHRVLHHIGKRRGFRSSKKVRAQRDDGLDTPKSEPTEEGKALQGIRELEKAFRESGYRTIGEYLALLPRQATPENLVDSARFRKIRNDHSLYQRTVLRSLLEAEVAKIFEAQRKLGNPALNDTLEKKISSILFDQKRMQSVEHLVGDCTFLKKEEKRAPRASWSGERFVFLQKITNLRWWDSETGEERRPDQDQIGALLEHAVTKKKVTYAHVADILRLPREYEFSGVRYQIQKGTRAKAGQIETNPSDADINKDELRAKENQKQTFFGFTFYHQVKSELADCLDDWTTITSVHELFDEIGWVLSVYKDDGEKAEKLAELGLTPKAVEKLAKLSFDSFLSVGFTAMRKMLPFLESGLIYSEAAKNAGYSHYQPTEGRENSYLPKFPDLPNPVVNRALSQTRKVVNAIIRTYGKPAHIVVELAREMGKSFDERRRIENENKERNVEKQARKEEWLAEFKSEPKGKDILKARLYRQQRGLCAYSGECIPMQLLIDETAVEVDHIIPFSRSFDDSMSNKVLVLTKANREKGSQTPYEWFGNDTNRWNRFCSQHQNAPLHKRNRLFGKVSKDDEWKERSLNDTRYIAREFLSHVRANLLPDTAETGRRARATSGGITQLLRHFWGVGQKNRSNHRHHCEDAILAALVTPRMTSILTRYFQKKERAGIFGEGQIREKLPLPWDGFRNDVQRAVDQVFVSRMPRRKVTGLAHQATVRSSREKQVSREDDKLESSKVIYERKKLEDLKIADLDRLIDPKRNWKLKEGLKERLEKEEFKGDGKRAFKEPFFIEGKHDGTLGALVKSVLLETGEKSGVEVNGQGKKGKGIASNGSMVRVDIFQRVVRGKSAFYAVPVYAWQFSQKNLPNRAIAANKSEDQWPEVTSDFQFMFSLYPNDYVEVDDGKGRIVEGYYAGIHRGTAAIGIVPHDVPNESAQNVGSKTVKSIRKFEIDILGNRREVLPGKEPRRGLENRRSRKQRLRPV

SEQ ID NO: 9670 - protein, 1009 aa, unidentified
  REGION 1..1009: note = Description of Unknown: Cas Enzyme sequence
MPQMRYRVALDLGSTSLGWAMVRLNAENETCAVIKAGVRIFSDGRNPKDGSSLAVSRREARAMRRRRDRLLKRKHRMMATLLRHGFFPQDEADRKALETQDPFALRAKGLDHALLPEEYARALFHINQRRGFKSNRKTDKKDNDSGALKTAIHALRQAMQATGCRTVGEWLYGRHQQGLSVRARYRENRSTQDNGKTKIEKSYDLYIDRAMIEAEFDALWAKQSELNSVLFNDTARAELKDCLLHQRPLKPVKPGRCTLLPDEERAPLALPSQQRFRIYQEVNNLRLLREGLSEEQLTLTQRDLLVQALETNNKRSFAQIQKLIGFSGQFNLQDEKRTELKGNSTSAMLGKNELFGQGWFTWSERQQDAIVKQLVKQENEWRLIKRLQKYCGVNEETAERIANAPLAEGYGSLSAKALEKILPALLAEIITYDKAVLAAGFAHHSHISHAVTGEILQTLPYYGEYLQRHVGFGTGKPEDPAEKRYGKIANPTVHIGLNQVRTVVNALIKRYGHPSEVIVELARDLKQSQEQRKDEQKRQADNQRRNDRMRADIADLLQTSPERVRTTDLQKMILWEELSFNAAERRCPYSGVQISAQMLFSDQVEIEHILPFSQTLDDSLNNKTVAMRQANRIKGNRTPAQATADFEAQGWTPEDMLSRASLMPKGKRYRFAQDGIEQWLREDKGFLARALNDTRHLSRVAREYLSLICPQATRVIPGRMTAMLRGKFGLNDILGLDGEKNRNDHRHHAVDACVIAVTDQSMLQRFAQASASAREKQLNKLVETMPLPWASYREHVQRAIDNIWVSHKPDHGYEGAMHNDTAYRLLGAGRVQIRKTVDGVRMREIAALKVIEFSDASASDRHGLLPNGEPKPYKGYKGDSNYCMEIVRNDKGKWEGEVVTTFEAYQLVREHGMARLRHPALSVSGKPLVLRFIRNDTLRLVHNGGERTVRICKMTAEGVIALADTSESNVDARTRTKEISYIFKTAGSLQKSNCRVVGISPIGELRDPG

SEQ ID NO: 9671 - protein, 959 aa, unidentified
  REGION 1..959: note = Description of Unknown: Cas Enzyme sequence
MSKKVLGLDLGSNSLGWALLEETNGSVNGIVDIGSRIFTKAVEDKVPTPKNVKRRDMRLGRRVIQRRSRRKQRMLNYLVSLELLPKELQGHTQPEITLNELGDPYELRVKALDTQLTPHEFGRILLHFVARRGFLSTKKQAAGDLVDDPDTIIFLNEIDNESVDSKEEGAFKADIKEVHESINASGSRTLGEYLHKLVQGQCKRNRQHEGGHLRTERKMYQDELALIWKEQEQYFSHLPTDFMSKDQGVLQIIFYQRPLKLKKDRVGKCSLEPKNYRAAMARLETQQFRYLQDVNNLQYFERHTDQWLSISHEDKKTLINYFEHNPRVTITALKKQLGLDKLTKINLEAKNLKGNITACEIRSVIDEQWDHYEEEKQAALVEDLLSIKKKSALKTRLISHWGMSKDKAIELCLLEFEPGHGSLSLKAIRKLLPFLQQGLIYSRNDHATGELGALQAAGYLDAEKEQQDFDTLGAPVKTSNPIVNKGLHELRRVVNAIIKQYGKPDTIRIEMARDLEMNTKRYKENEAQQLKNRKENEKAVDAYKNLSLGKYPGHDDKIKYRLWDEQGHSCAYSNKTIMLSQVFTAQVEIDHILPFKKSLDDSYMNKVLCFVAENRAKGDRTPKDTWGGDEQKWLQITQAISRWKGLDSKVKRFYQTEADLQKRDFIASQLNDTRYIAKLALDYVQQLGCDVSVTKGYVVSQMRHQWGFNDLIGETNQKERTDHRHHAIDAVVIAATSRQMYKKAVSQIERNKLNIERPYESIKDELADQLQKTIISHTSQKKLSGGLHEETGAGFIEKHGGLVYRKNLTPDFTVKNANSIVDETVKELVLAHLLKHENEPKKAFAEGTIVYHKDNKTPIKRVRVLQSKTTKEKLEQSKFGIRDKSGKIFKYMAYGNTHHVEVLQNNKTGKYKGEFVTMMEASHRAKGIRSKLNPRGESQVVVKRDHGSEWQFLMALHIN

SEQ ID NO: 9672 - protein, 918 aa, unidentified
  REGION 1..918: note = Description of Unknown: Cas Enzyme sequence
ARALFHINQRRGFKSNRKTDKGDNDSGALKTAIGQLRQALQTTGCRTVGEWLYARHQQGLSVRARYRENRIAQDNGKTKIEKSYDLYIDRTMIEAEFDALWSKQSECKPGLFNETARAELKDCLLHQRPLKPVKPGRCTLLPDEERAPLALPSQQRFRIYQEVNNLRLLHEGLNSEPLTLAQRDQVVALLERPVREKKAPHEVTFNQIRGALNLNGAMRFTVEDEKRKSLKGNATNSSLSKKQFFGDAWFSWNERQQDAVVKQLVKQEHESRLVKRLQKYCGVDEITAERIANAPLAEGYGSLSAKALAKILPALRAEVITYDKAVRSAGFDSHSHISHAATGEILPELPYYGQYLQRRVGFGTGKPEDTDEKRYGKIANPTVHIGLNQVRTVVNALIKRYGHPSEVIVELARQLKQSQEQRKEEQMRLAGNQRRNERMREDISKLLNTSIERVRVADLQKMILWEELSFNVADRRCPYSGVQISAQMLFSDQVEIEHILPFSQTLDDSLNNKTVAMRQANRIKGNRTPAQAAADFAAQGRPIEDMMHRASLMPKGKRYRFAQDGFEQWLREDKGFLARALSDTRHLSVVALEYLSLICPQNTRVIPGRMTALLRGKFGLNDILGLDGEKNRNDHRHHAVDACVIAATDQSMLQKFAQASARAREKQLSKLVDTMPLPWETYREHVQRAIERIWVSHKPDHGHEGEMFDATIYSSAGESKSAAKTRNVTPFAVRANSSSFVLKRHQGGGDVPTPYKGLLYNSNYCIEIAKAESGEWIGEVLRTFDAYQIVRNFKKIKDGVRQLRNPNLTASGKPLIMRLMINDYIRAKVDDDLLLLQVLKINSSGSITFIKPNETNVPARYSARLAAQKAEKTRESFDLSALNDSFFQKAFSAASLQDCEARQVVISRIGLMRDSGFI

SEQ ID NO: 9673 - protein, 1356 aa, unidentified
  REGION 1..1356: note = Description of Unknown: Cas Enzyme sequence
MQKKQKIENYTVGLDIGTNSVGWAVTDLDNHLLKHKGKNTWGVRLFDQGETAEGRRLHRSMRRRIARRKARIRRLQNIFAKEVHKKDPLFFLRLKETFLHEEDKDEKIKASGNLTGLFNGSGLNDKKYYNKFKTIYDLRSHLMNSNQQEDIRLVYLALHHIMKYRGHFLNQGESFTSDIDFNKMEEDIVSLLKSIVEDEDGAENLQEPGLKIIQILNQRSMPRSLLKDQLNEALTLINIDLKAKKELVNAILGYKTNFINLFQLEVEKEEENHLKFSLSDEFEEEEKLKLLDSENEEAFYLLKKIYSMVKLKDILGNENTLSKAMIEKYKKHKDDLSLLKKIFIEYLPREEYQKMFKEPSKTGKTYTNYVKVYNGPEKDTGSKCTQEELCKEIEKSLLKYERKIMDKKAFNYLLKQAKNRSLLPKQRTVENGSIPYQIHMMEMDKIIEKQGNFYPFLKENQKKLQELISFRIPYYVGPLNENSSFAFIKKNYQGNIDPWNFEDMVDRSASAETFMERMMKQCSYLLAEDVLPKNSLLYSEYNVLNELNNLRIEKMSSANNRLRDINRSSVLFTDEKEKQIVINELFKKTKKQKVTEKDLIDFMYNHQMIPTKEISLRGFQKENEFASNLNSYRAFDKIFEGNLEKYREMIEEIIRWVALFEDKEILIKKLNEKYSSNLTQKQIHMISRMSYKGWGRLSKKLLDGITAKDSEGRKLTIITVMRERPMNFMQVITDKKLNFAEIIEKEAGIVSNGDKITYDEIDQLQGSPKIKRAIWQTVKILEEIKKVMGRDPVRISFEMARDDQASKRTASRFKQLDELYKGMKNENEAYRKSVHEELKGFKDQDKKLRQQRLFLYFIQNGKCMYSGEALDIQSLSSYEVDHVIPRAYIKDNSIDNLVLVKRIENQDKNKQLLLSQQVVTRMRSFWEKLYKGKLISSKKLYNLTRVSFNDKDLEGFINRQLVETRQISKHLVTLFDQYYSNTEIYTIKAKLVEDLRKSLEIYKVREINDCHHAHDAYMVNSVTSFVTKMFPYLKDEISYGAYYKLEKNPLKDPNFLKGKKDGAVISSFKTTQDGKFGTWDAEKEMTKIKKAVNYKDYFITKKLEENTGEFFNQTVYSPGDLNNLIPLKQSLDPLKYGGYSGMNKAYSVIFSGVNLTKKKPRPEKHITYIPIPVAKEIEEKKITTEEYLKTQGFNNIKILRDKVMKYQLALENGHPIFIISDSEKQNAKQLFLNKDNMKILWQCKNNSLEENEETHEVLLELYNLVIEKIDEQYTIFRSLPENLDKERKKFESLSVGEKATVLTEILNITKANGNNGKLDLLDLGNRVGRLSQSAKPEGLVIIDQSVTGMFEKKEVL

SEQ ID NO: 9674 - protein, 1072 aa, unidentified
  REGION 1..1072: note = Description of Unknown: Cas Enzyme sequence
VNHYVLGLDIGITSVGWGIIDKECNVIDTGVRLFEEADTSNNETRRDKRGWRRVKRRRQQRVIEMRRLLARKGIVSKDFTPLPNPYELREKGLRRTLTEEELATALLHLVKRRGSTLDIEDVALDEKDEKKAKDNLAENTRLLENEGRHVVEVQLERYRERGQIRGTDNIFKTDAYVAEARAILKKQGFDTPFIEEVVELIERKRHYSEGPGSKDSPTPYGRWRHDEEGNLIKVDLIEAMRGTCSVYPEEKRAPLKSFSAELFNFLNDLNNLKIPGEQEKLSETQKKEIFGEIRKKGYLTPKTDQPEGLARVLDIDKDLISGFRVDDKGKPILTTFPGYEALLKAYKKAGFNAAEEHIEQLDRIADILSVKKLPSERREALLEEGFDANLVESLKQLPSFDQYHSMSFKALREINEEMFKTSKNQMEIITEQGLNQKEVPDKLTLNEDAILSPVAKRAHREALRVVENLIHKYGDFEKIVIETTREKNSRDQRDNIRRAQRMNRERKEQVKELVKDSYGEDYAERIKGGRALKLRLYKEQDGKCAYTYNALDLNSIVEGRDPYEIDHIIPYSISLDDSFNNKVLCEARANQLKGNRSPHAYFKSGSAYGSVKDFETFKQKVQSNKNYHPKKKELLLREDNITKYDTLKEFIERNLVDTSYATRTLMNTLQDYFKAHGKPTSVLTIKGKVTNLFRNIGASQFFKDHPHADENPLEKDRNIFKHHAIDALIAARLSEQRLIRDLFRVEHSKEIDRETGEILYKKSPKEDENLIRFVKHLADFDTDHFKYSWKVDKKPNRAFSDETIYSTRPSEDEKSEYVVKKYPDIYALTNDKLEKIFEKDKGENLLVYHHDPRTYSKLEDVYHHYKHEKYPFAAYKEEHGPITKYAKKGNGPPVRQLKYYDGKLGSHVDISHKYDPKGKRVVLQQISPYRTDFYRNPDGRIKFVTIRYSEMQPEDDAFVIPVSEYEQKKQVKEIEDNAEFIASFNRNEIIEIINQDKKQGEVRERYRFIATNSDTDNRIEVKPIEHMSSKPRIMPTIGRKTKDVRKYAVSPIGEMAKVENEDLKLRVPFATM

SEQ ID NO: 9675 - protein, 1407 aa, unidentified
  REGION 1..1407: note = Description of Unknown: Cas Enzyme sequence
MAKILGLDLGTNSIGWAVVEKNKDDFSLIDKGVRIFQEGVKIEKGIENSKAAERTSYRSARRLKYRRKLRKIKTLQALSKYGYCPPLSNEELDKWRFEKKYPQNTAFFNWWKTSDTDHKTPYHYRYLAASKQLDLSREKDRFVIGRAMYHLAQRRGFLSNRLEGTKESDGEVSKSIEAISEAKGDKTLGQYFYEKYLRSEKIRDQYTHREHHYLEEFNRICEVQGLDSKLSQKLYDAIFYQRPLKSQKGLIGRCVFEPKKQRCAVSHPLFEEYRMLCFVNNIKIKTPDDEKMRFLNTQERKKAIERFYLKRDYFPFEDIAKQLAPKNQYKYLKGNNINSEDYLFNYRMDTSVSGNPLSAKLKHLFGEDFLNLRIEYTRNKDGKISYLDVHDLWHVLATFKDEENIKYWAKEKLGLEDEKAVEFAKIRPKSDYASLSLNAIKKILPYLRNGMIYSHAVVLANMEGSVPKTIWNNPEKQAEIKKTVKDLINSQNEEMAITEVVNGLIKETRDNGECWSEEAISYYLRDLIHGFENYYGKKKYASLPEFERATLENDALQLFRKQMSKNLGRGEFLKVPTIDERVKDFLIKKYSLDKKSIGNIYHPSAIETYQQAKKSKDGNKYLGSPLISSVRNPMAMRALHQLRKMINELIRQEIIDENTRIHIEMSRGLLNANERKALQNWQRDRETQRKHFAEKIAEHYKAQGVAAEPNADDILKYQLWEEQQHKCVYTGDEIALNEFLGSNPVYDIEHTIPRSVSYDNSQENKTLCQNRFNRSIKKNQIPSELIQYYDEIISRVDTLWKDKIEELEKKIQVAIKQSQVAPDKETKDRAIQRRHELLYEKRYWQGKYTRFFMKDIPQGFKNSQIVDTGIITKYARLYLRSLFGNVYTVKGNTVAEFRRAWGLQPAYEKKERINHVHHCMDAVVIACMTKENYEKLANYYYNVEDSFVRDASIAYKFDKPWPSFTEDIIDLENQVLVSHHTPDVLPKQAKKKLRKQGLVIKDKQGRPIYQQGDTARGSLHKETFYGAIEREVKNKKGEVEKQIKYVVRKPLEQLEDTNIKNIVDDKIRELVLKGRKKEKELKKEIEKKKKELSNAEEHEESVIKEEIRALQKTINNLYALPTKKGGFVPIKKVRTYTPQVNNPILLKRHRDQSAKRHSEHKQHYHVTNDGNYLMAIYEGRDSKGKIKRDFHLFSNLEATEALKLSAQKRALESQGLVNINSLIPAQKVTNSLELPFKLIIKIGTLIIFWDKYPEEVHELCLSEVKSRLYKITGLSMQRIKGANGKINEYATIVVRFHQEARPAKDLATEDGVFKAGEKFKAKRKINHNQFNALVEGFDFEIIKMIDFDKFSPDIINYENKNLTKEDKKSCEKFLEKKGYKLFNHSLDGGDSCAFKKPKASKTNLFDL

SEQ ID NO: 9676 - protein, 1111 aa, unidentified
  REGION 1..1111: note = Description of Unknown: Cas Enzyme sequence
MTKWRLGIDVGTNSIGWAVIGLSKEGRPNALLDTGVRIFSDGRDPDKQSLAAQRRAPRAMRRNRDRYLLRRKRFMERLIKHGLMPTQSDERKKLENLDPWELRVRGLDERLSLHELGRALFHLQQRRGFKSNRKTDKGDDDESGKIKSAASAARQAMAERGARTLGEFLAAERVKNPKSAHTHPVRARLHGSGARAFYDFYPTRDMIEEEFDALWDAQAKHHGDALNDEVRKSLHRELFFQRPLKPQPVGKCLFIPTDVRAPSALPSVQRLRIYQEINHLKIHLPGAPARFLTLEERDLLVDKALKTAKLTFDAMRKTLKLPEAAKFNFESLKRKHFDGDKTAAVLAASKRWGKAWRELSLRQQDAVVEILLGQEPVLFDGSPSPQFEEVCTSVSDALGIDKDKAGRLLASEQSEEITGWLADSFEITSEAAHAVVKSLLPPGHSALGRTAGKRVLEQLSSGQIEAINAETGEVSTVPCTYDQSVNLAGFEDHAMLDIGEKNGRLPYYGEVLDRQVAFGTGNLNDPKEKRLGKIANPTVHVVLNQTRRVVNKLIQKFGQPQEIVVELARDLPLSAQGKKDLEAEQKKNQNANDKRRQRLAELKQQDNYDNRLRLRLWEELNPDDPCNRRCPYTGEQISIERLFSPEVEIDHILPFSQTLDDGFGNKTLCIRQANRDKAQRTPYDAFYNSSKEYKWDDILSRVADLPPNKAWRFSKNSMDRFEDEERDFLDRQLNDTKYAARIVRQYLTHSIPSEDPLRRLSKVWVTPGRLTSDLRHAWGLNSILVGHNKEESADPKKNRNDHRHHAIDAVIIGLVDRGLLQRVSTNAARAEKDHSSRFFASLKDPWPGFRDTVRSSIQKIVVSHKPEHGREGALHEDTNYGVVQDPLGNGERLVSRKPLVALTAKEVSQIGDLKIRSDLIERTKGLDKKDKNYKKRLLDALTKYGESHGVRRVRIHKVEGAYKTIHHGNGHMRAVIPGENYCVDILELPDRGWTGFGISVFEINQPDFVPIWQSDCPNANLVMRVHKGDLLRLTVEGRDEVMVVRRLDVKAGRFKLARHLDAGMLDKRHKASDSEDSFRWLMAGYNTLRTAGARLVHVDEIGRIYDPGPPQ

SEQ ID NO: 9677 - protein, 1040 aa, unidentified
  REGION 1..1040: note = Description of Unknown: Cas Enzyme sequence
MSNTILGIDLGSNSIGWALLSADIKDRPNGLIDAGVRIFPKAVEEKTPTPKNAKRRERRLARRVVQRRARRKQRMLNYLISLKLLPETLKDHPQPEIILNELGDPYQLRAKALDEKLTAYELGRILLHLVQRRGFLSNKKTLLGSEMLDDPDVQQVLVELGDDNPDVAGTDSEETAFKKDISELRDRISSSDCRTLGEYLASLSEEDCKRNRSHNGGHLRTDRKMYRDELHAVWEKQAEYHLILTEDVRFQLEEIIFHQRPLKLKKDRVGKCSLEKSNKRCQIARLEYQRFRYLQDINNLRYIDPYTDAEKSLTEEDRDKLVHLFENKATPTFGAIRKELGLKGIQFNLENSLKKLKGNTTACEIRQVFSGWDNLPDEQQQALVEDLLTIRKKTALKKRLMDHWVIDGKTAVLLCMAEFEPGYGNHSMKAVNKLLPFLKQGMVYSDTRVEAGYGYEQEGIEHVDRLGAPPEIPNPIVSKGLHELRRVVNALIAEYGKPDVIRIEMARDLEMNTKRYKAFRKQQDDNTKANNKATEEYQAVASRNPALELSKYPSKTDKIKYRLWSDQGGRCAYSNKPINMTDLFSANIEIDHILPFSQSLDDSYMNKVVCVAAENRYKGNRTPKDAFAGNGDKWDQITSAIHRWDRKKLKSKIDRFYKTGAELVKRDFIGSQLTDTRYISREAGLYLKTLGVDITYTRGIMTDWLRHHWNLNTLIGEADKKERTDHRHHAIDAVVTACIDRRFYQVLAANAKSLGEKRTGLTMHDLITDSPWPELRTEIADRLETLIISHTSQRKITGALHEETGVGFIDGVGTVYRKNLNSDFTLKNAQSILDPVVKEQVIKHLKAHNNKPKQAFAEGVVVFHKNAKTPIKRVRVMQSDTTREKLEKSKLGVRNKQGNVFRWMTYGNMHHVEIIRHKKSGKYEGIFVTAMEAAHRARGINGLKRPIIQKDHGENVEFVIALHINDTVSLDKDGKQQLYRVKKLGQLNQGRNPRPTLSPVNSADERGIFSDSVKNLMEKNSMKLHRINAIGKLQHDQTNC

SEQ ID NO: 9678 - protein, 1046 aa, unidentified
  REGION 1..1046: note = Description of Unknown: Cas Enzyme sequence
MKYILGLDLGTHSAGWAIVELDSAGKPCAVKDAGVRIFEAPVEPKTQAPKNLARRTARQHRRQLARRKQRRVKLTRILQEAKLLPQDSLELESLLLDDNAYNPYLLRAKGLDQELSGFEFGRVLFHINQRRGFKSNRKTSFGEVLKNVPSIAELIEQEESAESTKILQKSNKLSVATTGDDDGVVKAGISLLRASIHTSNARTLGEYLYLVKEKKASRPDQMSIDVPEKVRGLYTERAMYEDEFEQLWSKQELFNKALTGQLKVLVFDAIFSQRPLRTQKYLVGDCVFEYHRKRAAKATLEFQRFRFLQTVNDLAIKSTETRLYRTPTQQQRQSLVALLEKSEKVTWGKVRKALQIHSGETINFEEGGKDELLGDSTSARISKAIGARWLDLTFEKRNELVADLLTIPRKDWLLVRLLDHWDFSAVEAYKLAILTLEPGYGAVSMKALRKLIPLMEDGLNYRTACDKLSYIEGANRKSTTGEVLPFPPNVRNPVVQKALYQVRRLLHAIVRKYGVPEIVTVELARDMKLSKKQKEESEARNRKNKRERDIARAALRSNGLSEPSHDDLLKYRLWKEAGCMCPYTGQPISMGMLLGKEGEVDIEHIIPYGRCLDDSYMNKTICLASENRAVKKEQTPYEAYSSNKERYEDLLSRLSHMSEMPTGKKRRFELRPEDISLDEFVTRQLNDTRYICREVSNYLLGLGCRVQVSKGEATSALRHKWALNVILSPDGSGEKNRGDHRHHAIDAIVVALTTPSLFKQLSKLSAQTGFGIKNRRFLLEEPWKNFHKSVDALIETIVVSHEAHRKITGKLHEDSAYGPTDKDGQFVRRKSIGDLTAKDLADVRDGAVKAILAQQLERFNGSAEKAFSKPVSHNNPNIVIKKVRLNVRLNPEIVFPISRGGGKPFKYHNLGNNHHVEVIQDKASKKFEFEIVSAAEAARRVRSEGSPVVKTDFGPTKKFVMSLCANDCVELTGKDGVRRVFRVKGFAKERDRRRIVLQLHNSASPTDFERLPPNGFQERRPRKLEIDMLGRVIDSRVNDKSNSRNQ

SEQ ID NO: 9679 - protein, 1448 aa, unidentified
  REGION 1..1448: note = Description of Unknown: Cas Enzyme sequence
MTKLGLDLGSSSLGWDLNENTKHESGVITFDTGMSKGQSGGYTSPTRERREARSKRNLIQAKKYRKWELLKILITNNLVPINIIELEKWSKYKKGQFRKFPESINFLKWLACDFSYEDGLIYKNPYELRVKAIDNKLSNHEFGRVLYHLVQRRGYKDIGETDKETEKQKERRSIGGFQKALDENRTIAEALTNEFLSKNERARNQYPFRDEYRDELEIICKEQGFNVSKEGKENYDDEFVKSLWKAIIWQRPLKSKKGTIGKCSLEQTRLRCPISHPVFEIFRTWQFINTIKYFDKNNEKQSLKNTQREQLFFEIFLKNDTNFKFEIIKDFLNVKLGSIYKYNYPVDKDGKYDTSVSGMPICKGLKTIFKDDALKALSEIEKYHIGNAPKIKNNYSIYDLWHILFEFDNQHLEELGREKLSLENIIRKRKNIEVSISPLVEIKEKVLKGYADLSLKAMCKIIPFLKEGYLYNEAVVLAKIPELLGNQWGNNKIEILEIINQSSGLYNKRKTIISITNNLIDNHKGLDYDETFAYKDFSYSLTENDIKTIERACINFFGEKSWEKLLDKEKIINEVGYEYQDYFYDNKRAYRKLTTLTDIFKELLKQKKIHLNGELYHHSNRKNLFIKNLEINRKTGEKNLPKYKDTEIEILPNPQIDSIKNPMFNKSMSILRKLINELIVSGKVDAETEIVIELARELNDNNKRLAIEKYQNERRNNREKIRTFLKEFNTLENKSINIEENIPVFELWTEQIFEKTLDEKNNKVENKNRIDILKEKDAIKRYELWMEQKGQCMYTGKMISISQLFSKDTDIEHTVPRSILPDNTMANQTIAFSKYNRDIKEAKTPYYCENFSKDTRNGTSILPRLDFWKKIRDNYKWFYEKNLKPNGNEDDEAKSKRIIDKHYYKMHYDYWKDKLERFEAIEIKDSWARRQLVDTQIISKYAKEFLQLYFKKVAVQSGKVTSNFRKIYGFQEVDEIKSRNKHTHHAIDAAVLTLIPNNSSKRDEMIKKMYAYDEAYKKQFTTKPYSNFDSQKLINDIENNILIVNYKKDKLVQQSKKIIRERGKIQYVKDKQGNFILNDKDKKIIKISDGDAIRSTLFAQTYLGKIKDVERYQDGQPIRENGEWKYKSGKEEYLFVKRESIDKVKTSDKLISSIIDPVIKKIIFDQKNKSIIKDYQGNIIRHVRVRTNAGKEVKERVNYLSKLEYKNSFYSEAGSLPYAILLQKNTNGKMQYEMLPLASYEIAKMKKKLGKFNIETYVEENYKEFTDWAKDLMKIGQKVIVLKIDSEFEKRKNIEFQQKRLFVITQFSEGSIWLRYHLNALSKDEVKNSISVIKDELCRKFEKELKIPEVIENKLIEDNKTRKEDYENKRYRFDTINNSYRLKRFIEIIGEEKTKEFKKELDKYKAIPSSIEIEGGTPLLKVSKENWNFLFENKDFEISLLGKINWIE

SEQ ID NO: 9680 - protein, 1149 aa, unidentified
  REGION 1..1149: note = Description of Unknown: Cas Enzyme sequence
MDETTYTLGLDIGIASVGWCVLGTDHIIDLGVRAFDKAETAKEGDSLNLVRRSARLMRRRLRRRAWRLTKLARLLKRQGLIDNNQLFQPQQPLQNSLWQLRVNGLDRLLTGDEWARVIYHLCKHRGFHWTSRAEEKQADGDSKGESGKVKQGLAGTAKLMKEKGYRSTAEMVLAEFPEAQRNKQGDYGKALSRVLLGEELALLFQKQRELGNPHTDAALEQAILGDGDRKNGLFWAQKPALAGSDLLKMLGKCTFEKAEFRAPKASFTAERHVWLTRLNNLRIVVDGVTRPLTEQERAIALPLPYKQAGLTYKKAGLTYKQLASALNKAGFLDKDKFKFTGLSYPSEKQKSEGKAKDPEEGSLVKIPGWQELRNTLREAGLETEWEGLAGAACCGQPEILDKIATVLSVYKDDDEVLHKLEELPLPNRNNLIKALQTLRFDKFHALSLKALRQIVPHMENGLRYDEACVQAGYHHSQLHKVGEGEHKYLPPFYDGRDKDGRMLFREDADIPRNPVVLRALNQARKVVNAIVRQYGQPLAVHIEMARDLSRPLNGKWSDSGKYIEGRSDVRRKQEEFRDSNDKDKAEFAVQFDIIGAPKGSDFEKWRLYREQQGKCAYSIAPIDLNRLLEAGYVEVDHALPYSRSFDDSKNNKVLVLAKENRDKGNRTPYEYLVGAEDSPRWLNFVAFVETNKTYRLAKRSRLLRKDFGKKEAKEFRDRNLNDTRYICRFFKNYVERYLQLAADSEAKRCVVLSGQMTAFLRARWGLNKVRGDSDRHHALDATVVAACSHRMVQRLSDYARRKELDQVREGFVDIATGEIVNPAMFQQLREHFPDPWPQFHHELEARLKIDNPALLSEEMARLGTYPPEALATLRPLFVSRAPQRRNSGAAHKDTIYGQPEKMRETGSVTQKVPLASLTLKDIGEEDSETNPCRLIDEHRNKKLYAAIRERLKIHDGKGDKAFPPSNPLRKPIDTKRDDYKGPRDKEGKPLGPVVRTVTKVIDKLSGIPVRGGIAKNDSMLRVDVFTRAGKFHLVPVYVHHAVAKTLPNRAVVGKKDESQWTVIDDNHAFQFSLYPNDLFQLTVDRESVFGYFSGININDCGLKYFPHDQKSVESLKKKGVSSAARFKKFHVDVLGNIHPAQWEARRGLA

SEQ ID NO: 9681 - protein, 1105 aa, unidentified
  REGION 1..1105: note = Description of Unknown: Cas Enzyme sequence
MSKTYTIGLDIGIASVGWCVFGETRIIDLGVRAFDKAETAKEGESLNLARRSARLMRRRLFRRAWRLKKLARLLKSEGLIADAKLFKPEQPFATSLWQLRVEGLDRCLSDEEWARVIYHLCKHRGFHWISRAEEKQAEGDGKSEGGKVKQGLAGTAKLMDEKGYRSAAEMVLAEFPEAQRNKQGEYRKALSRVLLAKELALLFAKQREFGNPHASGELETTILGNGDRKSGLFWQQKPALAGVDLLKMLGTCTFEKGEYRAPKASFTAERHVWLTRLNNLRIVTDGITRQLTEQERSLCLALPYRQAGDLTYKQLGSALTKAGLLEAGAFKFTGLAYPTEAQKAEGKAKDPESATFVKIPAWNELRLTLTKAGLDSEWEQLSGAALCGQPEIFDKIAWVLSVYKDDDEVRAELAKLSLPNQAALIEALLNIRFDKFHALSLKALRAIVPHMEQGLRYDEACVQVGYHHSQLYKVGEGQDKYLQKRMLFADDADVPRNPVVLRSLNQARKVVNAIIRRYGSPAAVHIEMARDLSRPFDERNKIKKDQDEYQARNQRDREQFIELFGHLPKGLEFEKWRLYREQNGQCAYSQKPLASSGDVAEIFLDGSTEIDHALPYSRSFDDGKNNKVLVLTRENRDKGNRTPYEYLGGAENSERWQRFVSFVESNKAYRLAKRTRLLRKDFGAKESEEFRERNLNDTRYVCRFFKNYVEQHLKLAEGSAAKRCVVVSGQLTNFLRARWGLLKVRSDSDRHHALDAAVVAACSHSMVQRLSNYSRTRELEQVRDGFVNIETGEIINPAMHQQLREHFPDPWPYFRHELEARLKIDSPELLREEMARLGSYSEEELTALKPLFVSRAPQRRNGGAAHKDTIYGQPEKMKENGSVTQKVSLTSLTLKDIDSLADPHRNVKLYGAIRERLEAHGGKGDKAFPVSNPLRKPDREGNPSGPIVRTVTKVIDKLSGIPVRGGIAKNDSMLRVDVFTKASKFHLVPVYVHHRVTGLPNRAVVAFKDEDEWTLIDESFEWCFSLYPNDLVQVKLKGECYQGYYAGSDRATGAIGLWAHDRSTNIGKDGLMRIGVKTALSVEKFHVDVLGNIYPAPPEKRRGLA

SEQ ID NO: 9682 - protein, 1104 aa, unidentified
  REGION 1..1104: note = Description of Unknown: Cas Enzyme sequence
QSLKCIAKSNPLFQEFRLWQFLQNLKIIARERTINGKIETDVNVTDEFLKTENDYVALFEWLNERKDIKQDVLLTTYFKIKKPKGADNLPYRWNYVEDKEYPCNETYAPIAARLKKCETIATDFLTKEREMDLWHILYSVEDKHEIEKALNTFAKKHNLNSNFIEQFNKFPPFKKEYGSYSEKAIKKLLPLMRRGKYWNEDNIHPQTKERIEKLLTGECDETIRTRVREKAINLTNINDFSNLPLWLACYIVYDRHSEASDIKQWKTPEDIEKYLRTEFKQHSLRNPIVEQVITETLRVVKDIWKQYGESKPDFFNEIHIELGREMKNPADVRKQMTNKVTENENTNLRIKALLMEMMNDSTIEDVRPYSPSQQEILKIYEDGILNSDIEIPDDILKISKQGQPTSKDLERYKLWLDQKYRSPYTGEMIPLGKLFTSEYQIEHIIPQSRYFDDSFSNKVICEAEVNKDKDNATGFAYVKNNSGKLIELSFGKQVKIFTIDAYEQFVKQYFANNRGKMKKLLMEDIPEDFINRQMNDSRYISKVVKSLLSNIVREDDEQEATSKHVLSSNGSITTTLKQDWGLNDVWNEIITPRFERMNELTKSNKFGEWTNKEGKRVFQTEVPFELSKGFSKKRLDHRHHAMDALVIACATRNHINYLNNESARAKDEKTRYELRNKLRRIEEIEVERVVNGEKIRKKINVAKEFLKPWDTFTQDARQALQTTIVSFKQNLRVINKTTNKFQHWTFDEKGNKEKVFEKQTKGDSWAIRKSMHKDTVSGIVNLRFKKTVYLSVALDSPKMIVDMSFKRKVIELLEQYGNDKKHLLKFFNSRDNIWEKKDISKVEIYYYDSSNVASRVTLDESFNSNRIKESVTDSGIVKILLNHLEKYNKDVDGKIIEQPELAFSPDGIDEMNKNIISLNNGKQHKPILKVRTYEPQGNKFIVGHSGNKKDKYVEAAKGTNLFFAIYANKEGKRGYESIPLNIVIERQKQGLSPVPEINEKEEVLKFYLSPNDLVYVPNIEELENPNMANLSSITDERLKRIYKVVSFSSYSCFFVHNDIANTIVNKVEFSALNKMEKAIDGTMIKDVCWKLQVDRLGNIVKVTK

SEQ ID NO: 9683 - protein, 1529 aa, unidentified
  REGION 1..1529: note = Description of Unknown: Cas Enzyme sequence
MKKILGLDLGTNSIGWALVNTDENGNPCGITGMGSRIIPMDAATLSDFDKGNSKSQTAERTAFRGIRRIRERYLLRRDRLHRILNKIGFLPNHYAQSIDFDKRLGQFVSEPKIAWIKNGDGQYEFLFQNSFNEMLADFKVHQPQLLENDKKVPYDWTIYFLRKKALNYKIEKEELAWILLNFNQKRGYYQLRGEDEDENPNKLVEFYALKVVAVEATDEKKGKDIWYNVHLENGWIYRRTSNVPLDWVGKIKEFIVTTDINDDGSLKLDKDGKEKRSFRAPKEDDWTLVKKKTESDIDQSQKTVGCYIYDMLLQKPDQKIKGKLVRTVERKFYKAELKAILEKQKEFHVELQSKDLFVECLNELYPINESHRNTISNRDFTYLFMDDIIFYQRPLKSKKSLISDCPYEERRYLDKETGEIKTVPVKCIAKSHPLFQEYRLWQFISNIRIYQKERWINEKLHTDVDVTSEFLKNEDDITDLFDWLNNRKEIDQKAFFKYPGFGLKKEADNYRWNYVDDKSYPCNKTRSAILSKLEKNEYHSLTQEIEIKIWQLLYSINSKEEIDKALQDNPKRGNRKKNETQFEIFQELKSCSISTESIEKLKNIKIEEKDYGSYSAKAIKKLLPLMRIGKYWDEDSIDTNTKLRIDKILNGEYDEKIRTRVREKAIRLNDISNFKALPVWLVCYIVYDRHSEAKEIAKWEKPQDIDAYLKSFKQHSLRNPIVEQVITETLRTVRDIWTKHDDFSEIHVELGREMKNPADKRKRMTEQINENENANLRIKSLLMEFMNPEYEIENVRPYSPSQQEILRIYEDDVLKSGIEIPEDVENILKKFKETDAKKQPSRSDVLRYKLWLEQKYRSPYTSEIIPLSKLFTTDYQIEHVIPQSRYFDDSSSNKVICESEVNQLKDNCLGYEFIKNHHGQKVELNFGKTVEILSVDAYEKLVKDNYSRNRGKMRKLLMEDIPDGFIERQLNDSRYISKVVKSLLSNIVREDGEEEATSKNLISCTGGITDQLKRDWGLNDVWNTIVYPRFERLNELTKSNQFGQWENKNGNRVFQTQMPLDLQKGFNKKRIDHRHHAMDALVIACATRSHVNYLNNEAAKASAKESRYDLRRKLRRIETVQIEKLIDGKKVLKNIEVAKEFYKPWDTFTQDAQTALANIVVSFKQNLRVINKTTNHYQHFDENGKKVIEKQTGGDSWAIRKPMHKETVFGNVNLKKIKTVNLSSALEHSELIVDSRLKLKIKQLLSEGFDNKKVQKYFKDKTEEWNDINFSKIELFYFTNDTSEKLVATRKSLDDSFTSKKIEESITDTGIQKILLKHLENNQNKPELAFSPDGIDEMNRNMIELNDGNQHQPIYKVRVYEPLGNKFNVGTTGNKSSKFVEAAKGTNLFFAIYLNEEGKRTFETIPLNIVIERQKQGLISVPETNEKGEKLQFWLSPNDLVYLPTPDDIDSNSLLGEIKKDRIYKMVSCTGNEGHFIPAFVANAIVQTVELGSNNKAQRAWTNEMVKEICVPLKVERLGNVIEMNGRKL

SEQ ID NO: 9684 - protein, 1249 aa, unidentified
  REGION 1..1249: note = Description of Unknown: Cas Enzyme sequence
MKKILGLDLGSASIGWAVIAENIENGKTKCEILGMGSRIIPYEGTEGKDFAKGTGESRNALRTKARTARKGYDRYQLRRKYLVDVLVKNQMYPDDETRSLPKMKLWELRDKAVHSPVSLMELGRILLWLNQKRGYKSSRSDANLGKKDTEYVATVKSRHEKIKELDLTIGQYFYKELSADEFFKVKENIFPREAYIEEFNAICKTQQIAHPTILNNELIDKIRNEIIYYQRPLKSQKGLVSVCEFEGFWRIGKDGKEYFVGPKVAPKSSPLFQLAKMWENINNIKIGSRTGEDMKLTTEQKWAIFQHLDNNEKLTPTDLLKILNLKKENCYVNKQLAKGLNGNITKHAIRQCLGGSDKYENLFKLELEVVERTKEGYLYDRKTGEILDSKSIKFVDPKVEQEQFYQLWHAIYSIHDQEECSRVLQTKFNIEQPIADKLAAIDFSKHAFGNKSAKVIRKILPYLMEGDGYSEAMSYAGYDHSNSQTKEENLQRKLLELLKPIPKNSLRQPIVEKILNQMVNVVNAVVEKYGRPDEIRVELARELKQSKEERNDADKAMSKRQRENDAITKRLEEFGLRATRNNIIKWRLYEEIDNEEKKLNAMCVYCGQPISLTEALRGNEVDIEHIIPKSKLFDDSQSNKTLAHRHCNKNKNDLTAYDFMKGKPEAVFNEYVERVNQLYANHIIGKAKRDKLLMTESKIPDNFIDRQLRESQYIAKKAREILQTICHNVWSTSGTITAELRHLWGWDDVTMNLQITKYRELGLTHQVEWESEHGKNKHQKEVITDWTKRDDHRHHAVDALTIACTKQGFIQRFNTLSAAKTREDMMFDVDQRSLEFKEKRSLLEKYIIGEQPLIVDEVEKAVSNILISFKSGKKVAVLGKRKVGKRGNKKVVQERIIVPRGSLSEESVYGKIKIQEADKPIKYLFENSQLIFNPTIKAKVEERLLMFDDDVKKAIASLKKVPIYLDNDKTVVLEKATCLKDEYVIKYTVDTNFNKVDKVVDPKVKEILQDRLKKFGGKEKEAFKDVQLEDKTVIKWYEEEGLERPIKSVRCFTGLSAVVPVKKDENGKNIGFVKPGNNHHIAIYTNAEENKQQHVCSFWHAVERKKYGIPVIIKNTNEVWDKIQSQPDGTYPESFLEMLPLPNLNLLVSMQQNEMFILGMTTEDIGTAIKLRDYRQISDKLYRIQKMSIIPSSGQIYLNFRHHLETQLIDDENAKKSKRFYNVQSLGALFALNPFKIRIDNLGNIVKQE

SEQ ID NO: 9685 - protein, 1015 aa, unidentified
  REGION 1..1015: note = Description of Unknown: Cas Enzyme sequence
QLLNAGKKSLPDFYRSDLQTEFDRIFDNQLVFNPEYLSIELKEELRGKKRDAVWAICTKAFKEKGFELIGIKRQGNSAEQRIENYTWRAMGLSEKLSLEQFVIVIQQISIQLNSSSGYLGAISDRSKELFFNKQTVGQYQMRILDENPNASLRNMVFYRQDYLDEFNSIWEKQAEFHEELSAVLKHEIRDIIIFYQRRLKSKKNLISFCEFENKKIEVQIDGIKKLKTAGSRVIPRSSPLFQEFKIWQVLNNVEVFSKGKKNKKQLEAHLVNEIQDPFDFGGKRELYQEEKELLSKELSIKKELKKSDILKLLFDNAKDLDMNFDSIQGNLTLATLFNAYKQIIEHSGHQIDVDKKTASEVMKSIKEIFSALNIDTDILYFDSEKEPEKQRIYKLWHLLYSFEGDNSKTGNENLISKIATNYGFEKEYAALLANITFQDDYGSLSAKAIRKILPYLKVGNKYDIACEYAGYRHSASSLTKEEIDSKTYTDRLYILPKNSLRNPVVEKILNQMVNVINSIKDNYGKPDEIRIELARELKKNANERNELTKSIAEITRLHDQYKEILSKSPFNLSHISRNDIVRYKLYEELKGNGYKTLYSNTYVSPTSVFSGDFDIEHIIPQSRLFDDSFSNKTLELRSINIEKGDKTAHDFIKEKYGETENENSFVNFLIRIEDLYSAGIISHAKYNKLKMQGKDIPDGFIDRDIRDTQYIAKYAKTMLGNYVKYVVSTTGSITDRLREDWQLIDVMKELNWAKYQNLGLTEEFTNKEGHQIRRIKDWTKRNDHRHHAMDALTVAFTKPSIIQYLNNLNARSDKSSSIYGIEQKELYRNEKGKLLFKPPFALDDFRILAKYHLENTLISIKAKNKVTTLNINVTKKFGGVNIKVQQTPRGQLHNETIYGSQKQYIVKEEKVNATFDFEKIAEVSKQTYRDALLKRLQEFDNDPKKAFTGSNALSKNPIWLNELHTKQVPEKVKTVKFETVYTIRKDISADLKLEKVIDKRVREILTNRLKEYNGN

SEQ ID NO: 9686 - protein, 961 aa, unidentified
  REGION 1..961: note = Description of Unknown: Cas Enzyme sequence
SEENWQRIHQIIFYQRPLKSQDKGFCRFINKFKFEAKKLPDWAENLFINRDQKKYPFGLPRAYLALPSYCKFRILSEVNNLKIKNLRTREIIELTPDQKKQIIEKLNSQKSQIKFSILRKFISTKNISYVGADFEFNLESDRREGLDANPTESLLKNEKYFGENWNNFSLRKQDEIVEFLLEEDDEIKIENKALKEWNVNEIQAKNLSKLTINSFTKTSVGAMCKEILQKLCEEISSKNCLYHQALENLGIKHSDEDYNDGSKDALTYYGEAIPASVVAVKPKLKKTLNEEEEFGRIANPTVHVALNQLRKVVNSIINDYGKPTEISVELARNLKQTKDEKKQTEKKQKQNEKDNDEAKKTLVENNISDNYENRLRYKLWKELNADCNDRKCIYSGETISISKLFSPEFEIEHILPFSKTLDDSIANKTLAHKSANNFKGNRSPFEAFGENKSNYNYDDILLRSKNLPRHKRWRFESNAMEKFNDENSFLASQLNDTRYLSKIAKQYLSQICKKENINIANGKLTSIIRHSWGLNSILNNESESQNNASENLILEENFDAETGEVFSSNTKENSKEKPKKPHKKNRDDHRHHAIDAICIAMTDRKLLQQISHDNARGFDLDRLEIKLPNHWNSFREDAKEAIEKIVVSHKIDHGENGKLHDETYYGVLNSPAKIGNDEYNVVSRKSFESLSIGEIEKIRDNKIRSELLEQLKGFENDKEKIKNILSNYQINGKKIKRIRVLKKEARINIINHKQLCLKEKKLGIIEKVIHEKGVVGGNSHISIWELPKKNLEFFNILKYNEKNKKYKDLVNQLSPKKRIEFLDFIENKNGIKMFERFKNFQNQNDFWVAEDFSFAITCPTNLDNARLNLIKPHPSAKIINKLHNGDLIKLLYQNNEIYGIVAQLAPSNSRIVIYKHNNAKKEAENQIRLGFGNFKNSKLTKIFITPSGKIHDSGPIFKENN

SEQ ID NO: 9687 - protein, 1105 aa, unidentified
  REGION 1..1105: note = Description of Unknown: Cas Enzyme sequence
MSTEKIVLGLDIGVGSVGWGLVKLTEEKYMDEQPDGTIEAKYRISDGKIVCAGTRTFQVPQDRERKRLALKRGSARRSRKTTRRRAQRQKRLIRLAKEFGLIKDDSDRDEVLKPKSGDKEGTWDVWFIRKQALERKLTDVELFRILYHIAKHRGFCFHTKAEEAQEEDPKSDQGKAKAGLARIQKEFEDGKKKGKWETVGQMFWEKFKQTNPGNKRKRNARDKYENSIRRSLSREEVETIFERQQELGNRKAKEELERRYIDEILMYEEGIDEDKLQKMMGRCEFAGALCAPKESYTAERFSLFNRLNTLELVDTENRDKHLPLDEYQREQITALAYRNAKVTFAQIRIELGLQDDLHVRFNLCSYSEKNPEYNKKLECECKNGRLQFNQKHRVGIRDMTTRKDKVLDEEVKNIFNSKKLWPNSKKIHVYYSDIRKRLNLSGDFRFVALLKGYTESAGELGSQAKYLKQFEEDVFIELKGYHKIKKVIEDKAGKEEWLQISSDTAKLDAIAEALTYCKSDETRTEYLRQRNIDPDVIDAVLTINMRQLANFSKEALGNLLRYMDKGKLFNEAKEECGYGRIDHKKQAVLEPYSGFFEDNPVVARAISQTRKLINALVREYTNQYPIDQIHIEIATELASSQERKDEIARGQKRYKEEKEAAEERCKQYNLDPEEGQNLLMFRLAEQQNNACPYTGKAITFYQTGAANEVFMKDCEIDHVVPMSRSFDDSLNNKVICTQQANQNKRDRIPFEWFEDSYGKDSSQWMEFEKRVTKLYGIPYPKRKNLLRKSWTDKDKEKFLSRNLNDTRYAARHIADYLRTYFDFSKSKRDDIQQVNRIQLRSGGITAFLRHMRGLNKNRGDNDLHHAIDALVVACSTYGHVYLVSNLAQQLERKGKNWYKHFGRDSFKPWYNIREDIQGAADNVFVSRMPRHTVTAAAHKETVISKQLANKNRTIEINRGYAEMGDMVRADVFVDKAGRNYVVPIYCVDVFSKKPLPDKYLHKDDAPYEQWPSVKEGGLKFKFSIFKDDLISIDGTMYYVDYVRATRSKISVKKTDGSLIDEAKGERTKEVAYRNAELKKYSVDMLGGYKQVKQEKRLGNRFENTL

SEQ ID NO: 9688 - protein, 1062 aa, unidentified
  REGION 1..1062: note = Description of Unknown: Cas Enzyme sequence
MNGKAETPPVVLGLDLGSASLGWALIALDNQHDPTGLIRAGVRIFQPGVEGSTLEIEQGKDKSRAVDRRAARLTRRQLRRRAARQRDLFKLLQQHGFLPPADENANANSSEQRHAIPNKLDQELAQHWRANAGATGNVDQLLPYILRKSALDRKLERFELGRAFYHLIQRRGFKSNRREGKKGKDKQEELGKVKTGISELEKEMKASGGRTLGEYLAGLDPHTQRVRRRWTARKMFEDEFEAIWTVQQPHAPELLTAELKTEIARLLFYQRPIASQAHLIGFCELEPGQRRAPWATLEAQQFRALQKVNDLAIVLPGFLQAQPLSPEERQRVYWGLQNEGDKTFPALRKLLTTKSQFNLERGGEKSLRGNRTNAVMRSIFGNRWEEFSAEQRTKAVDEWRGTEDPEILTKRGVEQWGLEEVTARKWADTEPEDGYCNLSLKAIRRLLPRMEAGESFKTVERSIYGEPFSGQEPKDFLPTVHEALPTLRNPAVERAVTEMRKMVNAIVREYGKPYEIRIEMARELRKPRKEREAVTKSNRSREREREQAKARILKECGFQNPSRADIEKALLFEECGAVCPYTGRTIEFTSLFGDSQFDVEHIIPLSRYPDDSFLNKTLCYHEENRAIKRGRTPWEAYGSDEERWNAMLGRVEKFKNPAKLLRFKLRTQEELGEFTQRQMNDTRYTTKLAADLLGTLYGGRDETLADGSKRRAIFASTGQVTATLRRVWNLESILREAAPSANGESRGKPRTDHRHHAIDAITIALTSEKTIKLMSTVAAQAPEWQLDKRVFRRIESPWPDFVDSIRPHIEQMLVSHRPEHKMSGALHKETIYGPPHRFDEKSVVHLRRRLSGIPAGQIKDIVDDVVREAVMQKLAEHGGDTKKFNEDDLSTLPYLPAKDGQRVSVKRVRVREVKNREGLIQLRNGFVEPASIHHFELFVRRENRRDIWCHTAVTLYEAFQRQRRGEVIVSHMLADEPDAEFLFSLMKGDTIEIDYHGGREIFRVKKFYSAGPIWLTHENNAQKDEEQKRDKTTWSKSPNELKNLHPRKVVVDLLGRVHPAND

SEQ ID NO: 9689 - protein, 1011 aa, unidentified
  REGION 1..1011: note = Description of Unknown: Cas Enzyme sequence
MSNFTLGLDMGTNSIGWAMIGHDNEEQPSGLIACGTRIFQEAVDAKTKTPKNKARRDARSARKLVSRRKMRRDNLLNLLLQNNLLPKDASYREKLFTDNKLFDPYQLRKRALDEKLTPYELGRVLYHLCQRRGFQSNRKAKSKEDGDVITAITSLRQKMIDFKSRTLGEYLASQPVKRNRYTDRAMYQEEFELIWQSQEKYHPDMLNPAFKVTIHNTIFFQRPLKVQKNLVGKCTFEPSRKRAARALLETQRFRMLQDLNHLAIKNPITREYRPLATDEREKLLNLLEKQKTLGWSAARKKLKLHEGEVFNLEEGKKKELIGNRTDYALRSILKENWDNLPPEKQNALITDMLTIDSEQGFLNRMTSHWGFDAETAEKLAKTELEQGYARLSRKAICKILPFLEEGLNYFVACFAAYDSCPPDKKQQIINFVKAGMEFDKACKTVGYNYSNITQQTFTDKLGEPPYLRNPVVQKALYETRKVINTIIREYEKPATVRIEMARDMKLTKRQKDELQKKQNKNKQANEQAKKILQDEFGIQNPTREDIQKYNMWLECKMICPYTGAEISRTMLFSSKVEVEHILPYSRTLDDSYMNKTLCIAEENRIKHNKTPYEAYHANTERYEGILQHVKILPWPKRKKFEQKEIDTDKFVERQLNDTRYICTEVKKYLQSLGVSVEISKGEATAALRHRWNLNRILARDGIIEKNREDHRHHAVDAVVIALTSRALFQKLSRLSAQSGTALSERGFYLDKPWPSFYEDVDEKVKNIIVSHAPSRKISGALHEETAYGYSEYEECFVYRKPLSNLTENEIEKIRDAKIKQLVQERLARFDGNLKKAFGDENNPLLHIDGKTPIKSVRLKVNLNKNITYPIVDTKGSAYKYFKYGNNHHVEIIENITTGQRKGIFVTALEAAKRARRDKMAILQKDQVPEWKFIMSLCINDIVETKDDEKNKLYRVQKISSGKQMEITLKHLNDSMPDYNDNTWAMKSATATKAIMRKVAVDAIGNIYTCND

SEQ ID NO: 9690 - protein, 1103 aa, unidentified
  REGION 1..1103: note = Description of Unknown: Cas Enzyme sequence
MSKTLGLDLGTNSIGWALIEDKEAIIDKGVRIFPVGVKEDDFLKLGKEVSKNVARRIARGIRRRHHRYKIRREKLISLLRDNSMLPGEGEFFSTRELYELRVKGLDAKLSLTEFGKILLMLNKRRGFKSNRKTLASEEAKKEEGVVKQGILELQNKIEENKCRTLGEYFVLLFKQTDKVSDWHNEDQPIERIRDRFVGREMYIKEFDMLWEKQASFYPTILTPELRTKIRDETIYYQRNLKSQKGLVGKCRFEPSKRCAPKSSQLFQEFRIWQQLSVARFTNGDRIGQSLTPEEKQRACAVLMKKRKVTQAELKKLLDIPKSVYFNDVFGAKGMDGNSTTVWLMDALGEETVNALTEAQMFELWHILRFTDNTEKLKTIVRRKIEQKILPPLTDQAIEQFAEENLEDGYCNFSTKALNKILPHLRAGFAPFDNPASKGEDRDNAFRKAGYDPTRKIVNGKAEELTTLLPLRPNELRNPIVQQMLSETFRVVNAIVAKHGKPDMIRVELARELKKPKTKREEARNSQINKRKQREEFAEFLSKQLRKKIEPNYPEVKKYELWLEMGCEDPKLDDLNSFLRNGRVTDAKKYQLWKECGRISPYSGKTISLTKLFSPEIQIEHVLPYSKTMNNEFGNLCLCEASINKDKGDRLPYEYFASKGERALEEFKSRVERINSKGKQWRFLAKEIPEDFLNSQMNNTSYAARELASRLEMLLPQVRDGDTMKQRVQIVNGQATGTLRRHWGLNAILSKGDIDTKNRGDHRHHAIDAIVIACTTPLLMHQLARYSKFDNWSKLTNDKISKPWRSFLGDASEAINSIIISYRNQKRLVGRKPNRTTAKNLEKHPEGFIKQSTVTIRGPLHEETIYGSIELNGEETYVTRWPLQKFTDVKQLQKIVDPKVREVLLKRVKRYKGDIKKAFAENADDPVLMYSKNGANVHIKKVRVINPAESLIEVRKDAFVESGNNYAIAIYQDKETGKREFETIPFWYAAKRALNREPIIPREKNGKPLLFTLQQLDTVVMYDEHPDEIDWDNTDYVRRNLFRVIKFDVNGIIVLGYLYAAKLDTKKDFKLNPPLVINKVPNSLKCIRVEIDLLGNIVKKEGVA

SEQ ID NO: 9691 - protein, 1115 aa, unidentified
  REGION 1..1115: note = Description of Unknown: Cas Enzyme sequence
MSVKATDSLTIGLDIGIASVGWAVLAPNRIVALGVRAFDKAETAKEGDSLNLVRRMARLMRHRLRRRAWRLKKLARLLKRNGLVDDTQVFQPIHPFSRSLWRLRVEALDRQLSAEEWARVVYHVCKHRGFHWTSRDEKQAEADTKGESGKVKKGLAGTAKLMHEKHYRTAAEMVLAEFPAAQRNKQGDYGKALARTLLGDELARLFERQREFENSHAGQELEAAILGSGDCKSGLFWAQKPALAGNDLLKMLGKCTFEKAEYRAPKASFTAERHVWLTRLNNLRIVVDGSIRPLNEQERRIALPLPYQQAGDFTYKQLGSALVKVGCVEPDKFKFAGLSYPSEKQKAEDKAKDPEKAALVKLPAWQEIRGTLKKAGLETEWQGMAGAAMDGRPELLDQIAWVLSVFKEDEQVSAELRKLRLPGADKMIDALLTIRFDKFHALSLKALRQIVPQMEAGLRYDEACERAGYHHSQLYKVGEGEEKYLPPFYSGRDKTGRMVFSEDMDIPRNPVVLRALNQARKVVNALVRQYGHPHAVHIEMARDLSKPIDERRRIEKDQAEYRDQNEKDRARFAEHFGQMPKGLEFEKWRLYREQQGKCAYSVEAIEIDRLLEPGYVEVDHALPYSRSFDDSKNNKVLVHAKENRDKGNRTPYEYLGGAENSPRWRQFVAFVESTKAYRLAKRSRLLRKDFSNKEAEEFRERNLNDTRYICRFFKNYVERYLKLAEGSETKRCVVVSGQLTSLLRARWGLIKVRSDSDRHHALDATVVAACSHSMVQRLSNYARRKELDQVREGFVDVETGEIVNSAMYQQLREHFPDPWPHFRDELQARLKIDDPNQLRAETERLGSYPAEALHALRPLFVSRAPQRRNGGAAHKETIYGQPERLKAQGGVTQRIPLAGVTLKNIDTLIDPHRNEKLYAAIRARLEQHGGKGDKAFPPDNPLRKPDRDGNPTGPVVRTVTQVIDKLSGIPVRGGIAKNETMLRVDVFVKSGKFYLVPVYVHHQVAKALPNCAIVAHKEESEWPVIDDGFEFCFSIYPNDLVRVTQKQGIFVGYYAGCDRGSGNINLWAHDRNQQVGSDGLIRGIGVKTALAIEKFHVDVLGNRYPAPPAKRRGLA

SEQ ID NO: 9692 - protein, 1111 aa, unidentified
  REGION 1..1111: note = Description of Unknown: Cas Enzyme sequence
MAVKAVDAITIGLDIGIASVGWAVLAPNRIVALGVRAFDKAETAKEGDSLNLVRRSARLTRRRLHRRAWRLTKLARLLRRQGVIDDTRLFQPQHPFSHSLWRLRVEGLDRRLDAEEWARVIYHLCKHRGFHWISRAEEKKAEADTKGEGGKVKQGLAATKKLMQEKGYRSAAEMVLMEFPEAQRNKQGDYGKALSRISLGEELAALFRRQRELGNAHADTAFEAAILGNGDRKSGLFWAQKPALAGKDLLKMLGHCTFENAEYRAPKACYTAERQVWLTILNNLRIAVDGTTRPLTEQERRIALPLPYGQAGDLTYKQLRAALVKAGTAIEGFRFARFSYAQQPDGKTKDPETAVLVKLPAWQELRLTLKKAGLETEWQGMAGAAVDGRPELLDQIAWVLSVFKEDEETATELQKLSLPGAQKMIDALLDLRFDKFHALSLKALRKIVPHMEEGLRYDEACERAGYHHSQLHRAGEGNHKYLPPFYSGRDKTGRMVFSEDMDIPRNPVVLRSLNQARKVMNALVDRYGAPHAVHIEMARDLSNPLDERRKIEKDQAEYRDQNEKDKARFAEHFSRMPERNEFEKWRLYREQQCKCAYSIEPIDLGRLLEPGYVEIDHALPYSRSFDNSKNNKVLVHAAENRNKGNQTPYEYLRGAEDSPRWRMFVAFVESNKAYRLAKRSRLLRKNFGENEAKEFRERNLNDTRYICKFFKNYVERYLQLAEDSEAKRCVVLSGQMTSFLRARWGLIKVREDSDRHHALDAAVVAACSHGMVKRLSDYARRKELVQVREGFVDVETGEIVNPAMFQQLRQHFPDPWSNFRHELEARLKIDDPAIMRTTIEQLGSYPPEALNALQPIFVSRAPQRRNGGAAHKDTVYGQPDRLKTQGGVTQKVPLASLTLKDLENLVDPHRNEKLYAAIRSRLEAHGGKGDKAFPAGDPLRKPDRNGNPTGPVVRTVTLVIDKLSGIPVRGGIAKNDSMLRVDVFTKDGKFHLVPVYVYHRVKGLPNRAIMALKNEEEWTIIDDSYAWRFSLHPNDLMRVTLAKETHLGYFAGCDRSTGAINLWAHDRSQCVGKDGLIRGIGIKTARAVDKFHVDVLGNIYPAPQEKRRGLA

SEQ ID NO: 9693 - protein, 1082 aa, unidentified
  REGION 1..1082: note = Description of Unknown: Cas Enzyme sequence
MTYRLGLDMGSNSIGWCAIELDKSGHPCGVLGTGVRILTPNDEAGRDPKSKASLAANRREARSARKRRDRFLKRQKRLMETLIEAGLMPTEPAERKDLEKLDPYWLRAQALDRRLTLFEIGRAIFHLNQRRGFTSNRIADASDNEASAMKAGIAALRTALAEENTRTLGEFLARRHQRDKHGNRQQAKPMPVRFRPRLDGAKALYDFYPYRELIESELEAIWVAQSAHNPELTDALLARLKRIIIEQRPLKSPPVGRCTLRPEEDIDHSLGFDIDRGERTPKSHPLFQRFRVLQDASQLRVTRPGERERKLSLAEYRAVCATMMKSGGSSVDFSKLRKAVKLPDDARFNYELAGRKGFPPDQTAVKLSHKNAFGKVWRNLPRERQVEVVERLLATEDPVELQAWLMSAAGLGHEAAEFASSVRLPQGHGQFGRSILEDLVEVMERGAQSMDPETGEVFTPPLTYNEAVAVLGLHHSKLSDRATHKRLPYYGDALARHVIAKKGAPRGSQDAIGRVPNPTVHIGLNQLRAVVNALIEAYGPPTEIVMELARELKLSRQRKEEIQRQNRANEKRNDIIRAELEALGFADTFGNRLLLRLYDELPPDERVCVYSGVPISKEMLFSGVIDIDHILPHSRTLDDSFANKVLCTRQANRSKGNRAPGEVWSGEDLQTIVERAERVFPRKAWRFQPDAMASFEEKGGFQARQLVDTQYMSRLARQYLELVCDQVWVTPGRMTAMLRAKWALNALLPDHNFTDAHHPKNRKDHRHHAIDAFVLACTTRGLLNKLAEESGRAESLDLDRLFPYDSFPTPFEDYRAVLDRALDAIIVSHKPDHGLAPGAQGNVAVTSGKLLEETAFGLVDEEIDGKHYNLVTRKPVAGLKPAEIERVRDAGLREQLQELSYQAKQNGTKLEEALSAFEKRTGIHRVRVLKTEKSVRVVEHGNGYRKAYSPGDNHRIEIFELPDGSWAGEGVTVFDANQPGYKPQWSRENPDAHLIMRVHNGDSIEADFGDGNLVYRVYRLEASNNRIRLAPHNAAGAIDQRHNDPDDPLRWVFGSYSKLKQARARLVRVDVIGRVAPVRPAR

SEQ ID NO: 9694 - protein, 1433 aa, unidentified
  REGION 1..1433: note = Description of Unknown: Cas Enzyme sequence
MNKIFALDLGTNSIGWALRNPDLTANQIEKFGVLTFNKGVGVGKTGEYSYAAERTKKRSIRRLYQARKYRLWATLQHLIDEGYCPLSIVNLNKWRLYDKEEARKNNNGGRVYPVDDFAFDAWIKLDFNSDGKPDYSSPYQLRKELAEVKLDLTKEEDRFKLGRALYHIAQRRGFKSSRKGADDVKEKAENENQELEFQYSERKKSNKLKELFSDFDPAIPIGVFLANKENEGNRIRLDITQYLVRQNYKDEIKYIFQFQGLSLTDSIYHKLVETGKNKNDGSIFYKRPLRSQKGLIGKCTLEPSKYRAPVSHPSFEIFRAWSFLNNIKYKAADDNEGQWKQLRLELKTKIYNKLFFRKKAYFPFSDIADLLEKEGKKLHLNYKPKTTVTGCPVSARLKDIFGDGYLNIKIPKTPSTKSKKDYYDIEDIWHVLFSYEDQEYIVEFAENKLNLHAEQTKQFVTTWNATPVGYAMLSLNAINKINIFLQKGLIYTEAVLLANIPEIIGKDLWAKNEALLIGEIGKVIDENREQKTLLTIVNSLVSKHKNLENNEKFGYKDNNYKLDKSDFDTIEETINEQFGEKRWGEKSETERNKISTAIKDCYQAYFITTGLERKDIHNERHFAVKSSNTIYYKADSGYYRLPKLIDTLGEFLQLNFNVSNDKLNKIYHPSEINIYPPAKADKDGVLKMGSPKTGSFKNPMAMRALHELRKLINYMIETNQIDSDTRIVVEVARELNDANKRWAIEAWQKQREAENVEFALAIEQLTHEEKGVLASSTSNDDIDKMRLWYEQNDEESVPPITEGKKDVKGMRWNENKRSSYKEIAAKKEMVDKYRLWREQNCQCFYTGRIINIADLFKENVIDFEHTIPRSQSFDNSLANLTVCYADYNRNVKKNQIPFNLNNYDKEYNGYSAILPRLEKWQEKVERIKQQIDFWVTKSKKAADKGWKDDAIQQRHLWQMELDYWRNKVDRFTMEEVTSGFKNSQKVDTQLISKYAFHYLKTYFEKVDVQKGSITADFRKIYSLQIADTKKDRSKHSHHAKDAAVLTLIPTAAKRDELLKTYYEHQERRQPFTAAPYKGFKREFVWGIDDSILINNITNDQALTPAKRIIRKRGKVQFIEGTQNPKIATGDCIRGQLHDETFFGAIKPAKRGEKGNIIRDEEGKMIQGDIRYVVRVPFLFKKDTNSPGFKTLDEIEKQIVDEGLKKQIRAQVEKAGGLKEAFEQGIYMLGKNGDKVNKIRHVRIFKSTTKPLEIKRHTYLSKHTYKQSYYANNASNSYFAIYAGANKKDCDFRNLFETSKIVATNIVTSKEDLFEKSIHTKKGKSPKELTLKCILESGKKIVFIKNRDEDVKSMPFEELPKRLYVFTNFESDGRLNFKYHLEARESKEITGDYKDSEVDFENPKPTLRFAYSKYDFLVEGYDFKIKIDGTIQWL

SEQ ID NO: 9695 - protein, 1076 aa, unidentified
  REGION 1..1076: note = Description of Unknown: Cas Enzyme sequence
MNGYRLGIDLGSTSLGWCALNLNNGEPVGILDMGVRIFDDGRDDKTKTPLAVERRDKRSQRRRRDRLLRRKRKLMEALVKFGLMPSMEVDRKKLEILDPYLLRVKALGHPLQPFEIGRAIFHLGQRRGFKSNRKDLAKSKESGALSEAIERTNAVLKQKQARTLAEYLVIHAGESTDGLINPMRFKSTAIGTKVAWDIYPSRQMVEEEFKTIWEKQKSLSTLLTDTAYLEIHHTIFDQGKLQTPERGKCWLTGDVRAYKALPSFQIFRALQDLNHLEIRRAYASEPGLTKEQKQKIRDLLLQGDITAKGELSFDKLRKSLKLSSTTLFNLESPARKAIKGDLTTKLLANEKCFGALWFQMSSSEKDGIAEKLLNLDDEDSENVFSNWVCEKYKVSLEKVQNIIDQAGKLEPGTGSISQKALYLIIPHLEEGMTFDKACTGAHTQTRLDGTEPSLPYYGKILYDSVLPAPKAQDPNEKAYGRINNPTVHIGLNQLRKLVNRLIEVYGKPEEIHIELARDLPLSAMEKNKLLKGQENNKKENDRIDEELKKAGCTPSFELRLKYRLWEELEPMGRLCPFSFPGKAISLSDALSDKTEVEHLIPFSVSYDDGRSNKVLCLREANRLKGSKTPYEAFGETDAWPEIYARASILPPQKSWRFEPDALARFKDEEGDMIARQLHDTQYLSRVAKRYLSAICPDNKIVSTRGRITATMRRAWGLNLRYLLHESAENIKSRDDHRHHAIDAFVTACVSRSLLKSLSDQAKRSNLHMQRLSEIVPPPFTDWERNKKDLVTFLRKLIVSHKPDHGNASFAIKNKSTTGMLHKDTAYGIVSHDKEKDIFILVTTMRIEDLKLPKPNKEQKNNKKTPIQPKSKYSFDEIRDLRVRSQIEELAETSADDKEFKQKVKDFAEIKNIQSIRVTEEVDGGKIVIVKDKLGKDYKAYRKGSNYCGDIIEVLHGKDKGKWLLYVTPTFDAHQPNFTPSWRNRNEHPTAKLKWRLFVNDMIAFERENKPEIARIQLWSQDLNYLFYVPHNISKLEKRIQINPKEFQKCHGRKISVDILGHVRDPLMTIQSHAANR

SEQ ID NO: 9696 - protein, 1402 aa, unidentified
  REGION 1..1402: note = Description of Unknown: Cas Enzyme sequence
QTANRTSYRGVRRLYQRNLLRRERLHRVLNVLNFLPKHYKESIDFEKHFGQFKNSTEVKLNYSRNDEGKHEFVFMDSFNEMIAEFKAAGKETKIPLDWTIYYLRKKALTQKISIEELSWVLLNFNQKRGYYQLRGEENEISETNKKEYYALKVKEVKATEDTNSKGTWYHVILENDWIYKRQSKESLDNWVGKIKEFIVTTQLEKDRTEKKDKEGNVRRSFSAVDSEKDWIAIKKKTEQDIKESSKTVGQYIYETLLKNPSQKIRGKLVKTIERNFYKEELQQILKAQIKFHPELRDRELYNACLNELYPRNEAHQNNIKDNGFDYLFIDDIIFYQRPLKSKKSTISDCPYEERVFIKDGVRNIQKIKCIAKSNPLFQEFRLWQFLKNLKIYQKENRDNDEFDKDITDDIFTSDNDWVLLYEFLNDKKEVEQSHILDYLADNKKIAKSLKKIYNYRWNYVEDKKYPANETRASFLSRLKKIKNYSEKYFLSKEKEIALWHIIYSVKDKKEYEAAIKTFALKNDLDKDSFVSAFIKYPPFKNDYGAYSEKAIKKILPLMRMGKYWNETEISTDVKNRINNIIERLESIDYDEEVFKKDEKDRLKTIVDDEIPKQFIKSFINYKDKNPLTSLNTYQACYAIYERHSESGIIKSWKSPNDIDTYLNKFKQHSLRNPIVEQVVTETLRVVRDIWKHYGKGEANFFNEIHVELGREMKNSSDKRKVMSSRIIENENTNTRIKVLLEELKNDSIDDDIRPYSPSHQEILKIYEEGVFQNPEVSFSKMKEDDINKVRKSNSPTKSEINKYKLWLEQGYISPYTGKIIPLSKLFSIDYQIEHIIPQSRYFDNSMTNKVICESEVNQLKDNKTAYEFLKGEGGRIVTLSNGNTVTLFDADKYEKHCKQYFKKNRTKLNNLLSEDIPEGFINRQLNDSRYISKVVKTLLSNVVREEGEKEATTKRLVPVTGSITSRLKQDWGLNDKWNELIAPRFMRLNELTNSKDFGEWDSKINAFRTKVPDEISRGFSKKRIDHRHHALDALIVACCTKKHTNYLSSLNSERENYGLKDSLLIKNKQGDFTKYFQLPWLNFTSEAKENLEKTVVSFKQNLRIINKTNNKTWQWEPQVDGTFKKILIKQKDATTSNNKTNWAIRKPMHKETVSGAVKIKRIKKGFSNITSYLDRSELIVDKPVKRKVKSLLTLFDKDLKKIKKHLKENPLIIEGKEITKTKVFEWTEKATATRISLTEKLTRKQLESITDGGIIAILESHLQNYIDDEQKERFDLAFNSDGIDALNKNIKVLNNGKNHYPIYKVRLYEEGSKFSVGEIGAKATKFVEAAKGTNLFFAIYYDEKKKKRVFATIPLNEVVEHQKQVANLSKAERTPIQPDKTKGNFLFSLSPNDLVYVPTDEE

SEQ ID NO: 9697 - protein, 1136 aa, unidentified
  REGION 1..1136: note = Description of Unknown: Cas Enzyme sequence
MSKILGLDLGTNSIGWALIENNTILGMGSRIFPEGVVNLGEGEGRETSKNASRTEARGVRRQIFRRRLRKRYLLKELAKYNLCPISPALIKDWNGTEIFNNNELQEWLKLNPYELRAKAISEKITLLELGRIFYHMIQRRGFLSNSRSAGSEVKESSTIFKGDAKIGKIGISETLQSIKKNKTLGSYLQSIFPKENEPFSGEQERIRNRYTTRQMYIDEFDTIWEFQEQYHSALDSNLKTILGGRKKDGYKEDGVLFHQRPLRSQKHLVGYCSFEPKKTKCPISAIPFELFRIHQWLNTLSYDINGVKQKITIQEREKIVTLLLSKEKPSFKEIRKTIDKLDRHYQFNYKDDDKIVGTYTISNLSNKKFFGKQWFDFSDEEQENIWHVLSFFDDRDKLKEYAIKNWGFDEEKAAKISKFNLKDGYSNLSRKAINIILPFLQKGFMYDIAVGLAGVKNVLGNSYKEHEQFVLDNVPEIVRSSLKGGYIEPLKNTMRNEFNCTDKQLEKLYHHSSAIETEKILERLPVNIHADREIQKIKNPVVITALFEIRKLVNEIIDTYGKPHEIKVELARDLKASKSNRLDSRKKQKELEKQNDRVKVELEKLNQRINHINILKYKLWEECNHTCPFTGQTITISQLFTGEVQIEHIFPWSRSLNDSFNNKTLCFADENRAKGNKTPYEFYGTQGDKKWEAIKLQALSCFKTKTNYPNCYNKFKHFVKKKHDEDFISRQLNDTRYISKEAKNYLSKICNNVLVAPGQMTATLRHHWGLNSILNKDDNTKTRDDHRHHAVDALVMACSTRSHLQELSKRNRYHKNYELKDFPDPWLNFRSDADKAVEQILVSHKKQKSLLTVRNHKTKKNGVVYKNIGVAARGQLHLDTVYGKRKDVFTKELNYHVRKPLSSLTAAEIPKIVDIEIKKLFYKSIEELGLIINNKDRKPIVKTKEEKKLFEQLLNKSFFLPNKNGNPVPIKKIRIKKNFSNAEPLKENMNQWVDLGKNHHVLIYKDFDDILKEEVVTFWTVVERKRQGEEVFKLPEDGKEVVTILQINDMFILGLNEDEIDWENLNYNLLKKHLFKVQALSSFFYEFRLSTDSTQNKDNKSKVFRRIQNFGEGKTGWFKFNPLKVKLNSMGVLKKL

SEQ ID NO: 9698 - protein, 1071 aa, unidentified
  REGION 1..1071: note = Description of Unknown: Cas Enzyme sequence
MKKILGLDLGTTSIGWALINEAENKNEKSEIIKLGVRVNPLSIDEKTNFDKGKPITTNTDRTLNRGARRNLQRFKLRRENLLEILLQNNIIEKETALTETGKNTTHETLELRAKSANQKIGLEELARILFSINKKRGYKSSRKAKNEEEGSLIDGMSIAKELYENNLTVGQYVYNLLNKGKKYIPDFYRSDLLSEFDEIWNFQKQFYLNVLDDELYDKLEGQGQQNSRKRFLAIKGIYTAENKGKRDAIKLQHYKWRTEALQKQLKIEEVAYVLVEINNNLNKSSGYLGAISDRSKELYFKEETVGQNLYRQIRENRHTSLRNQVFYRQDYLDEFEKIWETQATFHQKLTAKLKEEIRDVIIFYQRKLKSQKHLISNCQFENNHKAVPKSSFLFQEFKIWQNLNNLEFKNTKTKKIRVLADDLRISLFEELNLRGNLSEKEVLKFCNLNSTYKSNYTKGLEGNNTNKALYNIYQHIATEEGYGFDWEKKRAKEINEELKSIFPQLNINASVLNFDTNVEGELFDKQTSYQLWHLLYSAEDDTKILEEDREVYGNSNVALKKKLHIKYGFKPVYAAMIANISLQDDYGSLSSRAIRKIIPFLQEGSEYSKACALAGYNHSNSLTKEELEKRVLKPRLEILEKNSLRNPVVEKILNQMVNVINQIVDEYGKPDEIRIELARDLKKSAKEREETTKFINSATKVNDEIKSSIQKEFGFTATKNDLVKYKLWLELKSNGHKSLFTNEYIPKEKLFSKDIDIEHIIPKAILFDDSFSNKTLAYRKVNLKKADRTAIDFIEQDYSNEDVNNYKLRVESLFKNGDISKGKFKKLLMSLANLPTDFIARDLVNTQYISKKAKTMLFEVFENVVSTSGRITDKLRGDWDLINVMKELNLPKYKALGLTEIQERKDNKIIEIIKDWTKRNDHRHHAMDALAVAFTTHNHINYINNLNASRNKESELFGVRNTITKVYENTNGSKKRKFIPPVESFRVEAKKHIESILISFKNKNKVVTKNINKSKLKGKDNFNIKPQLTPRGQLHKETVYGISKREMDKPIKLNKNISVEKLKMIVNPSLN

SEQ ID NO: 9699 - protein, 1084 aa, unidentified
  REGION 1..1084: note = Description of Unknown: Cas Enzyme sequence
MHYRLGLDLGTNSIGWWAVELDKAGIPCGSLGGGSRIFSDGRNPKDQTSLAVQRRLPRGMRRRRDRYLDRRSGLMDLLVAFELMPDDETGRKALEILDPYALRAAALDRPLAPHELGRALFHLNQRRGFKSNRKTDGGDDDKETGVVKERISELRKLMEKSSARTLGEYFHKRHLKGRMVRARPEAGFYPDRQMYEDEFAAIHEFQSPHQTLSAEQWEALRDIIFFQRPLKPVDPGWCLLEDGERRAHLALPLTQEFRMVQESNNLRIQSPGEPARHLTMAERDKVLNHLRTQKELKLERMLKLLKLPSGSTVNLFDDHRTTIKGDETAARLTHKDIFGRAWLDFPVERRTEVVRKLIETEKPEEIERIATAEWGLDEAAAKKLATKAMPEGYARLSEKAIIRLLPIMEEQGLNYAEAVAEVPEYGHHSDFRPDEARDYLPYYGEVLARHCVGADPSQPKEDEVAHYGRLANPTVHIGLNQIRRILNRLIEVHGKPEEIVVELARDLKMNKEQKDEVRKKNSLNETAKRAREDKIRAAGVAPSPHLLRKLRLWEEQKVGTVHLCPFTGDAISFEMAISEATEIEHILPFSKTLDDSMANKVLCLRDANRAKHDRSPHEAFQNDPTIGGRKYIYDDILFRADKLESNKRWRFHADAMERYENDERNFLDRQLNETKYLSRIARSYISNLYNEKAEGRLRVRAIPGKLTALLRGKWGLSALLPGHNLAGADGAPPRKNRDDHRHHALDAFVIAMTDQRLLKMISDLNADADRRRLIDAIPEPWEEFDREVLRAQLARLTIAHKTDHGSPGKKGMTTGALHNDTAYGIVGPGKKGNTQVVYRAPLSKFATPKDLDNGLRAIRDSALRDVLVAAWETFKLAPPDATDPDDPDSRKKPKNTAVAFTEMVAAKGIKLNGRTQKVRRVRILDELGVITINDRKTGKPYKAYKPDGNEFAEVWALPDGSWKTVIVRRFDANQPDFNPANLRPHPAAKKLMRLHMDDMGAIGEGTERRILRVCKMSTESGKEYVYLADHNEGNVDARVRAKELKYLKESCEGLRKKNFRKIGVDEIGRVTDPSPRATPASDIA

SEQ ID NO: 9700 - protein, 990 aa, unidentified
  REGION 1..990: note = Description of Unknown: Cas Enzyme sequence
SLAVTRREARAMRRRRDRLLKRKARMMRTLIEHGFFPADETARKALETLSPYSLRAKGLDEALKPEEFARALFHINQRRGFKSNRKTDKKGNDSGALKTAIKQLQAAIDATGAEGKPRTVGELLHRRDVAGQTVRARYRQERVQKEDGKTRIDKSYDLYIDRAMIEAEFDALWTKQSTLNPHQFNEKARADLKDCLLFQRRLKPVKPGRCTLLPDEERAPLALPSQQRFRIYQEVNHLYVLRQGLKEQTLTLEQRDSLVKALERNGKRSFIQIKKLLGLGGAVQFNFEDPKRQELKGNITSAILSKKDHFGDAWFAFSPEQQDAIVMQLVSEENETKLVRWLEETTGVDEAHAEAIANAALPEGYGSLSAKALTRILPELLRNVVTYDKAVQAAGFEHHNRLNAFGEVPGRTFDTCIERIDPKTGQIQRLHAFKELPYYGEFLQRHVAFAKEKPRNEEERFGKIANPTVHIGLNQVRVVVNALIKRYGHPSEVIVEVARDLKQNQEQRKEDSERQAKNQRRNERLRADAAAILQTAPQRVRHADVQKLILWEELSFDPADRRCPYSGVQISAQMVLSDQVEIEHILPFSKTLDDSLNNKTVAMRQTNRVKGNRTPWEARADFEAQGWPIAAMLDRAELMPKNKRYRFGEEGYQKWLKEDKDFLARALNDTRYLSRVAREYLSLICPQATRVVPGQMTAMLRAKFGLNDILGLDGEKNRNDHRHHAVDACVIAVTDQGLLQRFAQASASTRERQLNRLVEDMPLPWPNYRDHVARAVHHIWVSHKPDHGHEGGMHNDTAYALLGGGMVSVRKTVDGVRQKETAALKVIEFTGSTATARHGLLPDGSPRPYKGYKGDSNYCIEIVRNEKGKWEGEVISTFEAYQLVREHGLARLRHPSLSMSGRPLVMRLINDDFIKLEIDGHTELMRVASMNAAGRLSLAPHNEANVDARNRDPEGTWRYTYKQAGSLQKAKARKVSVSPSGELRDPGFKE

SEQ ID NO: 9701 - protein, 1036 aa, unidentified
  REGION 1..1036: note = Description of Unknown: Cas Enzyme sequence
VRIFPEARDPEGTPLNQQRRQKRMMRRQLRRRRMRRKTLNEALRDAGFLPAYGSADWPIVMGNDPYELRSRGLDEKLNAYEFGRAIYHLAQRRHFKGRDLEEGDLAEVETEEAGKAKKEKVDEKDKDKADEQKSKAASETTHKTLHTNGTSLGQWLAQRGAHERKRGEHALRIDVEEEFERLWTAQSHHHSSLKEKSLKAKIMDTIFAQRPVFWRKNTLGKCRFMPGEPLCPKGSWLSQQRRMLEKLNNLAIAGGNARPLDDEERGAILTGLQQQASMSWAGVRNALKPLYKKRGEPGSEKSLKFNLEEGGEKKLLGNALEAKLANIFAEDWSSHPNQTAIRNGVHERLWAADYGETPDEKCVIILSETERETRREKAAASFIADFGITADQAAQLRDLRLPTGWEPYSISALNEFLPHLEAGVRFGALGNSPEWENWRHETFPNREQPTGEILDKLPSPAIKEERDRLSTLRNPTVVRTQNELRKVVNNLIDLYGKPDRIRVEVGRDVGKSKREREEIKSGIRKAEEHRTKAIKDLVSKGIPNPSNNDIEKWLLWKECQEKCPYTGDQIGFDELFREGRYEVEHIWPRSRTFDDSRRNKTLCRKDTNIEKGNKTPFEAFGHDEDRWSSIQTRLENATASKGVTGMSPGKIKRFLARQMPDDFAARQLNDTRYAAKQILAQLKRLWPDLGPEAPVKVDAVTGQVTAQLRKLWTLNNILADSGEKTRADHRHHAVDALTVACTHPGMTSKLSRYWQLRDDPRAQKPTLTPPWDTIRADAEKAVSEIIVSHRVRKKISGPLHQEMPLGYAGYDITKGGIELGVYTKRIPVEKLGLETLKISSPQEISRSAKFVVQDKAVRASLVAHLSSAGVAAAKAYPPYPKLGINGPEIRKVRVLTTQQKSLMVPVANGFTDPANNHHVAVYRKPNGDVDYNVVSLYCAAKRLTKRQPVVVRDRGDGSEFVMSLSPGDAIDIPKGDKKGIWIVQGAWASGQVVLVPQYDARPSTQGEASRMGVDGTRQEFYPKISGLFKRNARKIS

SEQ ID NO: 9702 - protein, 1363 aa, unidentified
  REGION 1..1363: note = Description of Unknown: Cas Enzyme sequence
MKYKCILGLDIGTNSLGWSLIKEYEDSSIEIMKNGVHIFPIGTIVDQKSNKEKTKNEQRRVYRGASRMRFRFKLRRKNLKSALESLQMYPDYSIYQKAKGKGQSFELYKLRADAINSNLKVPLTEIGRIFLLLNKYRGFKSNAKKLQKSDTETGEVKKGYESLQKLINNSRSETIGEYFFKMHELGKEWYDDNKWHNPNEPIDERAYNEDSGEFILFNSNGIRRHYGRYTLRDMYLHEFDQIWKAQKNHYPEILTGSKKEYEELLLLPYVERIKALKEFRKTNYWLIRDYCIYFQRPLKSQKKYVSNCQFERGEYDVIKNEILEDGIKKIKEKKVWKKKAKKASPKSNPYYQEFKIWQKIHQIHYSSIEEDVFQNPLKQEWLPVLTEYLMTNFELYLNKTPKIEKENKIWIGKILQANELIQNSDNYTFYIDQSDEDIVHEEKNENRINGNLTYATFFEALGEETFNRLKNKISSRKEFKNKDEVVEVKESKLLELWHHLYIAKDGLFNEDDWLKCILTEKSKWNLTSEQADALISKGLVGDYGSYSIKVLKAILPNMRKGLNEYDALKTTNKGYINEDNTIGEKVKLKEKISQLKYQELRNPVVERSLSKTIKLTNAILEKFKDEIDRGTFEIRIESTRQLRKPRQERENERRKNADKDRLREQYAEQFEQKNNELGEQLFSKHIYKNDPIIRTYELWLEMNMNEGDELFGKEFNAFSKITKKEDKLKHKLWLECGRTCPYTGKIINLTDCFSSEVEIEHIIPLSRSLDDSFNNKTLTYSFINKEKGKMTPLEYIERKGGIALSEFKARIKYKTNSFSDSKKKQFLAEKISATFSNNQLVNTSYIAKYTRKKMQEVCKNVQFTNGSATSELRYVDWRLSNLLDKIRYKENFDIEMDEVNNNYFQLKKDFTSWCTKKYNSTDIKIEWRDIKNNKDVPEYFSQTKNDLLYWYSQIEDFNQFRNKDGKKDRNDHRHHAIDAFITACCSPRIIQKLSAYNATREEQHSFYREKIDPTFSYNDLRDNISAILVSHSEKQTLIKKRINKIKAKETTKTQITYAPQGKLHEESFYGKRNSATVRRVELFDDQRQEKNLFESSDNLHYKIRGEIKWNYIEDNELYKITKRRLDESGKKAFTKEQMENTPFFRVSPKTPEIFKSRKKQKPLPIVKSVRKRFNTDRTLINLPAKDSEGIIINQNRYAENESNYIIVFYKNGLKKFAKPLTFFSSVQNKRNGKPLLADEVEYKGITYGIDQNLPWLKNGDIVLLSDKANDVDFNDNIYVKEHLFKVKGISSLITPNEKYGNYEYGRISLLKINISKADNYPNKKDIKEAIKTNAFTISHDKFNAVKVRLNILGNIIATGKDCF

SEQ ID NO: 9703 - protein, 1026 aa, unidentified
  REGION 1..1026: note = Description of Unknown: Cas Enzyme sequence
DLGTNSIGWAALELNAKGAVTRLLDMGVCIFPDGREPQQQGRVGDSLAVTRRLARSMRRNRNRGKNRKARLMGALVVAGLMPGEAAARKALEALNPYELRARAVGEPLSAPELGRALFHLGLRRGFKSNRKTDGGEESGKQAERIAHLREALSGHTLGQYLWAKLGRGEPLRFREGAELFPERAMYEVEFDAIRAQQKPHHPATPAQWEEIRECVFFQHPLRPVERGRCEFFPDQDRAHKDLPIAQTFRILQELNNLRWIDAERREHPLDPEQRDHILAKLHAQQSYKFTAMRKAKGTGGAPLFPDAIAFNLEDERRKDLSGHKTDIDMAKPQYLGDLWATMPEKAQNDLFELLHEAEDDADIIDEAAAFGLTPEQAARVAAYPLTSQTAKVSRKFMERICPVLYDTGLVYAEAVAQLTDDEGKPLHHSHRPPGELLESLPYYGAVLRGATMGEDPEADPEGAPEKRFGRIANPTVHVALNQLRRLVNALIEGLGPPAEIHVEVGRELKQSREDRDATTKRIGANQRENDRIAKFCAEHGVARASARDIRKVKLWEELGKEQLDRRCIYSGRIISAAMLFNGEAEIEHILPFSRTLDNGQSNMTLSLRWANQLKGNATPFEAFGDDRRADKKIVWRDVLARVEALPKHKRWRFGPGAMEKFETDGGFIQRQLTDNAYIARTARGYLGAVCPGIVVTPGMLTGMLRGKWGWNGLLSDHNKKTREDHRHHAVDALVVALTTRSLLQRINTLRGRDGRVHIEAPAPEIEAETVATALARITVAFKPDHGLAGRMFHEWSYSLVAQRDPDLPEHNLVTRKPLNKLSKKQVSTIRDVHWRRKILEFIGAPENQGRKLPEVLSNFSNLFGIQRARFLVKQSGYHPAPADDPQPQKVRLVDSYAYCDVWEVPVGKPGKWKKDARKWVGCFRSYVDTANPPSDANAWKPHPAARKVARLFKNDLIEIIKDGRPEVVRVIGLERTSNRIALRPVRLAVQSKADFNSRFEPLRKMRMRKLHVTPDGRIAPRGRRDP

SEQ ID NO: 9704 - protein, 1080 aa, unidentified
  REGION 1..1080: note = Description of Unknown: Cas Enzyme sequence
MSASKNPASIEIAFDIGHSSIGWSVLGKNTNVSLPEILGCGTVIFEKNGALANQRRRHRSQRRHIRATRLRIARMEKLLAHLGVIPADTLKSKHQAAAGHSAPWLLAARVLATGGNQTLSWPELWDVLRWYAHNRGYEEIGTEISEEENEVNDEKTKDAEKVANAKEAMRRFGKNTMAETICTWLGLDPLGEQQASTENYKSKNSAFERATVIREVRRILSSHLGKLSGLDETVISTLIDDAHALPVPAIKLPLRYKGSLLFGRLATRYHNRIIGACPISGQKIPGKNTAEFLRYRWAMQLANIRVSSTADAGLRPLSVEERKTIHAQMTAFGHLDVRELKTAVRSLPGINRDNLEQLLLHPDAKEAFTFDPAQKLISSHTHLSVLWSHLPPRLQKRHLGRWRHRKSTTLADLRKEAVDLVHDLSGFDQALDALLSSPLTKGKPSKRTPATREEILAAPLDIRRDLAKFSGRAPYARPLLAKAFDEVMAGLDPKGKDGCLEETEEVRQRRENRPLAEQTNNHLIRHRLLILGRLLRDLIADPAYGAKDPTRVERLTIEVNRDLRDMSGLTAQDIAEELGGRLANHKKVSAYLEDKLPPGTLITAGLIRKARIADDLGWRCPYTGIDFEPIDLVTQRVDKDHVIPHSQRQTDSLDALVVTFSAINKWKKARTAWQFIQDEGGKQVPDAPNLSLMTPARFKAFVEKLDTKGHPDDSRRKKRRKEFLLLERYEEKSGGFTHGQLTQTSQLARLAAQTVRASFSELAEPPAIVALPGQVTASVRKGWHLLGLLSSATPAVLETDGSVKTKTEIRDITHLHHALDACVIGLAAHLIPNRGDVWRLLAERRLKPEQQAQLAALGLFDFDHQGNFRLRELPEELKQQIRARLAERRVVQHIPADMNGLRVEENTRGIVKRENGRIFLQQQKRDADGKRVINRTSEPEGKVVGLPPLGQPGGKLAKLNGVRVIADNYGVAILNNSELPPKERFVVIPFANVWKRIEELRACNSGKSVKVWRNGQVITLAKGNRAGKWRICSIKNNASGMALDLSPVESVKPTWSNCLLKSLLRDGAQRLNPTLTGADK

SEQ ID NO: 9705 - protein, 1471 aa, unidentified
  REGION 1..1471: note = Description of Unknown: Cas Enzyme sequence
MEKILALDLGSSSIGATIRDTSDSQNQIKKTIVSTFNKGVGSEKNVEFSFAAERTKHRSLRRLYQARKYKLWETLELLKEHGYCPIQNESLNRWKHYDKTEALRGNGGRKYPIEDLLFNKWIKLDFDNDNKPDYISPYQLRLELITTKLDFTQEINKHKLGRALYHIAQHRGFKSSKKVVNTDADFNPDDLIGAEKKRSKAIGDLLDKHQVKTVGAAFAFEEKLGNRIRKELHKDVLRKQLQDEVKLIFDFQELKLSNVFGLDKNGSERKINQLELFWQRPLRSQKGTIGKCTLETTKYRCPISQPAFEEFRAWSFLNNIQYRLKDDRESNWETIPHDYRVELYNQKFFRVSKADFDFVEIVDWLKNKKGHDNWILNYKDKTNVSACPISARLKDIFGDDLTQVKVEHIANQNRKEKKAYYNIDDIWHVLFSCDDEDFIEDFAINSLHLNEINVKKFIGLWYSMPVGYSMLSLKAINNILYFLRKGLIYTEATLLAKVPEILGSNIWLKNEQLLIESISKVISRNREDKKILNITNNLIAQYKSTPYNEKQAFRDFEYQITDFEKRQISKICIETFGEKTWTEKSEEDKKDVEEKVAKEFQSFFSDNKRTFKKLPHLLDSMKAFLIDNFETLQCTNLNKKEEEKCNCDGCKKVRKLYHPSQIEIYPPAKEKYYEDLGRHLTLLGSPKTGAFKNPMAMRALQELKKLINYLLITEQIDENTRIVVELARELNDANKRWAYETYQKRRQEENKEFAEAILELIKDPEAKGIKLDANSNEDIDKFRLWYEMIEDVEGIEKDKKFIINEKTSRTKKGKKSEEIEVEEFAENNFEKINKSLYFKLKKSKDDVIAKYRLWKEQNCQCIYTGKTIRVTDLFKENLIDFEHTIPRSISFDNRLENLTVCYANYNRNIKKNQIPFNLPNYDVFSNGYDAILPRLEKWKQKVKDLEIHIEFWKTKSKRATDKDNKDFAIRQRHLWQFEMDYWKAKVERFTMKEVKSGFRNSQLVDTQIISKYAFHFLKTLFNKVDVQKGIVTAEFRKIFGVQQLDEKKDRSKHSHHAKDALVLCLIPTASVREQILKYWFEIKEKNNLLKSDTEQHKNELKNEIDNLQGKLNAILKELNLPDVNKLFAKLDEEIIINNLTNDQTLTLTKKKQKIKGKERIATGDSIRGQLHLDTFYGKIKKVKRDENGKPIRDDERNFVFEEKNDGFAFAVRKEVNKDLNIDKIVDPHLKQMIEKQIGSRTLAATLNEDGGLWMLKKDSSKAHKLRHIRCFADDVTEPLQIKPQTNLSKHDYKNFYWAKNGENYCYALYEGVVNKKVERKFLLFNLFKTAILHKHTSANNLDVEQTITCNKKGDKINLVCVLTTGLKVIFYKENIIELKEISKQDLIKRIYKVINFEKDGRIVFGYHLDSRSDNELKALENVYGKSIYNGFSIIDFDNPMPKVKLSVGNLNCVIENVHFLINPDGEIVWKL

SEQ ID NO: 9706 - protein, 1238 aa, unidentified
  REGION 1..1238: note = Description of Unknown: Cas Enzyme sequence
MKVTPDLHLAFDVGHSSIGWAVLQTRLDQAPDLLGCGAVIFPADDCLASQRRGFRRQRRHIRATRLRIARLRRLFEHLGVLTKAQLETGGCAWPWLLSARVLRGGPKLTWSELWDVLRWYAHNRGYDGNKGWSRQDVVANDEDTEKEKKAHELLDDFAKRHGRSGTMAEVFCDVLKIDPLGVVKSSMLRVRNLGAAFPREGVEAEVERILRAHLGVLPHVDEALVTAIMRDHTALAGPDYRLPARYGQRVNGQRTPGGLLFGQLIPRFDNRIISRCPLTYQRVYDWELASTKNEEHARCAAEKIAKVPSADCPEFYRFRWAMQLANVQIMTGDARKTRRLTAEERKTVHAAMERQGYFSVGTSKHPGEFMKAVRALTAGAKDNLDQMLALPDADKSLVLDPAKKRVAGGVLAVLWPHLMTAEEREEMEKNPAQLSKLQRHTLTNLRRGKAITARTLLDAAPAAQSAFDKWWDGEAMKTPRKTRKNGDATPRTREQVLGESHALKPDPGRAPFTRLIMREVFDFVLKTDRHPADGTEGAPDNGPLFRSEAIRNAQLQRAIDEQTNNHLVRHRLKVLERLHGDILQEYAANHASRIARITIEVNRDLKEMSGKTAQEQAQEQGQQTAQFRGVEKKLTAAYEGLGVHLGPGLIRKGRIAEDLGWKCPYTGADYDALDLLHRRVDKDHIIPRSQRASDSLDSLVITFSEINQWKGNRTAVQFVEEEEGKPVPGRPNIQIKTLTNFTKDVVTLPTKGYDDDERRKKNRKRLLALRDYVEKEFTPGDLTKTSQLVRLGAQALHKHYLGAEKIPVITSLPGSVTGAVRKSWNLIGCLALANPLVLNPEDLDEDGKPKVHRKTEIRGITHLHHALDACVLGFASLFLPRDGATWNREVIELLSQRRLTLPQQAILRDRLKHHVQITSEGEPRIKDLESELREQLRHKLAERRVVQHLPRDLSGMESKETVWRLFDPSDPHLNARRLARWLTQAEVQIPAPEAKTALIICRKRKNADAGEGESVSGDVFHEGKIWRWVYAIKDKSTLLGLAPEGDPAEAKLKRLKAVKVLGNTFGVALDTKPEPTLIRPHKVWHQLEKLRAANGGKPVRVLRKGMLIQVPPTAKRYPGIWAVRGIAYRQRDGFTLEICPPDYVKSRKVTGAVESASLLTLLRAGVEILPASLVGIKMESLTGDRLVVSKTSRLPRLLSVASKSCGLPSVASHRSPPDPRLEAARRRPPTPTSNKEQA

SEQ ID NO: 9707 - protein, 1016 aa, unidentified
  REGION 1..1016: note = Description of Unknown: Cas Enzyme sequence
MTRMRYRLALDLGATSLGWAMVRLDAGNAPCAVIKAGVRIFSDGRNPKDGSSLAVTRREARAMRRRRDRLLKRKARMTRLLIAHGFFPADEAARKALQPMDPFELRSRGLGAALTPAEFARALFHINQRRGFKSNRKTDKKDNDSGALKTAISQLRTALKAEGMRTVGEWLHKRLLDGKTVRARFRQDRVTKDDGKTRIDKHYDLYIDRLMIEQEFDALWANQAVLNPAQFIEAARADLKDALLHQRALKPVKPGRCTLMPDEERAPLALPSTQRFRIYQEANNLRILRPGLKEEVLSLEQRNELVAALECNSKRSFTQIKKLLGVGGAADFNFEDQKRQELKGNVTSAILSKPGLIGDAWWLFDEATQDEIVVHLVSDENEGALVRWLMAKTGIDEAHAEATAMAGLPEGYGSLSRAALARIVPELRRGVVVYSDAIKAAGFQHHSNISPSASGEILPELPYYGQPLQRHVGFGSGVESDSDEKRYGRIANPTVHIGLNQVRLVVNALIGRYGHPSEVIVELARDLKQNKEQRDEDSKRQAENQRRNTRMRNEIAAVLGTSVERIRIADIQKMVLWEELSFDPANRRCPYSGVQISVHMLLSGEVEIEHILPFSETLDDSLNNKTVALRSANRVKGNRTPWHAFGAQQSAGFSYADILTRAEQMPRHKRYRFAEDGYQQWLREDAGFLARALNDTRHLSKVAREYLSLICPQATRVIPGRMTAMLRAKFGLNDVLGLNGEKNRNDHRHHAVDACVIAVTDQGLLQRFAQASASARERQLDRLVEDMPLPWESYREHVQRAIDRIWVSHRPDHGYERAMHNETAYGLLGQGRVRFHKAVDGKRTLFEDNLKVIEFADSKAADRHGVLSDGSPRPYKGYKGDSNYCIEIVRAESGKWEGEVVSTFDAYQVVRTGGVERLRHKSLALSGRPLVMRLVIGDYLHADFKGKVRLLSVRKIKSNGGIFVCAHNEANVRQREDAKDANLIYGSFSAESLRKAHGRYVAVSPIGEVKGKGFKG

SEQ ID NO: 9708 - protein, 1637 aa, unidentified
  REGION 1..1637: note = Description of Unknown: Cas Enzyme sequence
MSGNSAIPFEKKKLYRGLTREQVNSLGPLVFGFDIGPASVGWAVVAPQSECIVATGSHVFPQAEDERGRTNNQARRGARVARNRYATRKWRLKLLRDVFAGLGMLPLPYLDSSGRLIDPMCSRPQQRNSSDTTSPFALRARAWTETAILPTDDWARLLYSIVASRGYSYQQEVDEKAKNSEGESNSAEAKDREQYGAAVTSSKSFYEQHKETYGTLGNLIFHAVEDSKKPGEERKFSGNPFARSHKNRDGEYRFLAKRDWLVDEVRALFKRRDEQQNDPEPLLVPDTSRAAGEALKRICEPDGRTDAPITLCDFVVYLIYAQKPAILAANLEQTIGECELERSRIIDGKPFKGELRAPKNCFSNERRTWLQELNHLRIKQEGRDDPRLSERERELIVNLPYEREKVRLSDIRMQLADAGFPQNYRDASFNRATYRLRPKAASTKISLLADGVVSKKLSDFVKTSPKEARKTYTELLLTGGATFSDVRKALNVPESHRFSTAETNECVIAPDDETNAKLCIVGEPGAYEFQGGKHLDLLMDEKPLTKKSAGKYWGRLFGSAVSGLVVTLAEIRKTMIGGDKVTKPWVFRIRTENSSTLANEQETTATFPLEYEDPQTAEDEVLITMHGWHALRKNISAVDAVYWESLCDGYKVAANETDEVLAKTRSDKANLLDGIGTALTQFQSANEIRGELQRLAIPAPVADSLIKIAFSGYRNLSLKAIYKLLPSLESGENYTQAVESVYGKLTPDRTPKRFLDPLEQFEFKRHRFYLNAAETRDTGHRDKRYRDLANPVVARSFNRARAVLNALVANFGSPAYIAVETSRDLARSKKLRDKIAKEQEDNREKNHRAEVKAKQLILSKSGREAAPSKEHILKVRLCQEQDDKCVYTGVPINVEDVAARAADYQIDHIWPQSRTMDNSQTNKVLVHIGANQNKLNQTPYEWFHSGHGPKRSWEEFKTFVHQFNGLSPQKKERLLATAIDEKEFYARNLVDTRYVTRLFAKMLRDGLLFKDENTGAHVADAVHVITSDDAGADRIEHFHKARVRMPQGGLTATLRKGWKIPKDRDAGDLHHALDACVIAVTTPSLIQKVNNFHRLRETCEDRDGVTYLKNRDGSSRVIADAQRYFPAPWGTIKGGEFRAQLLARLSHDGHSFFTPAGEARQFEYPKYPDFLRQVIAPITVTRLIAKKSSGGEAHSMNPTALRLQSIRLTELTARLLEVRRYGSWFEEGNRILFAALATHLQRHQGDALAAFPNGAYTTDSGDTVFVVRVPLVCLEADELKALGIAANASAMKALTVTYEKISLDKLKLGAVETWVARGQELRQKSSGETGSNGKAAFTTTTTSSPTASNGPSPMDEFCMRNLELLRAIRDRLIDVENLGTKAQQKMALAKGIRKPETTDISKRHSRLQSDATFEPPMVRGIRVPSTKGNSGAIVRGGLVDLGDALCVDVYRPNGKFEFVPRYLMTNNISVRDSLDTDAALGNRHTRLHKGVRIRIEHQRLASIFRIIANGTDEHGNQFFDVEPMFPQGIFEGYFAYYEPTNTRPVLALHDRSKFAWPADGYPPERTRQRLFAVNITKSRKNVVEKSKEIWQTANDRDAQALDRHFTINKEVKIKVDDAKTLDVVDIDILGQSRVVLP

SEQ ID NO: 9709 - protein, 1461 aa, unidentified
  REGION 1..1461: note = Description of Unknown: Cas Enzyme sequence
MDKIIGIDLGTNSIGWAIREVNNELENQIVDKGVLTFEKGVAIKEGKEVPMVQKRTQSRGKRRNYQAEKYRKWELLECLINANMCPLRIDELNEWRYYKKGVGRKYPQRKEFIYWLRFDFNGDGKPDFEQYDLSKHDNCYAFRWLAISDKEEHKKYFKENKQLLGRVFYQLVQRRGFFNSGDAEETKLIEEGRKNQQTKTIEVVGIKVIDQLIKEQYDTLGAALYWGQKNNELEAINHNRIRNRFTYRHYFENEIDAIFENLGFDLQSDFCQTIKKAITWQRPLRSQKGLVGYCTLDRPLKSKTGIYYKSGKKRIPLSHPLYEEFRTWVDINNLKIEPPKGIEKTTFLKTLVFPMFNKATDFYYSTKEDKKGNKTKGLKIKIEEAGGTILSKFDMDLDEENEGKKYKANILLNKIEKIFGEGWKELLRWEETLAGKEKSGNYLRVEDLWHLIFDATITKQQTTDLGARLIPILQKHFPNINFDTKDFDNIRLNKGYASLSAATIKTILPYLIKGMLYSHAVFIANLERVFGKNLDEVTIEQLRNKYAGILEKHKADKEIYSIINGLISDRMNERDRMNMGEDYLLDELDLKDINDKIKENFKSNFWNRKNKHQQTQFIDEVAILYQKYLRQPMGMEKGKQFFKLYRIEETIIGLLKNNYNISEERINKYLWHPSEQEVYSPANIKADKDGVVYTNERGNEILFLGDPNPISRGFKNPMAMKTLQYLKKLLNYLLQENKINAHTKIVVEIARELNDTNTRKAIKRYQSDRATLRDGHRKSVAEYFNQRGDTDKNISSEMVDRYELWVEQNEKCMYCNHPIGCADVMNGTAQIEHTIPEGQSQCSELFNLTIAHPGCNATKAKRLPAQWKDNYELILNNIKSMYAKYMSLKEKHEATYAGAKKAATKEVKDKQVQDRHYYKMHFTYWKKKYETFTIEEVTNQFRRQQLTDTQIITKYALPYLKTVFKKVEPQKGIITADFRKIYKIQERFEGKERTKHSHHAIDAAVLTLIPPASIRDFIRKEYYAAKEKNLPYHNKPRNWENFHQQHILDMEDQVLNNYQAQHRTLTTTVKYQRARGNKIPLIVNKKTIYQTDKQGNILYKKDEKDQLIFKKNHFGELLKDEQGNNIPIALKEFKKAQGDTIRGQLHADSFYAAIKQPEYEFKNDKFIPLHDGNGNFIFQQNKKRGDDIFISKKIFIADIKTYENLAIIIDPNLRHYLQKTLANKDFAKEILQPIWAFGKKEDRNGNPINPLRHIRCKVKGGGGGYVTNPATIRIRKEFLSTKHYKNQYYAQNGEIVVCGLYQDVIEEKVVRELKTYSILDISSIKDISSINDAVPVNFEKTIKKVIHLIPLLAVLQAGQKVFFYQNEMNELKTMDEIDLGKRLYLIVKFEDGNIFFKHHLNSMKEEDLAKEMKRLNLPTSGASVFDFNSPIPKLRLSQGSLNIAIEQKHFEVMLDGVIKWR

SEQ ID NO: 9710 - protein, 1033 aa, unidentified
  REGION 1..1033: note = Description of Unknown: Cas Enzyme sequence
MSRMNYRLALDLGSTSLGWALIRLNDEDPPKPIAVIKAGARIFSDGREPAGKGQIGTSLAATRRQARAMRRRRDRLLKRKARMMRALIEHGFFPADEIERKALERLDPYALRAKGLDESLTPAEFARALFHINQRRGFKSNRKTDTKESDTSVMKGAISSLRALLASGEPHTRTVGEWLHMRTLANEPTRARRREEILTKDDGKNKKLVSYDLYIDRAMVEQEFDALWAKQSSLNPQIYTDAIGAEFKDVLLHQRPLKPVRPGRCTFIPTEARAPLALPSVQRFRIYQEANNLRILGRGLEPVALTLEQRNKVADELERNGKRKFTKLKELLGIGGSATFTHEDVKRTELKGNGTNFALAKPEHFGKTWFDFDNALQDEIVMRILTEQSEVALVNWLVEHTKIDEQHAQSVANVGLAEGYGSVSRAALARILPELQRNVEPPLTFAKAVIAAGFEHHSNLSPAATGEILDELPYYGEPLQRFVGFADPRATENDPPEKRFGRIANPTVHIGLNQVRRVVNALIHKYGHPAEMIVEVARDLKQSKEQREEDSKRQAANQARNVRYRNLIAKQLNVDENQVRRDDLQKVLLWEELNRGDAFNRKCPYSGESISLGMLLSDQVEIEHILPFSMTLDDSLNNKTVALRRANRDKGNATPWQAFGDRTIAGYDFNAILARAELMPKNKRYRFAKDGLEQWLRGEKDFLPRALNDTRYLSRVAREYVRLICPGARVIPGQMTAMLRGKFGVNNVLGVSGKKNRNDHRHHAVDACVIGVTDQSMLQKLASASASARDRGTGRLVEMMPDPWPTYRAHVARAVNAIWVSHKPDHSHEGAMHDTTAYKPPHLDNAKMWRTRGINGQNPNEKKADSAAMISVADASTLNRHAKDEHGIERPYKGYVGNSNFCIDIVLNGKGKWEGEVVSTFDAYQIVRVDSVKRLRDRVLSISVKPLVMRLIVNDSVRLNVDGVLRTMRVANIRGNGQIFMSDCHEANVDARNRDATDEFAYVSKYASSLQAAQGRRVTISEIGDVRDPGFKG

SEQ ID NO: 9711 - protein, 1519 aa, unidentified
  REGION 1..1519: note = Description of Unknown: Cas Enzyme sequence
MKKILGLDLGTNSIGWALVEQNFEIKEDKITDLKDGTIIDIGSRIIPMDQAVLGDFDKGVTKSQTAERTRYRGIRRLRERHLLRRERLHRVLNILCFLPPHYANQIDFEKRLGQFLVDKEPKLVYDESNSFIFQKSFNEMLAEFAKRQPELVKNGKKTPHDWTIYYLRKKALTQKIEKEELAWLLLNFNQKRGYYQLRGEDEEINPNKLVEYHSLSVAEVKSDLPQKGKDEIWYSIILENGWIYRRASKQPLFEWNGKTKNFIVTTDLNEDGSVKKYKDGKEKRSFRAPAEGDWTLEKTKTEQTIDQSGKTVGEYIYDTLLQSPTQKINGKLVRVIERKYYKSELFKILETQQKYHPELQDTNLYKDCLNELYQQNETHKANIDNRNFVHLFINDIIFYQRPLKSKKSLISNCKFESRTYKIKGEMKTEPIKCISKSHPLFQEFRILQWIQNLHIFDRESDNDIIEQLLQNEDEKVNLFEFLNIRKEIDQKAILKYFNLKEKTHRWNFVEDKSYPCNETRSAIVNRLEKCQNVPNDFLNNEKLEVLWHILYSVTDKEEIKKAIESFAKKNNLEEDFIEQFSKFPPYKNEYGSYSNKAIKKLLPLMRIGKYWVETSIHSETTQRIHKIINGEFDNKIQIRVREKVLLLEKTSHFKGLPLWLASYIVYDRHSEESDLAKWKTPLDLDRFLIEFKQHSLRNPIVEQVITETLRVVKDIWELHGKGAQNFFDEIHIELGREMKNDKKSREKITKQVTENENTNLRIKALLAEMINDINMENVRPYSPSQQEILKIYEDGVLNSGIEIEDDILKISKTAQPSKNELIRYKLWLEQKYCSPYTGEMIPLKKLFTTSYEVEHIIPQSRYFDDSFSNKVICESEVNKDKTNQTGLEYIQSKKGSKIELSHGKFVTLFTEEQYEKFVKEHYGKNQGKLKKLLILDIPEKMIERQMNDTRYISKEVKNLLSKIVRKETNDDGTTSVNVLSCNGQITNELKNDWGLNDIWNEIIAPRFERLNTLPGNENKFGKVNENTKKFLPTVPLEFQKGFSKKRIDHRHHAMDALVIACATRNHINYLNNQNALEKGKSGEQKQKSREDLRQLLCDKKYNNNSEKNYRWIFKKPWAKFTQDAREQLETTLISFKQNLRVINKTVNKFQRWETKNGQVEKITAIQKGQNWAIRKSLHAETVSGKVLLERIKESPVLITSILEHINSIADKEVKEKLTILSKDFVNDLAGFKRYVKNNPININAKIVDKVFIYETIEASATRKTLDVSFDEKKIEKITDTGIQKILLTHLRLEIYQNAMDEKGKKILPQELAFSEDGLDDLNQNIQFLNKGKAHQPIKKVRVFEEGNKFKLGSTGNKKDKYVEASKGINLFFAIYKNAEGKRNYASIPFNEVVERQKQSAELIEKINSVPLKNSNEDELLFHLSPNDLVYVPTEEENLNPTLVNFQKLTPKQVSRIYKNISFTGNQCFFVRNDIATSIINKGEFSALNKMEKSMENVMIKEFCWKLEVNRLGKIKNVIK

SEQ ID NO: 9712 - protein, 1417 aa, unidentified
  REGION 1..1417: note = Description of Unknown: Cas Enzyme sequence
MKKLGLDLGSSSLGWALRENNNIDKRGVITFKSGMVKGKGGGYSSPTKDRREARSKRRLIQARKYRKWELLEVLLNEFVPLDKQELENWSKYKKGQVQIFPENINFLQWLACDFTYLENGEKYKNPYELRVKALDNKLNKHEFGRALYHLVQRRGYRDIGETDSETENQIAIRGKSGFQKALEENRTIAEALTKEFLEKGERARNQYPYRNEYKEELLLICKVQECDNVLIQKLLKAIIWQRPLRGQKGNIGKCTLEPTKPRCPISHPIFEVYRAWGFINTIKYFDENGGKQSVSKEFRNELFELFLKKDKNFKFEEIRTFLDKQFKSKKKYNYPIDKKTEKYDTTVAGMPVCKGLIDIFGNELKEAIYSVHNYNIGNSPKIIQGYSLYDLWHILFEFDKIHLKGFAIEKLKLEDKVDKNGNRYNPFEKLKNSVLSGYADLSLKSMCKIIPFLKEGYLYNESAVLAKIPELIGEQWQLQKNKIFESISQSNKIYNWNKIINGITNNLIDRYKGLDNLEKFAHKDTQYIIDADDINDIEKACIGNFGEKSWKGRVDKGVILGEVKNQYQEFFKDSKRAFREVPLLTVIFKAILKENKIELSGNLYHHSNKENAYSKPIKDKKTGIEVLSEPKIDSIKNPMFNKSMGILRKLINRLILDGHIDEGTEIVIELARELNDNNKRAAIERYQNERKNNRIKYRDFLNEFNEKENKSINVDEGISTFELWAEQIFEETENEKKEKIFNKNNSEILREKEAIKRYELWREQKGQCMYTGKMISITRLFSNDIEIMHTIARSLLPDNTMANKTVGFKNYNTDLQKQKLPAQCDNYTKDVKGWGTAIEPRIDNWIQKRDSYKKLYEDRLKPKGNEDEANKNKRIQEKHYFKMHFDYWRDKVERFTTEEVKDGWARRQLVDTQMVSKYAREFLKTYFNKVAVQKGSVTADFRKIYSFQEEDEIKSRNKHTHHAIDAAVLTLIPVNSSHRDKLLYRMYETYEKEKRQYTTTPFSGFNAQRLIEDIDTNTLIVNYEKDNILKQTSKKIRNRGKLQYLKNKKGEFVLDKNKKQILKTAQGDSVRSALFKDTFIAKTRDVERYSNGQPIRENGDWKYKQGKDEFTYTVRKPIDEVLSKIEDIVDPVIKEIVKKEKNNKPIKDYQGNIIRHVRIKTRAGREVKERVNYRSQHEYKNKYYSASDSIPYAILAQRSDTGILGNKMIPITSIDVAKIYKELGKFDIELYIQKFHTGLKDYKKKLLKVGQKLIVLKNDNEYEKRVDIDFQVRRLYRITQFKYDGSKIILQYHLEAQGSKEIDNQVKTNKDLLVREKEMELGIPIIKENDDITDNVERKKDLKKRIEDFPSRLKVISDRASIETSDLIKKQIEEYKTESSNLDAGQPPILGLSKKNWNFLFEGEDFEISMLGKINWL

SEQ ID NO: 9713 - protein, 1101 aa, unidentified
  REGION 1..1101: note = Description of Unknown: Cas Enzyme sequence
MSGNSAIPFEKKKLYRGLAREQIDALGPLTFGFDIGIASVGWAVLCGTRIVDLGVRCFDAAEDPKTGESLGAKWRTLKVARRRLFRRADRLKQLLRLFVKECLLVKADHALLAAPPTEEGETNHRTPWALRSRGLDERLLPDDWARVIYHLVKRRGFLSTRKAERVQKEATTSAAKEKQGLLSGVARTAKLLGEGDAKRFRTLGEMACKSLEFADAKRNKAGEYKRSFDRTLLLDELRMLFDMQRALGSKHASVEFQAIVEELFSRQKQAVTGEAMLKLMARCTLQPAEFRAPKCSYSAERFIWLGKLANLYVVEFGERRSLSSGERQLALNLPYENKTGKITYKQLRAKIGLPSFEESPAIGFAGLSYGTKRNGKDELTNPEDATLVQLRAWPALRGALLEANLETSWQKLSNDPGQMDQVAYVLSVFQSDDEIRPELVSLGFSSNEIEALLTLDFKGFVMLSVKAIRNLLPHMETGLRYDEACTCAGYSHHKPKGESKGLGLLPKFSYEDIRNPVVFRALNQTRNVLNALIRVYGSPATMSVELARDLSKSFDERRDISRDQDAYRKQRENAEKLFAEHFEGRAPNPRNQDLLKYRLYSEQDCQCAYSQTPLDLARIVEIGYCEVDHALPYSRSFDDSMNNKVLVLTRENRNKANQTPFEYLGGANDSREWRAFEGYVIGNKKFRKAKKDRLLRRVFDDAASEGFKERNLNDTRWVVRLFANRVKDSLRFASDASGAVSKTPVLTPSGGFTSFLRARWGLHKDREASDLHHAQDACVIAAASPTLIKRVSDYNRKRETLEILPGGAIVNTDTGEVLKDAKAYFPEPWRHFRDEVLARLSHEPHKAVPLAVQSYDDETVGALKPVLISRAVKRAVSGDAHEAGILPPINPKTQKTVKSIRLSKLTIPLLDKAVGISDARNIGLYDTLRSRLVAADGDPSKAFAEPVYKPSGQHRIAPIVRSINVHMTQNSGTTVRGGVAALGEMTYVRLFKVKSSFELYPEYLVHAENRFGIPSPPSDATFLFNIYKNDYLEIKFSKEHFGGFFVMFESDGRVTLRRHDQPKVDKKVPQFNYFRRSISSAISVDKFNIDVLGQRYETRCA

SEQ ID NO: 9714 - protein, 1060 aa, unidentified
  REGION 1..1060: note = Description of Unknown: Cas Enzyme sequence
NTGVALRRPNVKIDYRLALDLGTNSIGWCIYRLAIDEGSTDERERWRPIRIQRMGARIFSDGRNPKDLASLAMARRVARQQRRRRDRALRRKGKLLDALIELGLLPQDSVQRKALVALDPYVLRAQALTVPLNPHHVGRALFHLARKRGFRSGRKDLTSEDKETGKVKTGIANLKARLAEAGCATVGAYLAQRHAHREPVLARPDASGEYAIYLARELVAEEFDAIWASQHPHNPNVFTAAAAARIRDIILYQRPLRPVEPGKCFFEPDEFRALLAHPQSQRFRILQELANLRIEYAKFDVRSLARDQRNMLLDLLTHGGSSLKDGGRVLTWAELRKLIRAPKGAPINLDTSGRKGLKADSVSIRLSDPTAVGPAWRDCGTAHQDRFLHVLRRIDRLDDLDVALRGQGFDVPVERLAAIFQVAARMEDEFGAVSLKALSKIVPQLESEVIHYDEAVRRGGYRSHSDRYEGLLEPNLPYYGQCLPGYVQPRALPTASPEERQYGRIPNPTVHVGLNQLRRIVNAIIKRYGHPKEIIVEVARELGMSGERRRELIREQEQNRHRGERHADELARLGLKNNRENRQRLQLFEEIAANDPLGAECIYSGERISQARLFSDEIEIDHILPFSRSLDDGIGNKLLCVRRANRDKKQQTPHEAFGASPGRYGWPDILARVERLVPRKARRFSEDAMEAFLRDRDFLDRHLTDTAYFSRVARDYLTAICPPNRIWVSTGKLTAMVRAKLGLNRILSSTGNKERNDHRHHAVDAAVIGICDRRVIRAVATAAARAESNGEWRLVQGIDPPWPGFFEDVRATVDRVIVSHKPEHGLDGGLHNETSYGLVEGPDQKGRSLVAHRIVVTDLKSRADAEKMLDDGPLKQQLVELLSANSGTALKQALAEFIRKSGVKRVRVAERLSVQEIQNPNRAAPKLVKPDGNYCYLVQRKESSGWRGSAVTRLTATRVARPTGGTFPSPASTVMLVRVGDSIAAEKEPGRIGIFRVVKLSGAQLALAPHHEAGALKARDSDPADPFKYWYVSATSLHGAKARVVGVDELGYVNDPGFRE

SEQ ID NO: 9715 - protein, 1097 aa, unidentified
  REGION 1..1097: note = Description of Unknown: Cas Enzyme sequence
MGYVLGLDVGVTSIGWSCVQDSPRAGQPGRIVGAGVRVFPEGVDRDKKGGEVSKNASRRAKRGSRRQLDRKKRRRARIRFVLQTAGLWPLPAHNIDLSTVDPYRLRASALTCQLEPWQIGVAIAQLARRRGFKSNRRTDGGKETGVVYDGIAAVRAEMRPGETIGEFLDRRRQSLGAGNEHLVRTRGRYTLRAMFEQEFDAIWSAQATHQTAIMTDDLRERLRTAIFYQRPLKPADELVGFCELEPGHRRCQAADRAAQLFRILAEVSNLRIISPRGEDRALSRQMRDAVVQLLCAKEKAEFGQIREACGILDGEHFNLEVGKRTYLWGHRTDHALRSNGVFGKRFDALSEEQKHRAVQLVMNEENEDKLMSAAREEFGLDDNAARALTRVKLQNGYLGFSRKAIVKLTPHLREGCQLRSIDPTASAFALAGYLGRDERPAVVLDRLDAPPRDIRNPIVMAALHQVKRLVNAIVKEFGKPSAVHVELAREAQGSIDQRKERTFENAKRRKRNEEIADSIRADFGFNHPSRADIERYKLWQDFGEHCPYTGTPIPYATLFSPEWQVDHILPYSRSLDNSYANKALCATAANDEKGNQTPAEWLADRDPSRYEAVLQNVRRLWVLGQSGKARKFAQKTCELNDFIARQLVDTAYITRQLGQYLRRLGVDVVCLRGQTTADLRWRWGLDSALREDGLALKNRDDHRHHAIDAIVLALTDRSRLQALAGLDRQGLRRLRAEQRLAAREQREIIDTTTGEVVQAAAPWPGFRNQVQERIEQINVSHRPKRRVSGELHEETIYGATDQVGVFVSRKPLESLTPAMVGQIRDEGVRRLAIGRLVQHGIDSATSQKVKPSAWKAVGKAVWREPLLLPHGVPVRTVRVLKRDKTIEPLDVGNTRYVKTGSNHHVAIFEFKNAKGKAERCDVWVSRLEAAKRVLRKQPLWQTTDPKHPDARLIMILTPGDSVLADFGKGLGDRLMVFKTGASTQGQLYFVDARDARKGDERKRFVANANTTSKYKVRPVNTDLIGRIRDRYSAVPGPAGTSVDGRVSLIAARCVAAALSNTAAHKALRSAALAHLGGQLTAELKRLRARKGRGVTSP

SEQ ID NO: 9716 - protein, 1075 aa, unidentified
  REGION 1..1075: note = Description of Unknown: Cas Enzyme sequence
DLGTNSIGWALVEIDHQNKTVKILGLGSRILTMDAAEIAKFESGAKTESAAAVRTTKRYPRKINERYLLRRDRLHCILNLLNSLPEHYTLSIEFENKKGKRSGQFKKGVEEKLAYYKDDNGKFQFLFKDSYHQMENEFRKLYPEMFYQKGNGDQTKIPYDWTLYYLRHKAVTDKEFELTKEQLAWITLSFNQKRGYEKVIGQDEKNQKEGELTDSFVGKVQSVSVSLNKDVYEIILVDNNNEAIELFKYKEETKISITEVGDLKEVEIVSKYDEEGTIDKNKTEYIINEVRDFLITDVRNTGQKRKENFVFEVELETGWIKEQQSKFTPKWKDTKRDFIIKTKYDENGNRITKGADKGRNINIPKEEDWTLMKLKTETSLTSFNTKNNTKGIASFVYYNLLQNPKQKIKGDLITVIERDYYRDELEVIFKNQEIFHPELKNRNLYEQAIQLLYPNNSNHQKTIKELDFNYLIKEDILLYQRDLKSKKSLIANCVYEKENFERIDEKTGKKYKNPLKAIHKANPLYQEFRLWQFIKRLKIIKKEDVSNEEININVDVTGQLLTSDLKEELYAFLNDKESATEKDILGFLNKKYKDLVINAERYKWNFASEKEPCNPTRYKFILLSKRVLGSKYKDFLSPENEYGLWHFFYSVKKKEEFNKGLKNILSRLLEKSNLSQDFLNELIKSFSSFGGYTNDYGTYSEKAIKKMLPFLRLGKYWNPKNVEVILSKTNHEVKQKVLDKEDINGELDDFQGLWVSSACYLIYGRYSEVGEVQFWQTPYDIENYLKNEFRQHSLNNPTVEKILVETLHVVKDIWRYYGEEIGKDEDGRTIYNKLFDRIHIELGREMKKNNKQKERDDKQNKENRKANERIVELLRELKRNNASLQEKSPFQQEKLRILEESLLSSIEYDKDNTEYELSTGKITKKEIKEITTKEFSKISRSDFERYKLWLDQRYQSPYTGKFIKLSDLFDRKKYEIEHIFPQERITLNALYNKVICETEINKEKKAATGYGFISNSKSKKVFCSAHNELIAIISIHEYEELVKNNFSGRKREILLSKDIPEEFTNSQLNNSQYIS

SEQ ID NO: 9717 - protein, 1546 aa, unidentified
  REGION 1..1546: note = Description of Unknown: Cas Enzyme sequence
MTTKTILGLDLGTNSIGWALVKQDFENKTGKILGLGSRIIPMSQDILGEFGKGNSVSQTAERTRFRGVRRIRERYLLRRERLHRVLNILGYLPEHFANQIDFENRLGQFFNETEPKLAYNNNNFIFKKSFFEMIEDFRKFQPQILINEKGEEKLVPYDWTIYYLRKKALSRKIEKEELAWILLNFNQKRGYYQLRGEEEEENPNKLIEFHSLKIKEVKADEPQKGKAEIWYSLILENGWIYRRSSKIPLSDWSGKIRDFIVTTDLNDDGSIKTDKDGLVKRSFRAPKEDDWTLVKKKTEQEIDQSNKTVGAYIYESLLQKPGQKINGKLVRTIERKFYKDELNQILKKQKEFHPELQNEDTYNDAVRELYRNNEAQQLTLGKKDFVHLFLEDIIFYQRPLKSKKSAIGNCTLEYRKYKTIDKEGQLIVKKEYLKAIPKSNPIYQEFRLWQWIFNLNIFKRDDDKNSITEVLLDNTEAYEKLFEFLNTRKEVDQKALLKYFKLSEKTHRWNFVEDKKYPCNETKAQISTRLAKVENISNDFLTNEIEQKLWHIIYSVTDKVDYEKALKTFAEKQNLDVVTFIENFRKFPPFKSEYGAFSEKAIKKLLPLIRLGKFWSWNNIGEDIRVKIEKIITGEFDENIKERVREKAINLTKESHFQGLQLWLAQYVIYDRHSESSLAGKWNSVIDLEKYLDEFRQHSLRNPIVEQVITETMRVVKDIWVKYGNGEHSFFDEIHIELGREMKNTADDRKKITEQVTINENTNLRIKALLSEIVNDKNIENVRPFSPMQQEILKIYEEGVLNSGIDIEDDILKISKTAQPSSSELNRYKLWLEQRYRSPYTGNIIPLSKLFTTDYEIEHIIPQSRYFDDSFSNKVICEAAVNKLKDNQIGFEFIKNHHGQIVEVGFGKTVRVFEEKEYEEFVNENYAKNRSKKNKLLLEDIPEKMIERQLNDTRYISKFISAVLSNIVRSSSQDDGVNSKNIIPGNGKITTQLKQDWGLNDVWNEIILPRFERMNGITNSKAFTTYNEKYQKYLPTVPLELSKGFQKKRIDHRHHAMDALVIACATRDHVNLLNNQHAKSDKRFDLNRKLRLFEKVSYFDNNKKVKIEKEVPKDFLKPWGNFTVDSRNELEKIVVSFKQNLRVINKTTNKSERWVEKDGAKFKEIVLQTKGDSWAIRKPMHQETVSGLIKLKKQKIVNLSTAIDEIEKLVDKSLRIQIKKLIKAGLDKTKILGFFKDLDNKWEDKDISKTTIYYWEVDKNGDGIYAASRVSLNDTFNEKKIKEEVADTAIQKILLNHLENYKNILDEKGKEISAELLAFSPEGIEEMNKNIVKLNGGKFHQPILKVRTYELKGNKFNVGQTKNKKDKFVIAAKGTNLFFAVYEDEKGKRNFETIPLNEVIEHQKWRATLSKSEREITPMIPVNLVYGKFLFSLSPNDLVIVLSPNDVNGKVDKSMNNINKEILNKIYKFTDSSDTTANFIPCVVSDLLFNVKKNEQEKKGLSYPIQNEFGIGSPQSKNQKSIEGIMIKDHCLKLSIDRLGNVKIQV

SEQ ID NO: 9718 - protein, 1291 aa, unidentified
  REGION 1..1291: note = Description of Unknown: Cas Enzyme sequence
MKHIIGLDIGTNSIGWVLLENNKIIDRGVIIFPIGTNVDKNGIESTKNMERRGYRGANRILARYKLRRKNLRKLLESIGMLPDFKGLNKIKGTYQSQELYELRALAIDQKIPEPEIGRILLLINKHRGFKSTSKSLSKTDDENGTVSAGITQLQTFMEASNSRTIGEYFFKMHIKAKDLFDQGLWHNINEPYDERALNNNGEFVYYNSRGIRKENGRYVGRDMYESEFDLIWRKQKEFYPQLTGSKKEYEEILKLPVPEKIIKLKQFKETMYWQIKHATIFYQRPLKSQKKYIGKCQFEPNRQTSPISSLLYQEFRIWKQISDLRYSDKMGEIFKQPLSKDSKEKVFDFLQINLKLNLKEGKKREDGTRNIDIMDVLGISNKKNYEFILNNDDEESYLHGNKTLSSIRTSCGENKFRLLLSEDKLDKLWHILYMAQDDIWLKDTLFWKWKFENEEEINNLIRMGLEEGFGSYSSKVLKKILPYMKAGKDEYDSLVLANYLKSPDEYKEERILADKIKQLSNNELRNPVVEKAVSQSIKLVNSLLKKHKDLINKKELVIRIESTRELKKPKKQREDMRRNNNETDKKREEYAKFLNQQIKNGKLNFAREIYKYDSIIYKFELWLELGADKEDPAFKEFEKIVQRKDKEKHALWLECNRICPYSGKVISLSKLFSPNNEIEIEHIIPYSRSLDDSFTNKTVTFNHVNKLKGSKTAFEFISEQGNESLRNYKERIKVFKKGNSVAKYEKLLLENVGSEFTNAQISNTSYIAKYVRKKMQEVCFDVQFTNGAATAELRKNDWKLNNLLDKIRYEEETGIEIDPYLREFSMYKRSFKSYLETKAKSKDLQPIIWKSLTRENTAEYEAETKNPIFEWWQHIQKFDSFRGAKGKKDRSDHRHHLLDAIIISACSPSVIKELSTLSRQREESGIYAYDSKGNLTRELIDCPLKYNDVKNALKNVLVYHKSEKRLVSSKTNKIKIKGQLPIIQKTFSPRGSLHKDNFYGKLKNPSLQGFDKADVYIKRDVLNGEKFKDFSSLEKVVDDKLKAILRKRLEMFDGKGEKAFSEENLTKNPLHLYSFDIYPDEAPNLPLSKKGNLLPIIKKVRVINKNSRNLIQLKAKENGVTINENRYVETDGNYLMALYESKEIDKKGKVKIKRDFEILSFYKAVQKKRNGEKLFSDEKLFKDGTFIPLNKKCPFIKAGDLVVLFENEDSIIDWNDNSFLNRNLYKVTEIGLDYRSESEQYGTIKFAKHNVMKTSKDSYEKAGFFVKKLHTGLNIMKVKLNNLGQIMVFEG

SEQ ID NO: 9719 - protein, 1070 aa, unidentified
  REGION 1..1070: note = Description of Unknown: Cas Enzyme sequence
MQYRLALSLGSAFLGWCVLETVDREAVRIVDTGVRVFSDGRDMQTGEPLATGRGAARVMRRNLDRRKSRRERLMKFMIGAGLMPADEQARKELEKADPWELRAKALDGKIPLHDVGRALFHINQRRGFKSLRKHGKADDESGNMKEAIKELQRKLLATRSRTLGEYLYNRHRERHPVRARYRMVNNKAEYDFFTGRRMYEREVDAILAAQKKHHPQLTNKVCDELRDIIFYVRPLKPLAVGKCRFESGEARARLALPLLQKFRIWQDVNELKIEDAGDGVPVLEPKDRKRIVESLLFSRKKTFDQIRSLLGLEPGCRFNLETDKRDELRGDTTSVLLSDEKCFGPGWRDLSDDQQENFLALLFTEADPVRLRDALMSEWDLSSEQAEEVISITASDDDDRSGISSFHGHFSKKAILNMMPWLEQGHKYQEAARLAGYQPSDFHATERCAALPYYGQVLQDSVKGGSYDDKDKDLPERYFGKVNNPSLHIGLNQTRKLVNALIEVYGPPDEIVVSIARDLKQLGKVLAKKQFQNRKDKDRINNELEKLKVKPSYRNRMLFSLWEDLAEQPQLRYCPFSGKPIAMTAIFSGDFEEVHLLPFSRSYDDRRANKVLSSREWNRRKGGKTPFEAFGHTREWPQIVARAENLPRDKTWRFREDALEKLEGKDGVQGRLLNDSHHMAQWVRHYLSVLLDSEKRESCVRAVAGQITPLLRESWGLNDLLEDRPENRADHRHHALDAVVIGCTDRRQVEKVSEAAVILEENESLRGRRHEPVSGLEEPFNGFRQQMQEHLKRVVTSHKPDHGGADKAIRAARPYTVAALHRQTAYGLVRPLGDETAAFVTRTFVESLSSTTEIERVVDDKIRQKLLAAVEGLKAGGKEWKQALQRAAAPGGIMKNGIRRVRLRYNFKNDTIVGVVQPDDKGMDDGQPFKYYALQGNYCAEIFCTDKGKKAGQWQCEVISNYHAHQKQFIPRWRKDNPTAKLIMRLQQNDMVAYQDDGADVICKVKSLSKQKYGGIIFLRQHTIADEELNSLTWQASANLLQLKNARKLSVDIIGRVKAPVPKKKPADAA

SEQ ID NO: 9720 - protein, 1078 aa, unidentified
  REGION 1..1078: note = Description of Unknown: Cas Enzyme sequence
MAAEPPGEYVLGIDLGTNSLGWAMIALVDGEPANLFRAGVRVFDAGMEGDIASGREESRNKARRDARLHRRQLWRHRRRLVKVAHILQAGGLLPEGDISDPKSRQDFFNRLDADIFASAWFASKEKTGTYPEPRHTLPYILRAVALDEKLEPHFLGRALYHLAQRRGFWSNRKQAAKKGDDEGKVKEGITELRKAMAEANARTLGEYFSHLKPSEERIRSRWTARDMYEKEFDAIWAAQVPHYSTVLTEDRRKELRKAIFHQRPLWFDPNTVGQCELEPGQQRAPAYHLSSQRFRLLQTVNNLAVLPPDDVEMPLTPADRQKLIDELEAKGDRTFKQISKLLGFEKGYGFNLERGGEKRLKGNRTNADFHAVFGDRWLKMSSEERERAVEYVHAFQKPDKLKEAAKPKLGLDDAAAEKLAEISLEPEYMNHSRRAIEKLLPLLEQGATYGEARKLAYPQSFMSGEPKPLLPPVEQALEIRNPAVTRSLTELRKVTNAVIRQYGKPQQIRIELARDLKRSKKQRVRITETNRANEKARQDAAKKIIADAGISQPKPDDLRKYLLAEECHWMCPYTGKSISMLSLFGPEPQFDIEHIIPFSRSMDNTFQNLTLCYVPENRSIKGNKTPHQAYSGDAQKYEDIKDRVKKFAGEHRTLSEKLRRFSMNDEELETFLGDFRDRQLNDTAYASKLAKQYLGLLYGGDVDSQSKRRVQATSGQSTAYFRNLWKLNAVLNDGPTSEGGYKPKSREDHRHHAVDAVVIGLTDQGMIKRLSDAAQRAPLEHRRRFAALDGPWPNFTDSVRGEIGKIVVSHRVSKKVSGALHEETIYSRPFAVAAVSDRRPRSGKNGGEDTAATVVRVRKRLDAITKPEIEAIVEPSVRKLVQEKLASLGNGDPKKLFSVDANLPCFEAADGRRIPIKRVRVKKPVPVFALGSGRTVRHVASESNHHIEIYAELDKNGNEGKWDGEVVRLQEAVQRVRAHKPVVQRNHGPFVKFKFSLSPHETIECDDGEGGRKLWAVRGATTTGDFPRLFLVPVNDARDKSEIVKSGLYWCPLLNPLRKLNPRKVVVSPLGEVSESHD

SEQ ID NO: 9721 - protein, 988 aa, unidentified
  REGION 1..988: note = Description of Unknown: Cas Enzyme sequence
RVLRGGSLLTWPQLWDVLRWYAHNRGYDGNRAWSAADVEAEEEDTEKVNNARALYAKCGTHTMAETFCAVCGLDPLGGKKSCNLPGDKRPKALNAAFPREDVEREVYAILQKHVGLLPEVNAALLEALLNDAAAIPAVNLRLPMRYRGGLLFGQLVPRFENRIIATCPIMFERVYQRLLKENNDAERASAVAEKVSKVPSKECVEFYAFRWSMLLANIQVKGTDGLQPLISNKGWREALDRQMRAAGFLTPGELKKSVRKLTDNAPDNLDQLLLHPDAGEALIFDPARKLVATNAALDAVWPKLPEQTRKYTLNKWRQGRQLSPSGIISDLDEADRARAKAAFADFITTENSSKKKRKAPLTLEGLLATKLSAKLLSGRAPYHREIMREAVADVMERGIHPTEERGCLYRSEAIRNAQLHRAIDDQTNNHLVRHRLLILERLHRDILKEYAGGVASSVARVTIEVNRDLQKLSGKTAKQVAQDLGQRLANFKSVTKRLEAAFEGQGIKITPGLIRKARIADDLGWTCPYTGQKYDEFDLLNRKVDKDHIIPRSERPSDSLDSLVITFSEINKWKGSRTALCFVEDEQSKPVPGLPNLTIKTLKRFKEDGEALETFKGHDDDQRRKKNRKRLLQLRTYVDKEFTPRDLTQTSQLVRLGAQILQKAYAGSQKSPVITSIPGGVTGAVRRSWNLLGCLAAANPLVLDENNEVKTKTEIRDITHLHHALDACVLAFTSQFLPRDGGIWELLVKRRLNEAEQRLMRQRLHSMVQINGTGEFRLADLPEGFKKQIRERLAERRVMQHIPKEMAGLRAEQNAWRVVKVENGEVHLRQRIRKPDGSRPLKEKTEKIGKVIGLQPGELQRRKAVLVIPDNYGLALDPEPTIIPFHKVWPRIQELRQKNGGKLPRVLRNGGLIAVPKGLFAGLWKIFSVKNNASGIAVDIGSPDATRLQNKTMGHKINVRLTTLLKDGMEILATPYTGVAACPTTSST

SEQ ID NO: 9722 - protein, 955 aa, unidentified
  REGION 1..955: note = Description of Unknown: Cas Enzyme sequence
MDSILGVNVTPTTVSIALLKNNQILEAIIHKFNKGESPKGESLALPRREARSVRRQIKRRKWRRKHLLSTFNEPQQIVESFRANLSPWQLRVDALSRKLNGTELLIALYHIIKRRGFKSSRKNSTDEKEKDEKKKMLTGISELTEAFKASKYSTIGEYLFYQPKRKNTDGCYTRTVTRDLIIDEVNTIFKKQKEFGNIKLTDEFITDFFNVLNWQTPIKSYVGLIGNCTLDPSEKRASKFAYSAECFKMLSKLMNLKFIDNKHNEQEITLEDKLYIFKLAHTQKKITYSTIRRKLKVTTDYRFNLINYRLSDRLKKSVNEKFKEGTRSSEKITWDEIVKDCEDHEDFKDISLPGYHELKSTISAVDKQEWVKISQNISLMDQIASTIALFPDEIELTAELSKLDLPPKIVDSLLPLSFKGTINLSLKTVNRLLPHLKKGLTYPEAVKEEKFSVASTVNKVSLIPAFEKTNNPVVDRALSRTRKVVNAVLRKHGMPTNIHIELSTELSKSKKERNEISKHQNNNKQHNKDTYEEICNLLNRKPTSIEIEKYKLWLEQDKLSFYSGKPILERHLADPTATEIDYILPFARSFDNSQQNKVLCFTDENRDKSKKTAFEMFGKGIYWQGIQERAKKLSRGKSERILIEYFDERIERVWQERYLNDTRYIARKLKEHLLSLDITGKVHIRKSAAISYLRNIWGLDRVVKDDRMYVIDAACIAACTDDMMIQISNYNKYKDYLERAKGIKEPPKPNMPWISFANDVKAKLEGIFDIRTPIGKYKGTAHAEKILSVKKIDGKIVTVMKRISLQELTIKNIEDIINKDTSNKHIYEALHKQLILFPKKVDEKKKKKKEEPEFDGKKAFAQGFTHNGMVIRKIKIYVDRMRGVEVRGGLAHNKDNIRRVDIFKYQGKLYSRIIYTYNVAKKEIPAYCEGLDIPINSEFKFICSIQKNEFIECIP

SEQ ID NO: 9723 - protein, 1008 aa, unidentified
  REGION 1..1008: note = Description of Unknown: Cas Enzyme sequence
MIRTLGLDLGTNSIGWALVAGAEEGTDGHIIAAGVRIFQEAVDAKTRLPKNQARRAARALRRVLARRQRRKRKLRAVLVDAGLLPPEVQTTAPERVFNDLGNPYCLRKRGLDGPLQPHEFGRVLTHLCARRGFQSNRRSLLGAIAQDFEDVLESAQQEGALDQDDRAARREVEKDEGIVKAQIATLRSDMAAAGARTLGEYLADLPPEEHRRRRHTDRAMFREEFEALWEKQKEYLPTLCDDGLKARVHDAIFFQRPLASAKRLVGRCSLEPSRRRAATARLESQRFRLLQDVNHLAIRDPVAGRYRDLDTPQREALVSILARQRSMTWGAARKALKLRKDEVFNTEEGGRDKLKGDTTSAALESILGETWLAFPRERKLALVEDLLTIGNKADLVKRLREHWAFPREQQYRLAVLELEPGYLSHSLKAINRMLPTLEIGAKYHEAKAAAGYQDVEPPKVAGRLGRPPMVRNPVVQHTLHEVRKVVNAIARVHGVPEVVRIEMARDLKMGPAQLAAFTKQQRANEKANERAREQLVAVGIAQARRDDLIKYRLWEECGCECPYTGRPIGMHQLFSSDVDIEHIIPYARCLDDSYMNKTLCFADENRMRKRGHTPWEVYGSDPAQWEALMARVRRLPPPKRKRFVQDKVDNLEDFISRQLNDTRYLAVEVKNYVAALGSDVQVTKGTVTAWLRRLWDVNRILGVDPETKTRIDHRHHALDALVIACTGRSVYQRLASAAGRGYEQVASRPGSGVSAPWAAFGADAATVLEKIIVSHAPNRRLAGAFHEQTAYGFHPATGRYHYRKRLDSTFSPKAVENIADPVVQRLVKARLEQCGNDPKKAFATELLHSDGNTPIRSVRLTKSAEEASVTAVRNAEGRAYKYYDLGNNHHIEIFETTDGNRRFGRVVSTLESARRVRREQRPEVDRDGGPGARFVMSLMINDMFEVQTPDGPAYYRVQKISNDTEITLRRSSAATLEFNHERLRLRPSTLHGRKVTVDAIGRVQYAGD

SEQ ID NO: 9724 - protein, 1154 aa, unidentified
  REGION 1..1154: note = Description of Unknown: Cas Enzyme sequence
MVAKYRLGLDVGTASVGAAAVSLDKDGQPDALIWHHVRIFSEPLENAQGTLISKKAGRRKARMQRRQIDRRASRLRHIAHLSSLLGLKRKEITPDDGSTLPYLRAQAVTEQVELTDLMRIFLRLSKRRGYKGEFKAKKKGEVAEGSSELSLAMRSLATERGMPLKNENDTGITLGQYLLHRMECGLPTKLKVKEHSDEPKNKKGEDANAPKNLYALRKMVEHEFDTIWDVQAKCHNILNGMHDGKPIREHFHEVLFYQRPLKSASDLVAQCGLEPTLPRAPRAQMAFQRFRIEKTLADLRWGAGKRAESLIPSQKQIIRDLLNQKDKVKFEDIYEALEKAECTKPLGKGLNLDRASREELLGNGTLSALRKLDRYSAKHHPERAANLEQAFRALAKETVIDGNKEVDERTQIAVINFLAELGSPEQLDDPAWHTSFVKRDGKLRQFSEPLIAFVNCIKEHDQFDRLSKMDFDGGRASYSVKALNNLADWLEEPNWPGDWQNEMKRMDEEAAIRVCYPQSLNREIKRMGKLPAPESTGNAVVDGSLRQIRWTINKMIDDLAKSETKYELAEIVVEMAREMSLGISRRNERESENNKQQKARREAEKEIRAHGLTPTPSKIRRYLLWVEQDKSFCPYCNKNISLAEALSGGATEYEHIIPKSLTQVGMKRSEIVLAHHGCNQDKGDFTPWERWGNTDRWQSVESAAARFDAKKHYRKAKLLRLKDFEREVLTDESVAGFADRQFHQTSWIAKEAMQWLECLCPNKVSVSRGELTAMQRRKWKLETVIPEVRFENNLPVLDNEGKPIEPEYFAKLKKYLEGHPVRREDREAYPGFEFNRRPDKRLDHRHHLIDAITLSLTSRSLFQQMAKNYKAASEKMQPRDGETPEDRERRIKNETRLRLEVPEPPLRNVRAAALDAVHKCNISIKHDRYPDGALFKATAYGIGQREGEDRLRLTLRQPIADIGKVQGKIKLDTARNAIANIISDDVRRIVGDTFESRLASGMEASAALALPIRHPLYDKPIRKVRCFETYAEDAQAIGFSSRQGEHRKYLVNAGYAYLKIFTDESQKPGLIKIRDAMRDKGKSAQRNTMRIYKGDVVKDSKDNKLYRVGYFKSEGVIAVIPIFDPRSFDKITEIGSGKKKIAFAQAVKRLTLIG

SEQ ID NO: 9725 - protein, 1090 aa, unidentified
  REGION 1..1090: note = Description of Unknown: Cas Enzyme sequence
MSTATSKQNSPITVNFDIGHSSLGWAVLSPTSSTPHPDILGCGTVIFPKDDCLASTRRGHRRSRRNIRATRQRISRIKKLLLHLGVLNSEELDAIGHPAPHVLASRALLTPKPTLTWLELWHVLRWYAHNRGYDGNSRWARHENSTDDTEKERAAKQLMDTHGTTTMAETVCAVLGINPSQTTKTSSLIAFKTLNAAFPRETVCKEVRIILERHKGHLPKLDNAFIASLIDRSIDANTPEVRGIKLPKRYQGGLLFGQLVPRFDNRIIPTCPISGHKVPNKDTKEFLEYRWTMLLANIRANGKMLSIKDRKAVHRLMVEKGRLTPSELQEKIVELTGSRDTNIKTSFEIHPDSKDALVLDPARAYYLKAAENTDKKDTIGIHLFWTHLPERTKKRALGRWRKGRIVNLEWMLAQCGLEKIPTAPLEAAIDATFQSDQKKKKVFITKNHLLRKIFAPETPSGRAPYSRSVMQKVVGFVLSTDRHPTEVDGPIYRSPGVLKNERKQEICNLTNNHLIRQRLTILLRLTRDILKTYADDNPARITDITVEVARDLQEYSGLSAKEMAGELTKRLSHFKSAVKYLEEHAPDLPITGSLIRKCRIAIDMNWMCPFTGKKYDAYSLPKMVREHIIPYADRPTNALDAQVLTQDWVNSLKGKRTAYQFILDMIDDDRFLSPKNYKGNVESLKVAKEEIYPDDHRRQSARKKWLMVEHYAVKDHGFTQGALTQTSHLNRMAHRQLEKLFTDPNTGDCTTRIHAIPGQVTAEARKTWNLLGTLVPACPECEGKTKTEIRDITHLHHALDAATLGLIHHYLPGTISGQPTNEKGAIWQALLKRNKTSGDINLLLQTGVFKRTKRTDQSGNERVDAILVDLPDAVKNQLASRLTEKRVVQHMPADQSGAVLEQNPWRVWRIQGDPSKQDTPVIIRQRTSTIENGRRIYKDKETTERAGKLVGLKSGKLQKNKSVLVISDNYGMALDPNPTIIPFHDVPRRLKAQQGENNGKTIRILRNGMLVKILSDPPRSQQSYKGIWRIESCKDNKSEPALDIIRPVYLKAMNGVDWSGMNKSINPLIKAGIELIRPPLTGIPDAEQRL

SEQ ID NO: 9726 - protein, 1451 aa, unidentified
  REGION 1..1451: note = Description of Unknown: Cas Enzyme sequence
MAKILGLDLGTNSIGWAIVDKEGNDFSLVDKGVRIFSEGVKSEKGIESSRAAERTGYRSARKIKFRRKLRKYETLKVLSLNGMCPLSVAEVVEWRKSGFKNYPLNPEFLLWLKTDDDKSVNPYFFRDRASKQKVALFELGRSLYHIAQRRGFLSNRLDQSAEGVIEQHKPALLDIIENVLNGTELQIELNEYFEERDLVERKNDLDEGEKKLKTLYNSFMKIIKENTNDFEKSKLQLIERLNKKEDLGVVKQKIGEISQAMKDGNFKTLGQYFFSLYNKGKIRNQYTARDEHYRAEFEIICKAQHIEGIIENEKLPEKRYFGLAKDLYKAIFFQRPLKSQKGLIGKCSLERSKSRCAISHPDFEEYRMWAYINTIKIQTPNDEGLRFLTNDEKLKIIPKFLRKKDSFNFDDLAKELIPSGSKYEFYKSSNATSVNYLVNYNAKDSVSGRVVSTSLKNVLGEDWKTKIYTYQTKNAKNETVTRSVDYADLWHLISVSTSDLYLQEFAEQKLQLDNKRAISFSKIRLKKDFASLSLTAINKILPYLREGLLYSHAVFMANIENIVDEEIWNNLDDRKFIQTKIADLIATNTYDNSLLEIANGFLKECKTNKFYYSKEAEASYKEDLNKKLISFVRLHKIEDKQDKILEDLFPIFIEQFKKNEFIPIKRLDEKVLEFLDGQNEDGQVFCNNKSRLKKLYHPSDIEVFRKKIIKDDNGNEKVVLGSPLTSSIKNPMAMRALHQLRKVLNTLIFDGEIDNKTRIHIEMARELNDANKRKGIQDYQRDIEKNKKDYVEEIKKDYKAEKGVDIEPTEDDILRYQLWIEQDKKTIYEENYTNISICQIIGSDPDYDIEHTIPRSRSQDNSQMNKTLCSKYVNREIKKNRMPIELNNYEDILARVEPWRKKYLGLEEEIKNLSRSIKNATTKEQKDRKIRLRHKLNLQKDYFKGKYERFTYKEPKVGFKNSQIPDTGIITKYAQAYLKSYFDRVESVKGGMVAEFRKAWGIQESYIENGKKYYKVKDRSKHTHHCIDAITIACMTKDKYDVMAHAWALEDDTDKNQYKLMKSVLEQSKPWATFTQDLKKIEDEILVSHHTPDNVKKQSRKIIRIRGKKQYVAEVETDSQGKTVPKKDGNGKVIYKINAKGEKIPRYHQGDTVRGSLHQDSIYGAIKNPLNNEEIRYVIRKDLESIKASDVESIVDEMVKEKVKQAIENKVLLLSSNAQQQNKLDGKVWMNEEKQIPINKVRLYANSVKNPLEIKEHAAISKSKHEHKQKVYAQNDENYCMAIYEFEGKKDFELINNFNLAKLQKPGQGYYPLFKEKEVKGKKVQIPIAKRNNRDLVLKRGQQVIFYDKDDESPNDVDDLVDLKGRIYIIEGLSIQRIKSGNNILEYGVIMLRYFKEARKADEIKKDNFKPDGVFKIGEIKPTRKMNHSQFTAFVEGIDFNVLKTGKIEKI

SEQ ID NO: 9727 - protein, 1161 aa, unidentified
  REGION 1..1161: note = Description of Unknown: Cas Enzyme sequence
MAASNTILGLDLGTNSIGWAIVEQDGSEFSLVDKGVRIFSEGVKSEKGIESSRAAERTGYRSARKIKFRRKLRKYETLKVLSENGMCPLSSTEVEEWRKSGFKNYPLNHDFLNWLRTDDVLNINPYHFRDLASKQKVGLYDFGRALYHIAQRRGFLSNRLDQSAEGVIELCRPKIEGIIVDIDNVDDLKNEIKSYFDSLDILEKNAKDLDDGEKKLKTLYNALDKIVNSNLKDVEKSKIEIVERLNKEDQGVVKQHIGEISKAMKDGGFKTLGQYFNSLYNNGKIRNQYTAREVHYLNEFEIICKTQGINGIIESELIPEKRYSGLVKGLYKAIFFQRPLKSQKGLIGKCSFEKSKSRCAISHPDFEEYRMWSYLNTIKIGTNEDKQLRFLSQEEKTKLIPKFLRKKDNFNFEDLAKDLIPKGASFGFYKSSNNNGLHYLFNYKPNDTVSGSPVSASLKNVFGENWKSLKFEYETKNKEDKTVKREVDYKDLWHLLLVSTSDVYLEEYAKEKLKMDDKRAKSFSILRLKKDFASLSLNAISKIIPYLREGLLYSHAVFMANIENIVDKDIWNDEQQRKNIQSRIGEIINRNTFENSLLEAINGLIKECKNDNAYYSKEAESFYRDDITKKTESLLDKFHITEGNEIIIEEVYTLFIEQLKKYEFIKIKRLDEKVLEFLKGENEDGEVFCTNSKNLNKIYHPSDIEVFKKQKVKDENGNETGELILGSPITPAIKNPMAMRSLHQLRKVLNTLILEGSIDSKTKIHIEMARELNDANKRKGIQDFQNENKKEREKYRKEIKELYFEECKKEIEPTEDDLLRYQLWIEQSKQEIYEPTINGGVSNNIRISQIIGSNPDYDIEHTIPRSISQDNSLMNKTLCSQRFNRDIKKNKMPIELNNYKLLLPFVEHWKKEADKLSYEIEGLSKGIKAATTKEAKDKKIQKRHYLTLKRNYKQGKYQRFIDKEPKVGFKNSQIPDTGIITKYASAYLKSYFNRVDAVKGGMVAEFRKAWGVQESFQKDGMKYFKAKDRSKHTHHTIDAITIACMTKDKYDVMAHAWALEDDTDKDQYKLMRSVLEKSKPWPTFTQDLKRIEEEILVSHHTPDNVKKQSKKILRIRGHKQYVADVEDDENGKMIPKKDANNKIIYKLDVKGNRIPRYQQGD

SEQ ID NO: 9728 - protein, 1538 aa, unidentified
  REGION 1..1538: note = Description of Unknown: Cas Enzyme sequence
MAKILGLDLGTNSIGWAVVDDEQHKILGMGSRIFSEGVKADTIGKGDKEESKNAARRNSRQQRRQYYRKRLRKIKLLRTLINYDMCPLTHKELNDWAKWDKKKGKAGRKAPNTKPYEAWHRQNPYYLRNKALHQDLSLQEFGRVLYHLIQRRGFLSNRKGKDDGAIYKGKPGMTGITETQKQISEKTLGSFLYSIYPKEGEPFKMITDEKGNELRVRARYTLRDMYVEEFDKIWKRQVSVLGLDNKKASKTKTQFLRGSLESNRNKKKVEKLKEKYGNENVVIEKIQDKESNKTLHKITTTTVVSLKEFLGGEIQYDEDGALKHKSQDSVLFWQRPLRSQKGLLAKCRFEPDVKKDDKYLQKGKTPCHLSHPLYEEFRALQFINNIEYGRKQKLDETQRVQVLELINSKDSNFNFSEIPKKLKMTYEKWNYADDQKVPGNYTTKHLSSLFGSDVWELQKEEIWHCFHFFEDNDLLLEKLSNDFGLANKDFEKVEKIDLKEGYSNVSLKAIKNITPYLRKGYQMSDATILGGVRNAFGKRWGYFTDSHQQIEKDVLEINRTKGNKEGEAIEKIKNYLANPNNNFGFTENDKSFIKLYHHSQEIEEKPLQDKLDEVENLRNPIVQQGLNETRRIVNTLIDKYGKFDRIQVELGRDVKNSKAGRQQLANRIKENTAKNDAARQLLTEFGLKHSRENVQKVLLYKEMQERGVVTVCPYTNKSINIKDVLGRENKIQIEHIIPKSVSLDDGFANKTLCDSVFNGLKGNLTPYQFYLKNSDASLWGGATSWEAIEQRAYRLLPYPKAKRFTSKIKVEDDDVKSSFIERQLNDTRYISKKTKEILSQVCKDVRVLPGALTSELRHLWGLNNILQPVINLNVRVNDLDKDKVYPHYVVLNGNQEAVNAVPIYNQKPKLGDNETTIAGKIDKGVFKTTEKYIKLKVDAPELPNGDYWLKLKLSEPKNTVRIFKERPVVDENQIVLRGKIERSKFKNDGIGTVNANGFDNGSYWATFNVLKKHFEKPQKDKQPKKTSKQLLLFGEVEDNRFKSFIYECETNESDGKYWLLLDVDVENVNFDKAISEKPEVNQNSIVIEGSINDEGLFVSEIDPEHQFETQEKEGKYWMVFDIEQTPNEFSAIENSKPILEDNQTLIEGAIWVDKYTGEIKFDPKKNREDHRHHAIDALVVALSKQSYFQQLSRYNAARDAKKKLNPFDKEQLDFPEPWDGFHTAAKKEAEKILVSHKQNRKVLTQVRKRITKNGKTYTSVGDAVRGQLHKENVYGQRQAPFETAKGYHIRKNVADLKDNQLKKIVDLEIRKIISNARKQEAILKKQIDALENQKKKVRTDEEENTLNEQISTLKNEIANLYTLKNKNGSPVPIKKVRIREEMSNAQQVKEINQFVNPRNNHHILIYKNVNGELDKDVVNFWTAVERMKQNIDLVQLPSDGIEVIETFQENDMFLLFMEDNVEISKLDDNQIFNHLYKVQKIAGADYFMEICFRQHTDSKPSTEADYVYIKGFGDGKTGWNRFNPIKVKLSETGKFEKI

SEQ ID NO: 9729 - protein, 962 aa, unidentified
  REGION 1..962: note = Description of Unknown: Cas Enzyme sequence
FKIWLMINNLELKHIPTKTIYKNGQISQELKEELFAELNIKKQLKANEILKILVDNPKEYELNYKDGLDGNQTNAALYKVYQKIIELEGEEYDFKKLKADEINDIIISKFAELNIEQEILLLNSEKENKRFDKQPLMQLWHLLYSFEGDNTRTGDEKLIQALKNKFGFKSEHAKLLVNITFEADYGSLSSKAIRKILPYLREGNRYDLACNCAGYNHSSSLTKEEQKNKVLKHKLELLPKNSLRNPVVEKILNQLVNVVNAIIEDDNLGKPDEIRIELARELKKSAKEREFMTKEINKSTLKHENIRKKLKEIYPFNTGVRITRNDIIKYKLYEELAPIGYRTIYTNEYVKLEELFSNKFDVEHIIPKAVLFDDSFSNKTLATRDFNNREKGNKTGIDAIIDKYGKDSDDYNRYINNVNKLFNKGNGTIRKAKHNKLLMKGKDLPDGFIERDLRNSQYIAKKAKQMLEEVVQTVNTTTGKVTSRLREDWQLINVMQELNWDKYDQLGLTRYEKNKDGKNIPKIIDWTKRNDHRHHAMDALTVAFTSYEHVQYLNHMNARKNQKHEKYHAVYGIERKYMYKDDGNKLLFKSPLPLKELRFEAKKQLKNILVSFKAKNKVVTRNKNKIKIKGKNKYKIKTELTPRGQLHKETIYGKVEKYVTKEEKVGTGFDLDKINMVAKKSYREALLKRLQEFGGEPKKAFGGKNSPSKNPILVKNTNISQKHSGMNNVVPEKVKLVWKEAIYTIRKDINPDNFKNKKSIDKILDKKIKNILSERFKEYDNDAKKAFSNLDKNPIWLDKEKGISIKRVTITGVSNVESLHIRKDHNGKSILDEQGKVQPVDFVSTGNNHHVAIYRDAKGNLREKVVSFFEAVVRVNMDLPIIDKEYKKEEDWQFLFTMKQNEYFVFPSDGFNPKKIDLLNPKNASLISPHLFRVQKIATKDYFFRHHLETTVEDKRRLKGIS

SEQ ID NO: 9730 - protein, 1394 aa, unidentified
  REGION 1..1394: note = Description of Unknown: Cas Enzyme sequence
MKKILGLDLGTNSIGWALIDKEEQKILGMGSRIIPMGTDKLDYEKGAGITKNADRRMARTIRKMNKRYKLRRNKLLFILNELGILPDQFQFKDGIPEPTKLQDLELLPIKKGTLQLNSLTHYQLRVNALSKAITPKDFGKILYQFNQLRGYAGGGNNDDNSKKKEDETTEEPEKKKSYEVITQKVSIINIETSDRTYKAKGGKNKGQELPLFAVTFLLNDEEKEGTTILQNLEIGKEEELEIRIKQTKIGENIIIALPQKTNWKKQMESTEDIIKTERLFVGQLLLKDLLNHKWTKVRNRVILRSRYQEEFDAIWKEQAKYHSILNNCSLKKLETIANYLYPGSSNTQNDLRKDAMEGGLKYIIKQQVIYYQRPLKSQTELISKCQFEKEEKVIATSNPLFQEFRCWKQINQLYIRSKEGVYNERKNKTIYKYSDRYLTNEQKNDIYIKLQNQKQVGFSDVAKIAGLKNDKTEYLNGLNVKAKLKGCDTAITIKKMLGDELSTIINQDKEIVLKIWDSIFDLNNSGNEYDVNSKKVSSLINILSTVTDKNNAIVIALKLAQNISYPRKYASLSAKAITNILPLMQLNPVEMSNIIKENFEKIKHAIDTGELKDGIEPYMVDYIDSNPNIIENGGMMDSFAASLVYGKHTIADINATVKNYHDIKYNPTRNLRNPIVEQITNEALQIIKAIWKEYKFNPEELEIRIELARDLKNSAAERANIYKSQLNNQKQNNRIKERLVEEKMPVTDENVLKYKLYEHQKYLSPYSGDTLAISLFDEYEIDHIIPKSRLFDDSISNKVLVEGFLNKEKGNRTSWEYISQQNTKYKIRSIQAFIDMVNDNYFGRKKKNLLLEKIPTDFVERQIKQTQYIALAVKAELAQIVGSNNVKSSTGEITSFLRSRWGLRKLFMELTESRFKQMELWDSSNKWVNRYFDEEQKRNVYEIKYWSKRYDHRHHSIDALVVALTEKWHIDRLNNLNKELQDWLYTHKNEINLEVKEDETVLEAFFNLEEKRRDEIQKGIDGFRKFDSPFSDLVNQARIHLDAMVVSHKPKDNLTIQFNEKTKKKEIKIRSALHEATLYGKHNGQDTKTMSISNLTAKDIQKIVDPVLRAEINKHRSKSEYGSMKEAFSGEGLKAFNESRFQRKKPQSWKPPVFKVKIYYNTKEVKESSLQRLYENNNKLSVKTGSNYLFLVMATSDNKRVFDIVSLYDAADIAKREWKNQSENFMNKIYEEYIILNKKYNADKVLFALQQNELVYLPENVDDPTLNFTSDEFAKWISQKENKTKFNKRVYKVVKFTGKDCFFVPHNYANTISIAKDLNDEQKARLKNQYGEKKIPKKKLNFEEFGSFGTSAKTEVNENFVKILIDKTYTTEPMKIQDYCIKIKTDWLGKLQLV

SEQ ID NO: 9731 - protein, 1134 aa, unidentified
  REGION 1..1134: note = Description of Unknown: Cas Enzyme sequence
MSRVLGLDLGTNSIGWALIDETKNQIIGMGSRIFPAGVNDLGQGKKEVSKNAGRTDARGKRRQFFRQRLRKRFILKILSENGLCPIPPEDLKPWDAKTVFPKLIGWFKLNPYELREKATHSQISLEELGRVFYHMIQRRGFQSNSRSAGKEDGTIYDGKPKEGKIGINDTRNSIANKTLGSYLYEISPKENEAYIENLERIRNRYTTRQMYIDEFEEIWEVQKEFHKKLNKELKTKIGGRKKEGYDHDGVLFHQRPLRSQKHLVGNCTLEPKKTKTPISTIIFEEFKIYQWVNTVECNERKLSSEDRELLAQELLIKPKPKFKALRKVIDKLDSGYRFNYKDDDKISGSHTISSLSNKKFFGKKWFNFSNQEKENIWHTLYDFEDISNLKEYAIKKWGFDNEKAELIAKFNLKDGYSSLSKKAINNILPFLKLGYTYDIAVVLGGIKNAFGKQWSSLIKEEKDLILDNIYDIVREGRKGGFIKGLKEFLVLEYNLTHKDLEKLYHHSANIGTSELLNKLPLGKNADKEIQSIKNPIVITALFEIRKLVNEIIQNYGKPDKIKIELARDLKISKTKRSDIRSEQKRLEKKNDKIKEELDKLNQRHTHDNILLYNLWGECNRTCPYTNKPITVKQLFTGEVQIEHIIPWSKSLNDSFMNKTLCFADENRAKGNQTPYEFYKKQGDEKWEAVKLQALSCFKNKTDYPNAYAKFKQFIKAKYDDDFTSRQLNDTRYISKKAKEYLSQLVGENSIDVSPGQATAKLRHHWGLNSILNDENKKSRDDHRHHAIDALVVACTSRSHLQELSKWNRYDRNVALKNFPMPWSTFFEDANNTTQKILVSHKISNNVLTTRLVTVEKNGETYTNQSIAARGQLHKETVYGKRTAPNSEEAYHVRKVLTALTEAEIPKIVDDRIRALVYERIKDNGLEKDPKNNKVLTKEKKDKDVFKIIFNEPLYLPNKNGNPVPIKKVRLKKDFGNAEPLKGKEINQWVDLRNNHHVLIYKDEEGKLKEDVVTFWTAVERKRQGQNLIQLPPKDSNGTIITTLQINDMFLLGLNEKDLDWDNLNYTKIHQHLYRVQKFTAGDYYFRKHIESSLDGKLGVSYQYIKGFGTGKTGWKTFNPIKVQVSVSGKIKIKQ

SEQ ID NO: 9732 - protein, 1603 aa, unidentified
  REGION 1..1603: note = Description of Unknown: Cas Enzyme sequence
MSKIISPIAIDMGAKNTGVYYAHYQRNSTFQEVDKKGQVLVYGNYTPLLVSRTANRHTRRGYTRKKLAKRLLSVVLKEYFDFPAEKHTQALGFLMNRRGFSFLEEEYSKEYLNNLPNDSWEALSEEVQKMLGGQENIADRLMNLATTNPSEVTKLLEAVQNIKGYKDFQEEDKEIKADLVYFDYIEKISKACKLVKKGESIEDDKVTKSKKDKQNLSKTANWVVARLNNENALNLTVATESYQTNLIEEITQINYQQIQNNLPDFEKEREVIKQRKKDNNTSDWKFNYSEFKFNTPNEKGLEEDVARTHLHHFCYAVYKINNEIISGGRHRSKFFDEIKDDLDNFTTNSFLNNKHNPEYLKDFILAINENKGLDVDKLYKLVCHISNFELKPLRKYFNTEAYKSGDKLDNKNLSKITSRWFLQHWIVTKEKDKEAKVEDYEKLKKAWRAHQKCQDDNKNNIISFWLKTDPKLTIPPYQAMLNRHPPKCQSLLLNADYLNKHYPHWEDWLDDLNSNEEYQTKLQSLQRGKGRRKAKNGKEIDGRLLDDEKIKTRQLQFILDTAKKQDFYKLNEIWSVYHKLQKSDVDKIKWQEKLEKLIDVSKLPKDLKQDLDFSQEESFGHFLNKYYQTRRKARDGRYFLIQEKKEKWLTNNKLLILCTHKPRQKKHQWQLDLAAVLGVNADDLKAKIVGNPEDYFKSIKGFASNCEKAAKAQKEHRGELKHKIYTELTSNPIDKLGKLANKCSNLKQELSKEIGISELLADKQTNEVNKKIALVFKFAQIHSIVFKDRSGFSKTCPVCSTDNAFRMQENDKGITKASRLPALSIRLIDGVVMRICDAIARQVAVTKWNDIKDDLQNGTKVSIPLILEQNRFEFEPSLKSIKKGAEFKEKDRIKDDRTNNYKGQKVSAYSGDELGTDGEIDHIIPRSSQHGTLNDEANLIYISKNDNQRKGSDIKFLKDLHKNYKTEIFDEKSDDEIKEFIYEQLGKDVESKEFAFGKYLSFINLKEDAKKAFRHALFLQEGDPLREKVISALNNRNRAIVNGTQRYLAQCIADKIHRIAKNENKHNLIEFDYLEYTARWDDPKSTYNLRKRYGLVKSKKQPLYSHLIDAQLAFLLASEDHQNDGTMGIKFDNSQTILEHEANKETGEISPSKSFNAIDVGESALKEIDLSPKDSNQKIIDIEKNNSNKKQNLSKIFKRPIFKQNAIGERYKPIVKFKDKWYLGYPMTIKGGIYNCDEYCQEVDSKNDIKKIEGIVNDNKYYQLTTDHRQIKIWTIKIVDKKYKKINKDSHRYFSQLNPEYSNDEKKEVDQIKFILVECKYYVTKTDVREAPKILKKIEDKKYPFYKNWVAFDKAWQDKIGDDYSVNKKGEEYVFSDETVNEKWNSFCRSWFSPHKNQHKSKHQVKGKKYTMRSFGTSPGTVFRVNRNNQNIYQALPLDGHIISKEKSNFLIKHSKNLTLSSPNSDKDLAKPIDLEEKIELKNYNIPVNKFFKAELEGVRVFLNNTSVDIRNFPLDKFREYFNKKIDDKGTIPLLTKETAESKLTTDSKLLYAHKYKVDDSIKYKTRDGGVENIKIEAEERLVSFSLPFRYKVAQKIYEDSKG

SEQ ID NO: 9733 - protein, 1393 aa, unidentified
  REGION 1..1393: note = Description of Unknown: Cas Enzyme sequence
MSKKILGLDLGTTSIGWAIVNEAETESEKSEIVKTGVRLVPLSSDESTDFSKGKTITINSDRTLKRGARRNLQRYKLRRDELLKVFKKSKIIDDKTILPEEGEGSTHTLWNLRAKSVTEKVSLSDFARILLSINKKRGYKSNRKAKDEGDGQAIDGMEVAKLLTNNRLTPGQYALELMNQEKKHLPDFYRSDLKAEFNKVWEFQQKFYPDILTDELMMALADKNKAASWAICKEPFKIVGEKRTTKGKELKKENYQWRVDALTSKLTLERLAIVLQEINGNVSNSSGYLGAISDRSKELFFQNLTIGEYLFAQLQNKKHARLKNQVFYRQDYIDEFEKIWNEQVKHHSVLTNELKKEIRDVIIFYQRRLKSQKGLISICELEKREIDLIGKDGEIVLDSYGKPKKRIVGPRVIPKSSPLFQEFKIWSILNNLEFKNSKTKQKYSIDDVDEELEIRNRLFLELNRKGKLSSTHILKIVFEKDSKNWELNYKDGLEGNNTNQVLFKAYQSIIDLSGHEGIDAFDIEAAAKIFEAIGIDKEILFFDSELKGKEYENQPSFQLWHLLYSYEGDDSISGDEKLLLHLKEKFGFTREYGNVLVNIVFKDDYGSLSTRAIRKILTFLKEGNDYSESCGLVGYNHSHSITKEENEKRELKEVLDLLPKNSLRNPVVEKILNQLVNVVNALIKEYGRPDEIRIELARDLKKSSKERADATKGINAANKLHDEIRVELKNIYPFNSGVRITRNDIIKYKLYKELESNGFKTVYTNTYVELGKLFSKDFDIEHIIPKSLLFDDSFSNKTLSVREFNRWKSNKTGIDAIEEKYGKDTDDFNRYINVIEKLFKDKKISKTKYRKLLMEQKEIPDGFIERDLRNTQYISKKAREILLEVCRNVVPVTGSVTNKLREDWQLINVLQELNWDKYDKLGLTKYEKSKDGKDIPKIIDWTKRNDHRHHAMDALAIAFTTRNHIQYLNNLNTIVSIKDYSELPHEKSDLYGIREKVIEVYEDKKGNTKKRFKSPIPIKEFRKEAKKHLENTLISFKAKNKVVTRNKNKTKKKGGYNEKIELTPRGQLHKETIYGKSKLLLEKPTKLNKKFTIEKANLIAIESVKKCVLDYMRVYENNSEKAFDTKRLKKKPILFKGESLTEVFCFEEIYTIRKEISPDLKIDKVLDLKVKEILKARLSEFGGNAKKAFVNLEDNPIWLNKKADIQIKRVTITGVSNAEALHYKKNHLGKEILDNKGEKIPVDYVSTGNNHHVAIYKDETGKLQEKVVSFYEAVIAVNNGMHIIDKSFNKHLGWEFIFTMKQNEMFVFLNEKTGFDPNNIDLLDEDNYAKISENLFRVQKTGTKDYTFRHHLETTIDSKLKDITYLRVGLNGINGAVKIRINHLGKIVHVGEY

SEQ ID NO: 9734 - protein, 1439 aa, unidentified
  REGION 1..1439: note = Description of Unknown: Cas Enzyme sequence
MTKTLGLDLGTNSLGWALVENNREDNKEIFKLNDKGVVIFSEGVKIEKGNEISRAAERTAFRGARRLKFRRKLRKYETLLVLSENGMCPLIKDEVIAWKKSGFKNYPTNETFLNWLKTDDDNQKHPYFFRDQASREKINKLELGRAFYHIAQRRGFLSNRLDQSDKGVIEKHQPDLLEIIESSNTKTELIITIDDYFKEQNIIGFKLKGIKDLDAGGTELLKLYKSFKRIIKENDDLKNLKISINERLVRRGTLGAVKQGISDLDDEIKKGKFKTLGQYFNSIYGKSNQRIRNQYTAREEHYLHEFEQICKIQELGKIIEKENEPNKKYKGLTLDLYKAIFYQRPLKSQKGLVGKCTLEPTKYRCPVSRPEFEEYRMYQYLNNFKIKTPEDDKMRVLTIEEKQKAEYLFYRKSKTSFDFEEVVKKLIPKNEKAIYYKNKEAKTAKYVVNYSLNTALSNCPTIAHFRAIFGEDWKNLNYTYTTIGKKEIEKTRTATYQDIWHVWTTFTTNDKLYDFAITKLGVSEKQATQFAKVTLKKDYASLSLRAITNILPYLKDGLIYSHAVFMANMKNVVKEQHWNNADDRKLIQSEIKNIIDNHQIENKLLFVINGYIKTNIKSSYSKEADTIYRKELDASFEHEFGKKKWLETNINNLFEDNYTVFVKQFEKKEFLKIKRIDEKVINFLIDNDLLSNENKLYHPSDIEKFKLDKAKNKEGIEFTVLGSPLSNSIKNPMAMKSLHKVRKLINTLILEEKIDEHTKINIELARELNDANKRKAIQKWQYEKEEERKVYRKKIQELYQPNFEPTLNDLEKFKMVLEQREDKKIVSKEDVSKYKLWEEQRHICLYTGNTISLSSFLSKNPNYDIEHTVPRSVSIDDSQMNKTLCENKFNRDTKKNQIPFQLVNHAKIMSRISHWKEKYQKLDIEIKGLVKASKTATDKEAKDRIIQKRHYLKMEYNYWKGKYKRFELEEVKAGFKNSQITDIGIITKYAQQYLKSYFKRVYSVKGTMVDQFKKAWGIKFTIKDENGIDKKDRSNHIHHCQDAITIACMTKNKYDVLAHAWRLEEKERFETAKKELENSKPWKTFSKDVKNIQNEVLIVHSHKDKVPTQSKKKLRVRGKIQRNKKGEVIYQQGDTVRGSLHKDTFYGAILEENAENNKTFSQDKEGNGIVKYVVRKPLDGIKKTDVDKIVDETVKEIIIQAVKDKILVAKKDVYKIETDKTVWMNEKKQIPIRKVRVYTPSIKNPLKDFKKHAIKDKSKHPHKREYYVQNDENYCMAIYEGENKKSILKRSSELINMLDASKLLKLKRSNHSRKEIVSEFDGKTNYPLKYVLTKGKMVLLYENSPEEIWELSDAEKLERLFEITQLDKEGNGIKLLFHQEAREKKKITAFMGLKVGMKGGKNIGEHKEFPWIKIGPNAFDALVEGYDFKITPLGKIEKI

SEQ ID NO: 9735 - protein, 1509 aa, unidentified
  REGION 1..1509: note = Description of Unknown: Cas Enzyme sequence
MSKRILGLDLGTNSIGWAVVDEAKEEIVNAGVRIFPEGVVSKTIGSGDKEETKNAARRRARQTRRQFYRKRLRKAKLLEVLIEQNMCPLSLDELNKWRHWDKKEKSQAKVFPNSDEFMNWIRMNPYELRARAIIGTVTAMELGRIFYHLIQRRGFLSSRKGDVKESKTLFEKGKPELNILPINRTEKEIAESGCQTMGEYLNRVVPKEGESYKPILDSDGNEIRARGRYATRKMYVEEFEAIWNAQADHLGLDKRSVLFKKVRMLKGNENSERNKKRISTLKKFYGAENVFVENRGNNLHITTTRTLPFKIFLAGDDVELKRNESVLFWQRPLRSQKGTLGNCSFEDTLPVINMDGTQRKNEKGKPVTYSKKPCPISHPLFELFRTHQFINTIEFGEKQRLSKDQKKQVLELINRKDNAFSFKEIVKKLELFSETFNYENDFKVSGNYTISKLSKLLGKKVWDEHPLAYWEAFYFYDDSTKLQKKLNKAYGLNLKVEEVDKIRLKEGYSRVSIKAIQNILPFLEKGYFYSTAVILGGVKNAFGSRWDSYLQDETKEKIEDDILKMLKDKNKEGELIEKIKAYLSDSSNRYGFSENSPAFKKLYHHSQSVEKKELKNKLPPVENIRNPIVQQSLYEMRKVVNALLEKYKEEDPTFSFSSIRVEMGRDLKNGKKQRQKINQVIRKNRENNDEARERLAEFGLQPSRNNIQKYLLFKEMERRAGHVQSPYTGRTISLTDLLGKDNLIQIEHIMPFSKSLNDSFANKTLCESSVNGLKGDKTPYAFYHQNPDPKIWGVSSWDEVKHRAFKLLPYAKAKRFVSDKSVDAEDFISRQLNDTRYIAKKATEILSEICSDVQVMPGQLTAELRHLWGLNNVLESSFGVTKQFSDIPLKPGEYYLVLNEQRESIQLIPKHNPKPKTNPNELLVAGEINNAIFESKKLVLELGAPDQANGKYWAKLTLKPIQKFSPKYISKPITDENRIVFKGLVKNQRFSSDSIPKNPIAEHKDGIYWGSFAVKNKRIERSTVAPITNRKEIKLFGEVKDGIFKSYIYECSTTAENGKYWLVLEPDFETPEFIQASNPEPQHSENEHIITGTIDDNGVFVSDLDPSYSVKTDHSAGKYYAVIELASKENDFYLMENPAPKVEKEHRLIEGTVWVDKYSSELKFDPKKNREDQRHHAIDAITIALTKRGYLNALSHYRAKELPEDYKPSFPEPWDGFEHDVKNAAEKILISYRKNDRIISKGKKGFSVRGQLHKENVFGKHKGKEDEKKSFYHRRKYLNDLKTNKHVSKIVDERIKQLVLDHLKNSCGVNISSEKGFKIPPNAFFTKDGKPRLFLPPNPRKKKNSQPVPIKKVRIKEEIGNARQLKNGINQYVNPRNNHHVMVYKTHSGDVKESIISFWDAVNRMKKNQSVYQLPEDGVEILAVLEQNDMYLIGITDEELEKRKNDQKFLSNHLYRVQKLSSMYYTFRHHLASTVTNPDEEERIVSFDRFQLRNPKKVKISELGEISLC

SEQ ID NO: 9736 - protein, 1441 aa, unidentified
  REGION 1..1441: note = Description of Unknown: Cas Enzyme sequence
MNKKLGIDLGSASCGWAIREGDEIIKKGVVTFSTGMMKGKGGYSSPTKDRREARSKRRLIQARKYRKWELLEILIKNNLVPLKIEALELWSKYQKGVQRKFPETEEFLQWLACDFSYDNGDKYNNPYEIRVKGLDEQLTKHEFGRALYHIVQRRGYKDIGETDKETDTQIKRRDGEEGEDGFKAAMQKHKFISKALQKEFLEKGKRARNEYPFRDEYQDEFEALCNTQGFDSSKKKKGEYNNKFIQSLWKAIIWQRPLRGQKDKVGKCTLEPNSPRIPVSHPLFEIFRTLQYINTIKTVDENGAKKQIPKEYRDSLLIDEFTKRDSNFKFSIIKTYLDKKFQQKMEYNYLNKRTGKYDSTVSGMPVCKNFIGLFGKEIITDLLKLADYNSTSKIPKTIKGYSIHDLWHIIFNSDDLSFLKDFAENKLGIESTIKEKNDKKIRENEFANLQKVFMQGYSDLSAKAIRKIIPFLQDGKLYNEAVILAKIPELLGDDWEGKSEEILNSIEKCTVLYDYNSEIINIVNGLVNSYKGLEYNYEQNYHPKDQYSETTYQLDEGDIRGIEKSCVKYFGEKSWEKKDNKEAVLDDVKIAYQDFFKDSKRAYRVKTTHTELVAESLKSIEIELHGELYHHSDRKNIYPKPIFSEKYEQNILAVPLIDSIKNPMFNKAMTILRKLINELIIKGEIDEFTEIIVEVARELNDNNKRAAIEKYQNEKKRNREKYREFIKEFNSQNNRDINVSEKIDDFELWTEQIFDENQNKKIDDKISNRLSILRETKAIDRYELWTEQKGQCMYTGKMISITQLFSANIEIEHTIPRSLLPDNTKANQTVCFSKYNSDVKNNKIPFECPNYENDDKNGTAIKPRLATWQKLKDKYQKDFNDNKRAKGNEDEKKKSERIVRKHYAKMHLDYWSDKLHRFTCEEIKDSWARRQLVDTQMVSKYAREFLKTYFKKVNVEKGIVTAQFRKIYGFQEEDEIKSRNKHTHHAIDAAVLTIIPNNSSKKKALLEKSYEHQERREGQYTTSPYPNFNAQVLIKNIEETTLIFNHTKDKIISQTYKKVRKRGKIQKNEDGTIKWMKGDSIRGDLYGQTFLSKIKNVEFDENNKPKRDEKGNWEFKTGKDEFTYATKKPIEEVKSKYIKDIINPEIKRLVEEQKNNKNGILDHQGNKIRHVRIKTNKGRVVKERVNYRSKNEHKNFYYASAGEIPYAVMLEKIIDGKVEGRKMIPIAIHEVAKVFKEHREFNEDLYLDFFHNGLKENYNNWRLLSIGQKVMVLQNEDELEEAADINFQKNRLYKITQFKYDGSKIMLSYHLEAQSKKNIDTQVKENKHTLLADFELEIGISKLIPNENIENAKDRSEDYQKRKNNFKERLEVVKNHSNGGKERSKKIETKISKYKTESSSIEIGVMIPILGFSQKSWNFLYEGEHFEMDILGDIKILVENL

SEQ ID NO: 9737 - protein, 1370 aa, unidentified
  REGION 1..1370: note = Description of Unknown: Cas Enzyme sequence
MKKILGLDLGTTSIGWAYVHEAENDNEKSEIVKLGARVIPLSTDEETDFQKGKATSINADRTLKRGARRNLDRYQLRRKNLMEILKQYNFINDNTILSEEGKETTFSTYNNRAKAVCEKISKEDFAKILLMINKKRGYKSSRKAKSDDEGTAIDGMEVAKYLYDNDLTPGQYIYELLKQGKKYIPDFYRSDLQKELSVIWNFQKQFYPEILTNEFKEQIVNKGKQATSKIFLGKYGIYTAENKGKRDEVKLQAYKWRNEAINIKLTKEELAYVIVEINNNINASSGYLGAISDRSKELYFNKITVGEYLYNQLKDNPHSKLKNQVFYRQDYLDEFEKIWEKQKEFYPELTNELKKEIRDIIIFYQRRLKSQKHLISECEFEKQHKVVPKSSPLFQEFKVWQMINNLEIKHIPTRKVYKKEQIEQDVKELLFNELNIREKLNANEILKILVDNPKEYELNYKDGLEGNRTNAELYKAYHEILMLEGEEYDFKKLRFDKINDIIVSKFAELGINQELMSFNIEKEANEFDKQALIQLWHLLYSFEGDNSPTGDRKLVDGIAKKFGFKPEYAKIIANINLQADYGSLSSKAIRKILPYLQEGNRYNTACTYAGYNHSSSLTKEEQEKRELKDFMELLPKNSLRNPVVEKILNQLVNVVNAIIKDENLGKPDEIRVELARELKKSAKERADMTKNINSATARHEKIRKILQTDFGITKVTRNDIIRYKLWEELESNGYKTIYTNTYVPKEKLFSKEFDIEHIVPKALIFDDSFSNKTLTVREINLKKSNETAVDFLQNYLNDNEFNQFKARVEKLYKDGVIKKAKYNKLLMKAIEIPEGFIERDLRNSQYIAKKATQMLQEVVRTVSATTGSITDRLRSDWQLINTMKDINFPKYEKLGLIETIEGKNGRPEKRIKDWTKRNDHRHHAMDALTVAFTKPAYIQYLNNLHARNDKSSSIYGIELKNLHRDKNGKLVFNSPLPINEFRTEAKKHLEQVLISFKAKNKVVTRNKNKIKIKGKDNFKTKIELTPRGKLHKETIYGKIERYLPKEEKINAKFDLEKIKLVAKQSYREALLTRLAKFDNDPKKAFTGKNAPSKNPIYLADGKSEDVTQSDALIKMSVPEKVKLVYKETIYTIRKDITPDLKIEKVVDVGIKRVLQKRLDEFNGDAKKAFVNLDENPIWINEKKGISIKRVTITGINNVEALHYKKDHNGNLILDDKANKQAVDFVSTGNNHHVAIYKDTKGNLQEEIVSFYEAVHRVNAGLPIINKEKEGLEFLFTMKQNEYFVFPSDDFNPEEIDLLNPDNASLISPHLFRVQKIGSKDYWFRHHLETMIDDRKEVKEYSFKRQQNTKSLKGITKVRINHLGQIIKVGE

SEQ ID NO: 9738 - protein, 1370 aa, unidentified
  REGION 1..1370: note = Description of Unknown: Cas Enzyme sequence
MKRILGLDLGTASIGWAVVNEAENNKEKSEIIKLGVRVIQYDNFNKIDKLGKVSESKNPVDDFIGGKGLSPNAKRTQQRGARRNLQRFKQRRKYLIDILIKKGFISNNTLLTEIGNNTTHQTLALRAKSAKEKIEKEEFAKVLLAINKKRGYKSSRKAKNEEEGSLIDGMSVAKELYDNNLTVGQYVYQLLENGRTYIPDFYRSDLQNEFDVIWDFQKQFYTKILVDKLYKDLQGKNKTQTWAICQKPFEIVGVKRETKGQKLKLENYKWRVDAITEQLNLEQLAIVLQEINNNLNKSSGYLGAISDRSKELYFEKETVGENLYKQIKNNNHTSLKNQVFYRQDYLDEFEQIWETQAKFYSELTNELKEKIRDVIIFYQRKLKSQKHLISECELEKHHKAVPKSSPLFQEYKIWQRLNDVVFTSKNKKEENQEFVLSEELKEQIFEELNLRGNLKIPNILKIIGQNPKEWNCNFKELDGNRTNEALYNVYQKIAEYEGYGFDWVKKSALEINEELKRIFPLIGINPKILDFNSEISGNDFDKQESYELWHLLYSADEDDAINKKLQKGYGFKPEYANMMANISLQQDYGSLSARAIKKILPNLKSGHEYSKACEMAGYNHSHSLTAEELANRPLKDRLELLKKNSLRNPVVEKIINQMVNVVNQVIETYGEIDEVRIELARELKKSAKERAEMTSNINTSKTKHEGFRKLLQQEFGIKNPTRNDIIRYRLYEELKDNGYKSIYTNQFISREKLFSKEIDIEHIIPKAKLFDDSFSNKTLAFRKPNQDKGNMTAVDYINKFHNSDVEKYNFRIENLFNKGKGVISKAKRNKLLMEEKDIPDGFIDRDLRNSQYIAKKAKQLLEEVIRTVNTTTGSITSKLRDDWDLINVMQELNMPKFKAIDESLIEQVEKKDGTFKTRIKDWSKRNDHRHHAMDALTVAFTKHSHVQYYNFLNARKNKEHKEHNNIIGIQKLETYVNSKGRRKVIKPMPHFREEAKKYIESILISFKAKNKVVTKNINKIKIKGKDKFIEKIQLTPRGQLHKETIYGKIKEIVVKEEKINAKFDRIKINQVTKPCYREALLKRLEEFDGDSKKAFTGKNTLSKNPIHLNETKTLPESVKVQFFEENYTIRKEITPDLKIDKIIDKGIQRILQKRLDEFDSKPKEAFVDLEKNPIWLNEKKGISIKRVTISGVKNAEALHTKKDHLGNEVLKDNNVIANDFVSTGNNHHVAIYKDEQGKLQEKVVSFYEAVARVNIGLPIIDREFNKSEGWEFLFTMKQNEMFVFPSEDFNPNETDLKNNINAHLISKHLFRVQKIATKNYFFRHHLETTVETQKELKGIAYKAQLGLNSIEGVIKVRINHLGEIVHVGEY

SEQ ID NO: 9739 - protein, 1417 aa, unidentified
  REGION 1..1417: note = Description of Unknown: Cas Enzyme sequence
GARKSKAAERREKRGARRLNYRRKIRKINTLKVLIEHKMCPGITREDLNAWRYERKYPENEAFRNWQNTNDLSEKNEDKTARNPYLFRFEAIDRKFDEKEKQKLGRAFYHMAQRRGFKSNSLDGGSDDAYDAFHESLLKEFNQKHDSIDEVIDILTTLTEGESDQKSKKLKNRLLKILKKASNLEDAVSKCVGVLEKPEFLGKVKRGIHDLDLKIQDSGARTLGEYFFRCYEKGEKIRGHYTDRENHYEKEFNEICRVQGILQESDLYKDLYDAIFYQRPLRSQKGLVANCSLEFRLPVFKDGEPLYLADKLVTYSKRCVSVSHPIFEEFRMRSFINQIKWKKAGESQMSFLSAKQKDEIEYLFYRKSKPYFKFSEITKKLFGKNSLVERVRDEGTVQADYFVNYALDTSVSGCPVIGVFRKCFGENYQQTLDESYLGNRENKNGNKKTSDDILTEAWGILFSREDSLERKRQLIKKWTVSEETAKEFSEIKLPPGYASLSLAAVRKIVPLLKEGMIYSHAVLFANLPAVLRTSGRDPEEIKKELSGMLDVYSDHRKQVAIANELIADSETDESLMNELKWPAEFEKKVGEKFVQKFGSSVWNKMTEDEQEDFSLKVVELLKTQNAVQNDEGRWVKLVPLKGMLNDILINTFKVSKERAMLLYHPSDILKHNPYRKSETGLLESPIVSSIKNPVFMRTMHRLKAVVNALIQDGTISDSTEIHVEMARELNTANMRAVIEAENKKREERRKKYAKIVKNLMGVDATETDLLKFKLWEELTPEDSEKDWIKLNEKIEEKSLKYELWEEQKRICPYTGKTIGLADFLSDDPAFEIEHILPRSRSYDNSEENLTLCCKDYNRKVKKDKIPFECDNHKEILPRIEHWKKRAKELDWEIKKTISAARNADPERKAKIIQKRHRLKFERDHYAKKYERFTMKEVPNTFANRQLNDTRIITKYACLYLKSVFKKVMTVNGLTVAELRKQWGLQHDEKKSREKHTHHCIDAIVIACMTKGQYDQLAHFYTCQENEKFKHGNPVKPIPQPWANFIPSIKQLEEEVLVSHYAPNHLLKQTKKCTKIRGKKLLQQGKTARGRLHKDTFYGAIKRQEKNKKGELEETIKYVVRKPLADLSEADRKKIVDDRIREIALEGLKKEIALKKDLEKLRKQIPKVDDAEELIIKEQIKEIEKQLDTLYLLPNKNGKPIPIKKVRIYTKLTNPIPLKKQRDVSEKRSVPYKEKYYVNNDGNYLMAIYEGVNKKDKITRKYKLLNNLASANGASPEESFEGLHLLKIIKTGQLVLLFKENPSELMKMTQTELSQRLYIIRGLDDDGIKLYFNQEARMTTDVITFMNSIITEENRKNGVFDKNGEVKKSKLTTPKGGDVIDKQKEFPYIKFKPSRFNVLVNETDFKMNILGEIEFLKK

SEQ ID NO: 9740 - protein, 931 aa, unidentified
  REGION 1..931: note = Description of Unknown: Cas Enzyme sequence
MSKRILGLDLGTNSIGWSVVDEVGGTQFELIKRGVHIFQEGVKIEKGVESSKASERTGYRSARRLKFRRKLRKIKTLKVLSKAEFCPSLRLEELKAWQSKKIYPVNSEFKEWCRTFDPKDAKEGSFKNPYYFRWLAATTVLDLTKKTDRFLLGRAFYHIAQRRGFKSNRLDTTKESEGVVKKDITELSEKMKGRTLGQYFWEECYKTGDKIRKVHTSRDEHYLAEFNFICEKQNLSEELRSKLHRAIFFQRPLKSQKGMVAKCPFEPKKKRAPISHPLFEEFRMWQTINNIKIKTQNDAELRPLSKEEKDVIVPLFLRTKAQFDFKDIAKKLTPRGQSFGYVKGRDRDAHILFNYRENQTLSGCPFSSALKQIFGEDFKASIYEAYQGEKKNKIGEEKTADDILHELWHVLFSFDDAEKVKKFGKSKLGLDEEQSEKLAKISPKQGYGALSLKAIRKILPYLRQGLLYSHAVFFANLEEVLGEKVEKTESVKNDIAQLVDHHNQYRDEARCVNEFVREYKNNPKEFFEKYDLRKVESFSKNLPHSLKDKADKICAKIRQQISMNNDNGEYLPVQRLDERVGNYLIEQFGVEPKLLEKLYHPSKEETYKPAKKHSDGKYYLGDPRISSIRNPVFMRAMHRLKAVVNELLKQGVITDQTQVHVEMARELNDANKRVAIKKWQGRNEKKRAEFKEKIEEILKGQGIEREASEDEILKYQLWEEQKQICPYTGQTIVPSQFIGENPKYDIEHTIPRSISCDNSQTNKTLCDRTYNREIKKNKIPFECPNYDEILPRIEHWRSAIDELNTKIENKRRASQRASTKELKDRAIQERLVFEMDKNYLREKYRRFTMDEVTTGFKNSQLIDTRIITKYARLYLKTVFPTVHSVNGKITDDFRRWWGIKKTRDNHAHHTIDAIVVSCVTRKQYEKLAQFY

SEQ ID NO: 9741 - protein, 938 aa, unidentified
  REGION 1..938: note = Description of Unknown: Cas Enzyme sequence
FKASIYETYQGEKKNKIGEEKTADYILHELWHVLFSFDDAEKVKEFGKSKLGLDEEQSEKLAKISPKQGYGALSLKAIRKILPYLKQGLLYSHAVFFANLEEVLGTKVEKTENVKNDIAQLVDHHNQYRDEARCVNEFVREYKNNPKDFFEKYDLRKVEGFSKNLPYSLKDKADKICAKIRQQISMNNDNGEYLPIQRLDERVGNYLIEQFGVEPKLLEKLYHPSKEETYKPAEKHSDGKYYLGDPRISSIRNPVFMRAMHRLKAVVNELLKQGVITDQTQIHVEMARELNDANKRVSIKKWQGTNEKKRVDFKEKIEEILKGQGIEREASEDEILKYQLWEEQNHICPYTGQTIVPSEFIGENPKYDIEHTIPRSISCDNSQTNKTLCDRTYNREIKKNKIPFECPNHDEILPRIEHWKKEIERLDDLIQKKRSASKRATIKTDKDLAIQQRIVLEMDKNYLREKYRRFTMDEVTSGFKNSQLVDTRIITKYARLYLKTVFPTVHSVNGKITDDFRRWWGIKKTRDNHAHHTIDAIVVSCVTRKQYEKLAQFYHEYESYERRDPSIPRKPHFFKPWETFTEDMKNLKNEILVSHYAPNHLLKQTKKWTKIRGKKVLQQGKTARGSLHQETFYGAIKRQLENKKGEMEEIIKYVVRKPLADLSEADRKKIVDDRIREIALEGLKKEIALKKDLEKLRKQIPKVDDAEELIIKEQIKEIEKQLDTLYLLPNKNGNPIPIKKVRIYTKLTNPIPLKKQRDVSEKRSVPYKEKYYVQNDSVYRVALFEGISPSGRQLFESEGFSSLDAVRGKMHIDEVKKNDQVEFRLKYLFQSNRAVLFLKNSSENATDLSNAEISKRLFSVIGLGMTERRVVFRHHLEAREGTVVLKENKDLRGTALPSNVNFENPNPIQRISFSNLRVLQEGIDFKMNVLGEVEFIER

SEQ ID NO: 9742 - protein, 964 aa, unidentified
  REGION 1..964: note = Description of Unknown: Cas Enzyme sequence
ALCVKLKKHTRGIVAFWMKEDPAKTIPPYQDNNNRRPPRCQSLILNADHLNKAYPKWQKWLAALAKSSSDHTEDLKETFLSLKSSKGNPYFNDNLTGSLAKDSQKLTMIDLDTRIFQFILDRRKDSDPFLLNEIYSRTKKLRQLASQKKLNAEDRNQQKKQRAELKKSLAESKLPKRLKDEPNFKQNDIFCEGSFLHLICGYYRARQRARDGRLFIHPDYTETKSRGYEFRNRFDSDDLLLTYCNRKPRQKKYQMLSDVAGVLQVSPALLRNRAGIGEGDNADDDVLEWLKSFKGLKTRCEAAARAQKEHRGQLKLVMLSGKNKKLNKLNLQCVELSHKIAKELYDGDDNIEQHAQKFQSVFSFAQLHNIAFTDRNGNANTCPVCSVDNSRRMEPGKTLEGARAQRLPAIPTRIIDGAVKRMSRILGKRISDDQWPAIEAALKKGDKVSVPIIIESNRFEFEPGLAELKGRKVEQQNESSFDIKTRRIGDAGQNICPYTGRPVNTKGELDHIIPRASGHGTMNDEANLILATEKGNKDKGKTIYSLGNLSPKYKKTIFGAMDDEQISEWIHKTIWDENRGYFTFGNYNSFINLDNDQQKAFRHALFLSGTNLRKEVISAISNRTRTFVNGTQRYFAQVLADELHKKALRIKKDELLSFDFFAVEATSSSRGDGIKDWRHHYENVYSELGKYIKQGGEKQKAYSHLLDAQIAFALVADKHRGDGSLRLNIPQNRGLEAFDKDTGEVFDNNLFANIWLKPEEMDDPVNLKRRKPGENQFKHRSFTRDTYYADRYLPVLIRKEGDKVLVKAGFDWSNSGQWNQSKKSRDQFLRLLPLFTQAEHYPKNMMKILEEQETGTVCMEQTLYELLNAKKYFRDQLEKRGYIYLTINRMALHKFWMDNYNTRTGKPLDDLFTLCYSKLGYRTEKKSISEEKNLEIDMDKLFTVKFNGEPITLPFKNDWEQLKD

SEQ ID NO: 9743 - protein, 907 aa, unidentified
  REGION 1..907: note = Description of Unknown: Cas Enzyme sequence
NRTNAELYKVYEEIISLEGEDISFKKLKSAKDINDTIISKFAELGINQEILLHNTKLQGDFYDKQPLLQLWHLLYSFEGDNSRTGHEKLLKAIETKFGFKPEYAKLFLKIKLQADYGRLSSKAIRKILPYLEEGDTFDKACGYAGYNHSSSLTKEELEKRELKDKLELLPKNSLRNPVVEKILNQLVNVVNAIIKNESLGKPDEIRVELARELKKSATERADMTSNINKATARHEKIRKILQSEFGITKVTRNDIIRYKLWEELEGNGYKTIYTNTYIPREKIFSKEFDIEHIVPKALIFDDSFSNKTLSLRSINIKKSDDTAYDFLNEYLSEEKFNEFLKRAEKLWKDDRISKAKYNKLLMKASEIPDGFIERDLRNSQYISKKATQMLNEVVRKVSATSGSITDRLRSDWQLINIMKELNYAKYDKLGLTEVIEGKNGQAEQRIKDWTKRNDHRHHAMDALTVAFTKPAFIQYLNNLHARRDENTEKHKVIFAIEQKYLHRNEKRKLVFNPPMPLSEFRNESKKHLESILISFKAKNKVVTRNKNKIKIGGKGNFKTKVELTPRGQLHKETVYGKIERYETKYVKIGTKFDLEMIKQVANQKYREALLTRLAEFDGNPKKAFGGKNAPAKNPIIIKSVGVASSNTDTTVPEKVKIVWKEHQYTIRKDISPDLKLDKVIDVGVKHILQNRLNEFNGDAKKAFANIEEKPIWLNREKGISIKRVTITGVSNAEALHYKKDHNGNYILDSNGNRQPVDFVSTGNNHHVAIYRDENGDLQEEVVPFFEAVARVNAGLPIIWKEHPKHPDWTFLFTMKQNEYFVFPSDDFDPNETDLLNPDNARLISPHLFRVQKFTIKDYFFRHHLETTVENKKELKNVAFKREGLSGINGIVKVRINHLGQIVKVGEY

SEQ ID NO: 9744 - protein, 1139 aa, unidentified
  REGION 1..1139: note = Description of Unknown: Cas Enzyme sequence
MKILGLDLGTNSLGWAVVEKEDGELNLSDKGVRIFQEGVKIEKGKEESKAAERTRYRSSRRIKYRRKLRKINTLKVLTKHRYCPELTKTELDNWRYHKIYPNNSAFREWWKTDEEVEKTPYFFRNLVVTKKLDLSKEKDRFAIGRAFYHISQRRGFLSNRLEETKESDGVVKKSIEELSESKGETTLGQYFYGKYLKGEKIRDIYTHREKHYLEEFNRICRFQDLPDDFVTEVRKAIFYQRPLKSHKSLVGKCVFEPKKPRCPISRPEFEEYRMLCFVNNIKIKSPTDEKMRFLNLDEKKMIEHLFFRKNKEYFNFEDIAKQLSPNKQYKFYKDINKTSDDWLFNYHMKTTVNGCPVSAKLRSLFGDDFQNVKFEYIRKKDGKESNIDINDIWHVLFTFDTNEKLEEFARVRLNLRDDQVKEFLKINLKRDYASLSLKAISKILPFLREGLIYSHSVFLANMDSVIPKNIWNDRTNQRVIKNEIYNIIKTQNEEKQIVEVVNSIIKSSRDENETWSDEAADIYKKELFNKIRLYFGKNRFEELPEEKKIRIQKDAFELLKKQMHMNLGRGEFATVKRIDERIFSFLVDNFNINSGKFYKLYHPSAINVYKPPVKGKDGHIYLGSPMVSSIRNPMAMRALHQLRKVINELIKKDIIDENTKIHIEMARGLLNANERKALQSWQKDNETKRKVYSEKIKEHLNGDKPSDDEILKYQLWEEQNHKCLYTGREIRLSDFLGANPKFDIEHTIPRSQSFDNSQANKTLCESKFNRTIKRNQIPYELPNYPEILERIEPWKEKYAQLDKQIRTVVRQSKSIADKDAKDKAIQKRHKLVYERNYWKDKYHRFIMKDVPEGFKNSQINDIGIITKYSRLYLKTYFNKVYTVKGNTVADFRKLWGLQDEYKKKERVNHIHHCIDAITIACITKENYENLAKFYHESEELYIKGVDKLPHVDKPWGSFTEDIKAIENEVLISHHTPDNLHKQSKIKLRKRGKIQYNKKGEVIYQQGDTVRGSLHKQMYYGAIERIIENKKGEKEKKIKYVVRKFVDKLEDSNIKNIVDDNVREIVVEGRKKEKILKKEIDVLKKKLQKADEWEEKGIKNRNYLAANSVIKLLPSKVVESSLKIFLSFFLAVDIKPSIRA

SEQ ID NO: 9745 - protein, 913 aa, unidentified
  REGION 1..913: note = Description of Unknown: Cas Enzyme sequence
LKSQKHLISGCPFEKIEYKKQVIDDKTGNKKTATITKAIPVIHKSHPLYESFRLWQFLYNLRIYQKEKTVKDKTYFDLDVTHQMLTDETDWVKLYDFLSTKKEMSQKTILEFLIKQRKIDKIEKENFRWNYPEDKKYPAKPVRAGFINRLKKVEHLKLDEFFTNEIALQLWHLIYSIKDKETYKKALKTFASRHHIDSESFVKNFEKYPAFNAEYGGYSYKALKKIVPLMQMGKYWDENLILPETKTRIQEIIDRLESIHFDASKLEQIADDDINLPLLKSFLPFKDRNPLKGLNTYQATYAIYGRHSEFGNVQYWHKPEDIDRYLNDFKQHSLRNPIVEQVILETLRTVRDIWKELGQSQSHFFDEIHLELGRELKNPADARKAISKNMAEKERTNKRIKALLKEMTAYGANPQSPSHAEILKIYDQDVVNSRPDLPQDIKIIHQSNDPSPTQIERYKLWLEQKYVSPYTGQPIPLSKLFTTQYQIEHIIPQSRYFDNSINNKVIAESDVNLDKSNQTAYAYIKQKGGSIIDGHKLLTLKEYEAHCKSYFKKNKRKLQNLLSEDIPDEFINRQLNDTRYISKMVKALLSHIVRESDEQAETSKHLLPVVGFITSKLKHDWGLQDKWNQLILPRFKRLNDLTETKDFTYSNQNGIEVPKIPDYISGKINKKRIDHRHHALDALVIAAVTRNHINYINALNNEKTKHNLQPQLLVQNADGRYSKTFKMPWPDFPVEAFKALKTIVPSFKQNLRVINKATNYYLKWVQQKDGSYKKQKIKQTKGAHWAIRKPLHKETIYGKWDGVKTPKNKIATFVKTDLGSISKEKHIHQIIDRNIREVIIPNHLKNYTDDKGQVNYETAFSPEGIENLNKNITTLNRGKAHQPIYKVKMYEVGSRFPLSDNPDSAKHKKYAEA

SEQ ID NO: 9746 - protein, 1025 aa, unidentified
  REGION 1..1025: note = Description of Unknown: Cas Enzyme sequence
MSKTILGLDLGTNSIGWALFDANENLQPIDLVDIGVRIFQRAVEDKTPTPKNQARRNARLARRIIQRRSRRKHRMLNYLISLDLLPQSLQNNPQPEIILNYLGDPYALRTKALDHALKTHELGRVLLHLVQRRGFQSNRKTLLGDMVDDPDTLAVFSEEDGSIDDKEETAFKQDISVLRDKIEAENCRTLGEYLRQLPKDQVKRNRFREGGNLRADRKMYKDEFWKIIKAQTVHHPNLEDAQEELFSIIFFQRPLKLKKDRVGKCSLEPRNTRAKKSWNLFQRFRYLQDINSLEYFDSYTSHFNKLAEDDREKLVNFFEHDAKPTISKIKQTLGFSRNQKFNFESATNKFFKGNLTVISIREVYPEWDELSIEQQNQLEEDLISFESKKALKQRLINHWKLNIETAVKLCVVEFEPGHSELSLKAIKKLIPFLEQGLIFSDARQSAGYGYEFEEVIAQDKLLAPPELPNPIVMKGLHELKRVVNAIIKEYGKPDAIRLEMARDLEMNTRRYKAFTNQQNKNTRLNEEAQEKFSGIAKKNKHLGLSKYASHTDKLKYRLWQEQENRCAYSNKQISLTELFTGNIEIDHILPYSLTLNDSYMNKVVCIAQENQTKGQRTPRESFESDKEKWEQIEAAISRWYTKDLSGKRNAFYKNTDDLDKDFIGSQLTDTRYISREALHYLKTLGVEVSTVKGQVTSWLRHIWGMNSLIDDNKKEKDRTDHRHHSIDATVIACIDQSLYNTVVKMAQKLEKQPGSFHIKDIHLDPLFDGFRQQVAQRLGKIIIAHAPERKLSGALHEDTGIGFIEDTGAIYRKNVDETLTTKSIKNIIDPTVRDFVEKHLQRHGGTPKKAFTKDKPVLHKDGKTPIKRVRILQSKTTKKQLKQSKLGIKDKQGKVFKWVTLGNTHHVEIFRHNKTVKYQSVFVTTLEATNRAHSRKSIINRMLDDDHEFCFALHRNDLVQVNVNGSEAIYRVQKLNSPGNATLRNHLASTLDDKRQEIRKSISTLMKDYELKLIRVNCIGKPLDD

SEQ ID NO: 9747 - protein, 978 aa, unidentified
  REGION 1..978: note = Description of Unknown: Cas Enzyme sequence
MSKVILGLDLGITSIGWALVNVDDKNDKIIDSGVRIFTIAEHPKDGKSLALPRREARSARRTTKRKAQKIRAIKQLLIQNKILTQNELDNLFIGKEAQKKDVWDLRREALYREVDNRELSRIMIYLAKHRGYVSNRKSEEPVDSEGKAVLSGIGHNKTILETSKYLTVGEYISTKEKKRNGKDSEGKLNYENSISREMLQNEIEIIFIKQKEYGSTLINDELLNKYKEIAFTQLPLKSVAGMVANCPFEESEKRASKSSYSFEYFRALQKLKNLRVINEDGLEMPLIFEQIEQIIHKVKETKTFTYKSFKKLFSQYKGMQIKGLTYYDHKTGEIKDPEGVKFLDFSAFQKIQIAVQKADNLYWQEIENNYEVLDAIAKVLTTEKDDKESIKQLKEIIQNEKVAEALVAVSFSGFSHLSSKALRKIIPFLQEGEDYDKACEKAGYDFKAIFKGEKTLLLPPLSEQESVEMTNPVVKRAVAQMRLVYNAIVRKYGAIDRIHIEFTRDIKKSHDDRRKIEKAQGEFRDKKEEARVHATEILGHEPSAKELLKFRLWKEQNGECVYCGKEISPLTLQDPYATEVDHILPYSRSLDDSLNNKVLCLTKENQDKGSKIPYEYMSQEKFDAFDQRVKGYKNIKQAKKSRLLKTNFDESSELAFKDRNKNDTSYISKFLKNYMEAHIAFKESKDKRHIFTMNGMLTTQLRYKWGVGDKNRDNHLHHAEDAIILAFSTQSMVQKLSAVSAQREGFIYKAKEEKAKSLRFVAPLEDFGKRVKESLSKVFVSHMPRRKVSGAAHKATVYSAKTLSMKKENGKVDALKGGSVSNNVKLKHGIALNDGMPRVDLFQNKKTKKYYLVPIYVSDFVKDKLPNKAIVQGTKPWIEMDDEYEFLFSFYKRDLIEIKTKQTANKESILAFGYFNTAVSSTAQILFNNHKGDEEFLFGSQNLVFIKKYQVDPLGNYVEVKSEKRQGSIKEGRQKRKR

SEQ ID NO: 9748 - protein, 1391 aa, unidentified
  REGION 1..1391: note = Description of Unknown: Cas Enzyme sequence
MGAKNNGIFIVKSNGKAIESKKASCIVVDNINFSKVSRTQNRHKDRNYKRRDMAKKLLAELVDMQSFDEEQQELVRGLLNNRGYTFLSTATEFEGVTVETVEFLVKYIEPLSKQKTKDEFEAFLTDEFDDEHTLLEFLETNIIAITTKSYELENFTKKKIILSDIEALSSKNINKFKAFSYIKTILFRYGYRDLGRNQDEITKSLKKEGIDLSKIDFEKEKKLIESLAFDTKSAESKKEIVDDLKLLKAFLQNVEKEINTGSKPRKKYLTEIKEEIDELSFIDNKKEFYNIVGNISNLQLRVLRKFYNNNSKTRDRYKILKNYFLTHHYKSEKEKTQRKSLFIELNKHSTVADSFKMTEPSLTIPPYEDMNNRDTYKCNSMLINPELIDDALKESVDYLLKQSEFDKLNISQDGEFKKEELVKGRVVSGNKLIKTDFTYSKYLQRIFDATEEVTTKELNPRNVFKYKKTFERGAISSVEMFKRVFGERVYKSFEPIAERYYREESKIMSGIYEASTFMFVKCSTNTPYKDNVKEVLLKPIYSYAFTKEEAERFLLGIEQSRGLKASLQRVSEEAKKHQNAFYHVVQACYENEKCINDKDIRSIVKNIESNFQLLKGIIENELEIKNSYFKDVPSVTAKNLSRVLNIFKQTYEILFKDLKGFSKTCKHCSQENALRSDENYVIGKRLLSDVAKPIDGMLDMMLDRIAYEITQEVEEHDIIDVVYLEILLEQNRFEFEENLNAIKRSNNSQIKKYKREHKDALNVNVCPYSGKRFDKGDYDHILPQNRGVYNSKANMIYVSTEGNQKIKGARVYTLEMLAPEHLKVVFKTDELPKIREIIKAGIDSIKKEEFKNFENLKLHQQIAMRYALFMRETEVFNKAFELLKLDKLKTITNGTQKRLARFVYEKLVDKFPSYFENEKIDVNSKTVNSQLVSTTRNILAENQTELEKPEIQDSHSHCIDAMIVFYLANSKIKGHKHRQKENLGTLEPMFGFDEVYLSESKINRLSKKRTFITSSKKEQGSYPLFDSTIYSESYYHIKKDELKEKELNLLIEHKLLYHYVKNKKEFLSSGDELIENYVYKIDVEVTSNFLYELFLKADRERLIQLKFLDKLRYATSRKEIESIFFNDKKTAILEFEKIKNIPEYSKRLYKAVYKKLKEAGLFKEVDEKKILDSEKLNRLLRDMFESKQNDESKKDRKRGKKRHKYTLPILGSPKFRIRRKESWQVLGNKDIATKNYIVNGDIKPIPFFSRNTIPLKITDLLDCLLVDEQTKSVYEVDVATNEISEYVSKLKYLITEAKRCTLEVTLIKSSFENIDFSSILTFDASKDEAFKSFIENYIENKEFILNRYIGSIRDGLKAKAIVLDNNSKTITLQYKAGINKDKKQIILENLK

SEQ ID NO: 9749 - protein, 1016 aa, unidentified
  REGION 1..1016: note = Description of Unknown: Cas Enzyme sequence
VKKILGLDLGSNSIGWALMNETDGRVNQIIDLGSRIFNKAVEEKVPTPKNQKRRDMRLGRRVLQRRARRKQRMANYLISLDLLPQELSNNFGQEKLLNELGDPYELRTKGLDEQLTSHQLGRVLLHFVARRGFLSSKKQIAGDLVDDPDTQTYLSTLDNKKAKDEEGQFKADIAEVYQAIKDNNARTLGEYLFNLEVGKVKRNRSHDGGHLRTDRAMYKDELYKIWEKQQSYFDLPDEFINEVEKIIFYQRPLKLKKDRVGKCSLETKHYRANTARLEVQRFRYMQDVNNLEYFERHSEQDLKLSDKQKEKLRNYFEHHSKITITELKKELGLDKPTKINLEAKNLKGNITACEIRTVIGNIWDEYSDEKQSQLFEDLFTIKKKSSLKARLITHWDFDKQTAVKLCLLEFEPSHSNLSLKAIKRLLPHLEKGLTYDKARVECGYDYEVKEIVALDKLPAPPETSNPIVNKGLHELRRVVNALIKQYGKPDIVRIEMARDLEMNTKRYKDNEIRQRKNQKANEEATEVFRQETSRKYPSHDEKTRYRLWKDQSERCAYSGKAIARCQVFSAECEIDHILPFKKSLDDSYMNKVLCFEKENRNKGDKTPVDAFGGDNEQWNQITHAIANWDKSLKSKIARFYTKEEDLGKRDFISNQLNDTRYISRLAQDYMRELGCDVSVTKGLVVSKIRHQWGFNNLIGETDKKERTDHRHHAIDAVVIASTSRGLYQQAAMQIECDKLKISQPYDNILQELGEKLKHMIVSHMPQCKLSSSLHEETGAGYIAKHGGLVYRKTLNPEFTIKNAMSIVDEQVKNIVLEHIENHDNSKEAFSEKNLQTLKLGKNPIKRVRVLQSKIKATKKQTAEDILQQTKFGVKDKSGKIFKYMSYGNTHHVEIIKNLKTNKIKAEFVTMMEASNRAKGINISKQPIIKTNHGDEWEFLMALHINDTVSIEKNDGDFFYRVQQLDIQNKKFVLRLGIASTLQNKNEELSVGINKENFDKYKINLHKVNAIGRLIDD

SEQ ID NO: 9750 - protein, 994 aa, unidentified
  REGION 1..994: note = Description of Unknown: Cas Enzyme sequence
VETLRKEYPEKTVARIIYEIEIQKPNPTFRNHDNYNYMIRREYIREEIEKIVLSQMDFGLFAKTFDVDTFIKELISTIDDQKDSTNDLSLFGNCEYYPEEKVAHQYSLLSDIFKMYQSVTNITFGKTKISKEQIKIISDDFFKKIKQSKNIADIKYQDIRKLLKLKDEVQIFGKEDYRLDKKGKKVHYTITKFHFLANLGKIDNSFMDAVFEKKNKYEILKEIFDVLEFEKAPKSMYTQINAVFMKYTLVEDERLKDETIINLIKYKTGSSLNISAHAMIKFIPYFEKGMTLDEIKKELNIKNFEDYSEFKKGIKYLGLGIDKKLFVTVEARDRIKKYPASQFEFDNQLIINNHPVKYVVSATMRLVKHLHVTYGAFDEIRVESTRELSQNEETKKAIDKANRENEAKFQKIIEDEEYQKIAKHYNKNLKRYARKIMLWEEQDKIDIYSGKVICFEDIFTNVVDIDHIIPESLGGLSVKHNLVLAHRDENVKKSNQLPMNFVTDKVAYVNRIEHLYKEYKINWKKKINLLAETLDDSYKDTFESKSLRSTSYIEALTAQMLKRYYPFPDKKKQVNGQAVAHVQGRATSNIRKLLGVKIKVRDTNIHHAIDAILIGLTSKSWLQKLSNTFRENMGVIDDEARAKINKELPLIEGVEPKELVELIEDAYNVYGEDSVFYKDIFGKTKAVNFWVSKKSDTSSLHKETIYGIDKIKGKIKDKQYTGLTTLRIDIIKRLKDAQKKPTLPKIGDDAHMFLNEYQEELIKKLYVYQYNQEDKILAIIQAKASDIAKCLEKYSDIKNENKDLFSKAKEELSCIIDKPLVDYNGNIIRKVKIIVSNKEKEPMIRGGTTVAERIAIGFSVYTLEKDKLLFRRIDLKDKLSKSLTKVNASSSMNIFRNDLIYIIFKKSEKNLVGYLESFDDKTNKIRLYDARFPKRLELQPKKYKVSSGKSRKEFGVGSAMGFIKINLDILGNIKSHTRFGEVSKEVEAQIFHKE

SEQ ID NO: 9751 - protein, 1197 aa, unidentified
  REGION 1..1197: note = Description of Unknown: Cas Enzyme sequence
MGKKLTISIDMGAKNNGIFIVKTENEKIINKKASCIIVDNISFSKQNRTQNRHRIRNTTRFDLARRLLKEFIDFDLYKQPNKERQFHQEQLVGLLHNRGFDRVEGAFEELDTLTIEFLQEKIPNIKELSTASTIDIFVNNSESSIKLEKELKFYKESISQLFTNLRAYRVKESIRKDIEKIVTNKFSKFSSNTEEHIRKIFIDNSVDFNYERGKLKNQLLKNEINVSAIDFEKEFNKILKVKDEFLDGFSILEHDLKMISDKENDPSISRLFETLIEAIATGAKPRKMYQNEIRKEIEKFSFIASKDKADMYHIIANISNLQLRVLRKYFNGKMLEDNSLDEKKLSKLLYKYFLSRHYTKDFEKERRKELFDVLKEFLNPKKKLYEAKKFFLTCSPEHTIPPYEDMNNRDTYKCNSLLINAKRLTDGLKKSVDVLLNQSQFDMLANASLVDNKDYSQMLQRILDINSKNIDKSIHPRNVLKHQKDGTNIQYYQDLLKDDFKEFSDFSKEFYGKEESAINGIFDEEDKEYIFLKCAKNTPAKRNIKHELINAIFASNFEMAEDIEIFKQVIEKKKIKTKLEKISNVSKKYQNEFFKNLLYANELKNNKDKKVEYSNLNKDIKDILAMVDDLLEVFKTIFSELNQKSYLDNDFSFEENETKVKKRGKNLKRFVNSIKQTYDVLYLDTGGHNKTCKSCTKENNERSNEEYPLAKRLLSDVAKPINGKLDMLLARIAWETVQPLDEKYLNDVENIEILLEQNKFSFEKSLHELKIRKKEPEEQELAYNICPYTGKKFDKKNGEYDHILSQSSSQKEKIQVYNSEANLILCSSEGNKEKDNKVYTFNELKESHLKIIFGTEDKEVIKQEIIAVWDNPKSGLNYYTSFRNLKFNEQRAFRYALFFNSNDSYFKKAEALLRQEQRTITNGTQKRLAKLIFSKLPKSYSNAVNVKVIDNKEVSSTRKELAEYYRKFDKNTGEVLEDKNLTKQDRQSSYSHIVDAMVVYYVANKLELDDFKLIEMNDQLDYTQTVKTQHWYETSNKNYKINSKRLFDEKDIGVGYVHLQEFISTDSKGKEKITFKKGMVKNSFVSTTFNLKDFKYFMSKNILEKMENQNYCVNKNRLYEVMFDEKDEVLKNISHYTKLTKELRYTYTKFNPFDILAKFLEPLTADDKKAVFNIIKKENPLEEDITVQNIMAWFSRG

SEQ ID NO: 9752 - protein, 984 aa, unidentified
  REGION 1..984: note = Description of Unknown: Cas Enzyme sequence
KFHPELTEELKKEIRDVTIFYQRKLKSQKHLISFCEFEPRNRVAPKSSPVFQLFRMWQNVNNLVSKSKLVIDEDVKEGIIEVLSYNGTLSEKELLKLLGLNPSIDKLNFEKINGDQTRTNFLKVFIQLWEKQGNSKKNLGTPLTRMDVALILKDLGLPGDLLDLNLDLKENEFDKQPYYQLWHLLYSLDDDALVKSALINKFGFSESQAQAMLYVKLESNYASLSVKAMRKILPHLMDGLKDEEARAYFYNAQSSTTETKDLKEKLDLIKKNSLRNPVVEKVLNQTINVVNAIIASDLYGRPDEIRIELARELRASNEERSAMTKNLMDGTKKNENIRKQLQENFRIQRVTKNDIIRYKLWEETGGISIYTGNTIQASDIFGGKYDIDHIIPQSRLFDDSFSNKTLCERALNIEKGNQTAYSFLKQKYSPAEFEQYLSRVKDLEKSEKIKKTKADKLKLADDEIPQNFITRQLNETQYISRKAKEILTDICSKVYTTTGSVTDRLREDWGLVDMMKELNFEKYKALGLTYEDKGKNGERLLKIKDWSKRNDHRHHAMDAITIALTKQAYILYLNNLNANIGGIIQGNIENKCTERIGGKIVFKSPMVNIRDEFKRTLDSILISHKAKNKVVTKNKNKIKTKAGLVIQHTLTPRGQLHKETIYGSQNTYETKWVAITAKMDANLISKVANKQQREALTARLAAFDNDPKKAFSGKNSPSNNPIYLDENKRYALNDKVKLVDLVPQFTIRKNIGPDLDVKKIEKVVDVGIKNKLMERLLAFGGDPKKAFSNLDENPIFLDKAQKISIKTVKMQGVSNALALHSYVDNDEILKPKDWVSSGNNHHIAIYEDENGDYQDEVVSFFTAVTRATSIPPLPIIQKHHEKGWKFLFTMKMNELFVFPSEEFNPTEVDLTNPANYSQISKHLYRVQNLTFKDYFFRHHLETNVENTKELRDFAWKRIQSNNPLKGIVKIRVNHLGQIVKTGEY

SEQ ID NO: 9753 - protein, 1398 aa, unidentified
  REGION 1..1398: note = Description of Unknown: Cas Enzyme sequence
MNKYNIGLDLRTDGVGWSVTDTDGRLLRRNGKHLFGTVVFEEASSAKERRRYRTQRRQRDRTKVRIDILQKIMAQDVLARDEAFYIRLDDTASDREDRVAKNLYSTLPESLFEDGSKLVFKKQNGNKSLPIYEIREALATRHEKADIRYVYLAVAHILKHRGYFTESDRIDEESLRAEAALHLDQYIRYINDQYFLNIYLDPAGTNLAKYLDALVTDDQEKEEKLLKIIREDFSAGDKGEKTLLAVSRLLQGKTVDLSEIFSQKRKRGLVSFATLRSIDVYDKLTDEAAEAVQHLEAVYEWAYEVNLRNHAEHELVSTEMNRRYEQHREDLKELKAWYRKYIDEKGYRAFFHFDNDDSNYNAYSKCRTGATCETDRWNHCTQEKFYARLKQIFSSVGGNIENQKAREKMQAEALAAAKPMLDKMYNADDGEVIPNGFLPLQRISVNSQITNLQQVNELKKIIENQAEFYPSLRENADKIVALCTFRIPFYVGPLRQDDKSPFEPWIQYKSDNKEQITPWNLADRVDLPATAEGWIDRATNQCTYIAGEKVLPKHSLVYEEYMLLNELNSIRIVYDDPDRDITEQQSFSGTGIGAVLTKEPKRSRTKTLSPEIKEKLIREVFSKQKKNSVSYLCRWLQQNAFHSKRNIRIVTKDGAPVEKINSTLSARVDLEKILGRKVVPGHEDALEKIIKWSTLYTERSIYVQRLHEEMKDVFTPDQLKRMEGLRYSGWGRFSYALLCEPLCNYKGKSVSVLEVMRQERQTFMKIYHTKEYGFKEKIAERNRKNLNDTIEYDDVAGLVTSPAMRRTIWTAVRVINEITHCMKMPPEHIFLRNLRDNNAKKKLLSDKNITRYDHLRTYYDDYEKTTKSKIDPELKATLQSMKGRDIGDTEYLYMLQFGRCMYTGEKIDLRSPSTYIMDYAVPLYLTTDETIMNNRVLVKKNKRQNGMPLAKHTIETMRPFWETLLKIGMITRQKRDGLIIEQYTEETYQFFMKNQITENNLLIERMTWLLRNAYPDSQVYGINARLTDVMRKANDLPRIRDLNDMQQAYDAFLASHAGAFIARYMPDMMNDGGETQIRMKKLEKAGAADKNGIFMTAYKDDQEDEENGSSVWKGANDRYKYLRSVYSWHDGFVTRRVREYTGKFYFETLFRPVQGKNDPFLVTKKGSHKQAYVAYMDIIQYTDKNNKDWKEVVSIPAYIAAKDNPTLEKSYVENALGFDEKKGVKFLTLLRRKVLLNQETVIDGHPYYLRTAGEWVNAKQLYIKPEYAKYVYLALSMINPAKDYHRKDPEEDSMFRETARYLLEKLENQYPIYLKMNKSLAASKDKLLCMQVSDVMLLIRALVYSMGTRSERAQPTLKKIKGVQVEGDNRLVNKRLRAGEITLTHRSVTGLYAVKEVL

SEQ ID NO: 9754 - protein, 185 aa, unidentified
  REGION 1..185: note = Description of Unknown: Cas Enzyme sequence
VDLGVKDLAIVSDGQVFPNHKYLRKSEKKLERLQRSLSRKKKGSRRYIETKHRIAKLHEHIANQRNDTIHKVTTDLIRNYDTICMEDLNTSGMLKNHKLAKAVADASMGEFQRQMKYKAEYYGRKVVFIDRFYPSSQTCSHCGSQSPITKDLSVREWTCPHCGATLSRDLNAAINIKKEGLRNTA

SEQ ID NO: 9755 - protein, 1219 aa, unidentified
  REGION 1..1219: note = Description of Unknown: Cas Enzyme sequence
MKKILGLDPGIASVGWAVVQTAEEASEKSGILDAGVVKVDFDNFAYQKPDGKISSTGKIDELYRKGVTVSPNLVRRQARQARRRLQHYHQRRDSLIKLLTANGFISESTALNEEGKGTTHQTYKLREKAVTEAITLEELAKVLLMINKSRGYKSTRKGESDGEDTAYLATITERSNVLLDRGITIGQYLYEKLLNHPLKGIKNQTFYRKDYEDEFERIWSCQMRFHKELTKKLKRQIRDKVIFFQRPVSSKKNEVSFCPFESRQVTVNGKTYTTGSRVIPTSSPLYQEFRMWQRLNDVAIKNIMTGEVRHLTQEEKERLAAELSIRKELTKTSVVRLLYGKAIKSVELNFDSLIGNDTAARIYKACLEVIKLSGHELDTKKMSSAAVIAAVQDIFGMLGYRTVALTDAGEFAKLWHLIYSFPGDSSRSGHDTLTAHIKQLFSFDSADQAEKLANIIFADGYGNLSSKAISKILPKMKEGLQYSDACQAAGYNHSVRSVTKEDNENRVLSATVTPIPHNSLRNPLVERILNKMVYTINAVMAKHGQFDEIHIELPRELCSNAEKRAKDTAAIDRNTKDKEKAEQELKEKLKEMGVPVTYVSPNDVLKYRLYKELAGNGYKTLYNDTLIDLKELILGRGFDKEHIIPKALRLDNGFSNLTIEKTDINLKKSKQTALDFVLEEYGAAAAEQYRQRVNDLFEKKAISKTKRDNLLRTSADIPTSPLDRDLNLTRYITKKAVELLEPITRKVLVTTGAVTVKLREDWQLVDVLKEMVFDKYQKLGLTEKFTDKEGKIVERIREDVWTKRNDHRNHAMDAITVAFTTQAMIHYINSLNSQGEGRDQLLHMRQKYLHKDGKGNWIFNSPMPMDEMRATAKEVLDGVLTVHPTPKVAPVTKNKNTLVPRGKLHDATLYGRKKKEVVSFEKVDKSFTEEKISTVTNPKYRSALLRRLQENDGDTKAAFTGKNSLENNPIWLDQWHSSAVPLQVKCMTVKYIFTKRVAITENLNINKVLDEGVRAILKARLQAFGGKAKEAFANLEENPIWMNEEKEIAIKSVIVETDLKDLIPLHRKEDGTAKDFVKPNNNYRADIYIDDKGELHDNVVSFFDAVQHSSAVDSSWRCLFSIKRNEYFVMPGKDFNPLEIDLQDSRNRSLVAKHLYVVQKMSSGDYLLRLHNDTSSGIVKELKDITSMRITSLSKFIGCVKVSIDKSGDLNVLQKIVIE

SEQ ID NO: 9756 - protein, 1383 aa, unidentified
  REGION 1..1383: note = Description of Unknown: Cas Enzyme sequence
LEVFVNMGQEYYLGLDVGTNSVGYAVTDQEYHLLKFKGEPMWGTHVFDEAVPAAQRRMKRTSRRRLHRRQQRVLLVQEIFASEIAKTDVRFFIRLQEASLYRDEVAATDANILFNDADFRDKDYHGAYPTIHHLLLALIRDEVPHDSRYTRLVYLAVGWLVAHRGHFLSDVDKENFHKALEFHEIYQEFLNWMRENGLNAWSCSEDALQELLLKESKIRDKENALGKLLYDGKVPKGEKGSIIAEGKLLSLISGGKVKIKDLFPSRDYEADASLSFHDAEDKIEEILSMIGEDAEWILRIRKLYDWSLLKRILGKSSLISEGKVAIYQQHHKDLINLKKFIRRYLPEKYSSIFRRMDSDKEKNYVAYSYHLKGMKGILPKAKATQLEICDYLKKLCKDIECRPEDMDFYHDMMERLEQGTFLPKQVSGENRVIPYQLYYYELKKILEQAEKHLLFLSEKDNDGFTRKEKILSIFLFRIPYFVGPLHFPQNESNRSPFAWAARKKNIPIRPWNFKETIDFDQSEAEFIRRMTNTCTYLTGKAVLPQGSLLYEKFMVLNEINNIKVNGIPISVEAKKLIYHVLFLDKRKGRKVTQKAIQEVLQSNNYMEKNDVLSGVDKEIHSRLKSHLAFARFMENKLFTQADIERIIERLTYSEDRLRICKWLTKEFPHLRKEDIQYIAKLSYKDFGRLSNEFLTQFEGISKKTGEKQTILGFLWDTNDNLMQLLSESYTFKEALETYQQEYNQSHPMRPEDRMEDMRLSASVKRAIYRTLDIVKDVCKARKQPPKRIFIEMARGGGEKGKRPQSRRDRLKSLYVSMGKDNTLGQNLQQDVRDLSAQLDATSDNRLQSEVVYLYFLQLGKSMYSGEPIRVEQLKDDKLYNIDHIYPRCVVKDDSIDNKVLVTSKENSDKGDHFPISENIRRQMSELWMHYRKNHLISEEKYNRLMRRSGFTTEERWGFINRQLVETRQSTKALANIFKGLYPETEIIYTKAGLISEFRHEFNMVKCRLVNDLHHAKDAYLNIVVGNVYYSKFNQKWFNPKMNYSVKLTALFEHPVMAGKQEIWKGSEDLGRIRKTMEKNNIHYTRFAFIRKGGFFDEQPCKKQEGLVPLKRNSSPARYGGYNKPTASFYFLVRYVLVTKKRENGLMLVPVELLSSNKVQNPETAREYAQYSIAQIINKDIDCVTDISFPLGLRPIKINAMFSFDGYCSCLLGKSNKGKQILLTSAMNLCMDSKKERYMKHLESFQAKALENKNMEPNEKYDKISSDKNMEMYQFFCEKLSTALFKKATFSNKGIDTLTNGAEKFKNLSLRNQVFSLLSILSMFKTGRSGGCDLTLIGGSKASAVYVVSSNLQNLSKNFQDIRLIEVSASGLYTSKSRNLLGFL

SEQ ID NO: 9757 - protein, 1322 aa, unidentified
  REGION 1..1322: note = Description of Unknown: Cas Enzyme sequence
MSEKKDYCIGLDIGTNSTGYAMTDLEGYLLKHKKRSTFGAVLFEDAQTAADRRMHRSARRRLDRREQRINLLQELMEPCVLPVDPSFFLRMNETFLQEEDRELELLSETLPESVWTDGSESNVPTIYHLRQMLIEADKQADIRYVYLALHHIIKYRGNFLMEGETLDEETRSITERIMDILNQFVSEPYNWVFCTDEEVVVRIRDILQTKGMTNTARMEAIVNCLNPDKAGQKAAKALAGLLVGMKSKLSPLFLCESDLAVQFSGEFEDEEEVIAVLGSAGELFDEIYSVFQWKQFANLRAEGETLSQTMIRKYEQHREDLARLKDWVRTYAPDQYKKLFKVVDPKVDNYASYTRHFDKEDIGGQAFQRVKQADFYNMVKKVLESNKSEAAAESAKPMLQAMQEDNGFLPLQRINFNGAIPYQIHAEELRKIIDNQGRFYPELLRNKDKIMSLCTFRLPYYVGPLNTSSPFQKWLVRDESAKIRPWNFFDVVDREKTADGFIANLTNKCTYLPGEDVLPLHSLLYEEYLLLDELNRVTVNGKLISTDLKKRIIEELFKKRKNVTKKTFEEWLSVNTPVGNGSEIKTDRYHGDNGFAASLRTYIDFTEKVGIPVNETTIPMIENLVRWSTIFEDRSILREKIQKAYPELTQKQVNYVCQRRYTGWGRLSKKLLDGIQGSEQAEGKTILDMMRETNDNFMKVINNKHYGFDRAIEANQPIAHEGKITLEEVQALQGSPALKRSVWQAVRIVEELIQVQGKQPTVIYIENTRGEDESKKGRRMPDRIKMLEDWYKGSKAQVPKECTDLLSQCKTDKVRLNDRQYLYFLQLGKCLYSGKQLDFEHLEQYQVDHILPQSYIKDDSIDNRALVYQSENQRKKDSLLLDEAIQRSRTGWWQYLKDLGLISEKKYKNLTRKVVSEEEVVIFINRQLTETSQIIKYVTTLFKAHYPDVKVHAINANLSSSIRDSFKLYKIRDLNNTHHAYDAFLACTIGCFTDTYFSWIGDDSVAGSMAKARWDSSKTEEKGIILGQFVKDQVDKGTGEVLWDASEHIAYLKQVLNYKDHFIVNKPYEFSGGFFRETRYPAGYSAKVPLRANLPIERYGGFDNVSPAYIAAISYQKGKARVGTLVNVPAYLAKDIEKDPDVLVRYLSQEYKNVKIIKPKILLNQTVIYDGSELLLRSAREARNAKELYLPKDMQEMLDRMINRGETVPEEEINKLNTLLIEKLEQYYPIYSGVAERIRSKWAILQKLTVKEKNDFARETIKVMQASGQFANYTSVIPKLGLSNNQGRITNKPFDLSKLKLINQSITGFMRSEEGPWNSEQL

SEQ ID NO: 9758 - protein, 1002 aa, unidentified
  REGION 1..1002: note = Description of Unknown: Cas Enzyme sequence
ETRAAILTALNKCGIDSKFLSHENEMALWHILYSVDDKIEFISAIKKFALKHGFDDNFVENFCKIKPFKKEYGSYSEKAIKKLLPLMRAGKYWNFNDIDSNTQDRIQKIITGEYDENIKNRVREKTINLTDESHFKCLPIWLACYIVYDRHSESKEVSKWEKPEDIDDYLKKFKQHSLRNPIVEQVVLETLRTVRDIWKQEGKIDEIHLELGREMKNPADKRKQMTENIQQNENTNLRIKAMLMEFMNDEKIENVRPYSPSQQDILRIYEENALNNLSKDDKDFEFVSKISKQAEPSKNDIIRYKCWLEQKYRSPYTGEQISLSRLFTDDYEIEHVIPQSRYFDDSFSNKVICEAEVNKLKDRQLGFEFIKNHHGEKVQLSQGKVVTIFEVTNYEDFVKEHYSNNRTKMKKLLMDDIPDGFIERQLNDSRYISKLVKGLLSNIVREKDSSGNFEQEAVSKNLISCNGAITDRLKKDWGVNDVWNRIILPRFERLNELTGKDCFTTTSAEGHLIPSMPLELQKGFNKKRIDHRHHAMDAIVIACTTRDHVNLLNNEAAHSKHNANRYQLQTKLRRKNEEGYFKEFLKPLGNFSADIFNALQNIIVSFKQNLRVINKTVNYYQHYNKDGKKVFVKQEKGDSWAIRKSMHKDTVFGEINLKKKKTVSLADALKNPQMIVEKELKKQILKLLSEGKDVKSIKKFFTDNKDVWSDVNLSKIEVYYFTQEDLNKEGKPKVRYFATRKPLDTSFARAKIENSVADTAIQKILLAHLEAKGGNPELAFSPDGIDEMNRNIYELNGKKPHQPIYKVRVYESAEKFAIGTSGNKSKKFVEAAKGTNLFFGVFKTAQKRTFVTIPLNVIMDCQKKYEKNWKTNLESYLKELDLVSDDSKLLFTLSPNDLVYLPTNEEIENGIKTADKSRIYKFVDASGITANFVPYAIAQAIFSMTIDEQKKVYKEYRYNIQNEIGIGSRPSKSPNAITKESIKETCLPLKVDRLGNIKEIGY

SEQ ID NO: 9759 - protein, 1013 aa, unidentified
  REGION 1..1013: note = Description of Unknown: Cas Enzyme sequence
RCEALDRALTKDESIRLLIHFSQRRGFRSNRKVDAASDNDEGALLSAVSENKKLMELKKYRTIGETLYRDDKFAEFKRNKGGNYTNTFSRADYKNEIETVFAAQREMGNSLFTEELEAGFKYIVFSQRSFDEGPGPGKDSIYSGNQIEKMLRKCTFEPDEYRAPKASFTFEYFNLQSKINALKIVSDSGKRSLTKEERDAVRDLAFSQKEITYSSVRKALKLSNLEMFNISYILSDDKKKKTGDENPFELRDSVEKKIKFNYLKAYHIFKKAYGEEYDTWDSEKRDILAYVLTVFKTDSKIRDNLAENGFNEEEINIALTIPSFSQFGNLSCKAMRKMIPYLEEGYLYNEAAEKAGYNFKADDKCASMYLPTRAYIRPEHRKSPDQVEAPELGDITNPVVRRAVSQTIKVVNAIIREMGCSPTYVNIELARDLSKNHDERNRILKRNNDNKAQNERIMDELRKEFKFGNPRKSDLLKLKLWTEQHGRCMYSGEPIIRERLFEDNYAEIDHIVPYSISFDDSMANKVLVLAKENRDKGNRLPLEYLKGKDADDFRIRITTSTLKYRKKQNLLKEKITKDDEEGFKQRNLVDTQYISRFMTKFIKKYLKFEGEPKVVSVAGGVTSYIRKRWGIKKIREDGDTHHAIDACVIACTTQGMVQRIALYSKYRETEYMDENGNYFDVDRKTGEVINRFPMPYPTFRKELEMLSSNDPRRILSEKPLPNYDGSEQLKPIFVSRMPKRKATGKVHEDTVRTLYRHNGVEYSIQKVALEELKLDKKTNKIVSDTSEYYNPDSDRLLYSALKRRLEEFDGDGKKAFTEPFHKPKSDGSDGPIVKKVKMIKRITSYVLLNGENIGKKEIAENGKRVRTDVFYVEGEGYYFVPIYVDDTLKKDLPDRAIVQRKPMKEWKQMDDKNFIFSLYPDDLVKIVFPNNKTFKIKKELAKAGSTLPKEIVLKEGLFYYQGVNISSGNITVESNDGTYYSEPGPRKLISLEKYEVDVLGNIHKVNKEKRMGF

SEQ ID NO: 9760 - protein, 1076 aa, unidentified
  REGION 1..1076: note = Description of Unknown: Cas Enzyme sequence
MSSALERPQKYVLGLDLGSASLGWALIALNDADNPTSLIRAGVRIFEPGVDGTSMEIEQGKDQSKAVERRTARLHRRQLRRRAARQRDLFRLLQRHSLLPAPGTLDGSPEEQRHSILNELDQALARKWQSAFPDNRFAQLPLYYLRKRALDEPLEAYEIGRILFHLIQRRGFLSNRRENKQNPDQKKELGQVKAEIHSLEQEIQNAGARTLGEFFAGLDPHAQKVRRRWTARKMFQDEFEKIWETQVIHCPNLLTPELHDKIAHLLFFQRPIAAQSHLVGKCELESGKQRAPWAAMEAQRFRILQKVNDLRLVNPGSLISDPLTEEDRQRLYSLLDREGDQTFKAIKKYLSFPTDVQFNLEKGDEKRLRGNRTQAAMRKVFADRWDTMSAGKQHQIVENWRNSESDEALIREAEEQWSLDDTAATLLSEQIPEPGYCAVSLTAISKLLPLMQCGKSFKEAETEVYGARFSGGVVFDTLPEVRKQLESLRNPAVERALTELRKVVNAIVREYGKPYEIRIELARELKKPRQERLEATKKNRTRQREREDIAGRILRECGLSNPSRKDIEKARLHEECGGICPYTGRPIPFSTLFDNSEFDVEHIIPRSRYPDDSFQNKTLCYLPENRDVKKGQTPWEAYGKDEQRWAEIMTRVGSWKNRGKMARFSIQTEEALGEFSARQMNDTRYASVLAARFLGSLYGGRDVVDGDNARQVIFASSGAVTASLRSSWGLEAILHEIVPAESGESRGKPRTDHRHHAIDAITIALTRPKVIQSMARTASLEPWQIDSRAWRKIELPWRDFVPSIRPHIEQMLVSHRPEHKMSGELHKGTNYSAPYNYKGKPTVHTRCLLSALSAAKIADDEVIIDTAVRDAVRKKLAELGGNPKLFDRPENAPCLCARDGRLIPIRKVRIRETKNPVKVGKGVRERFTSSGGIHHVALFVTRDEKRREKWDSEVAQVTEIYRRCPRNDRRKSRSQPVVIESPISRQLKSDPEAQFLFSVMKDDTIEVTDPNGIYILRVKKFSDNKQMWFVPVNDAHDDTQQMKLGITWSKTPNSLKELRPRKVVVDLLGKVHPAND

SEQ ID NO: 9761 - protein, 1117 aa, unidentified
  REGION 1..1117: note = Description of Unknown: Cas Enzyme sequence
MSESGISTQPYVLGLDLGSASLGWALVGIDAMERPSSLIRAGVRIFEPGVDGAKPGTPASAQEIQFGKDQSTAVARREARLRRRQLRRRVARQRELFGVLQGAGLLPTDDTQGTGIGSEQRHRILNNLDVTLVNRYRNGADQEAFAQMPLYVLRKKALYEPLVLDELGRVFFHLSQRRGFQSNRKDVKKKTKDSEDQGQVINAIGDLERAIKAAGAQTLGEYLAGLDPHEQKDGQKVRRQWTGRKMFEKEFQMIWDKQREYHTDLLTPELHDRIWNLLFFQRPVAAQKHLVGKCELEPDKRRAPWAALLAQQFRLLQKVNDLRLIGEDGNELPLNEDGRAAVFDLLENHGTQSFAKIKQHLGLPKTAQFNLERGKAKELKGNVTAQSMRKVFGERWKEFSEGKQNQIIENWRNSEKDEELKREAMEHWGLDEAGANALVNEKAPGDYCSLSLVALGKILPLMRAGKSFKEAETEIYGNRFSGAAVHSIIPVLRPNRKHFRNGTPPPQDPLMASIANGLRNPAVERSITEMRKVVNAIVREYGKPCEIRIELARELKNPRSKRLDETARNRKREAENKALAERMHNECGTPQNPSRNDLEKAKLWVEQQGECPYTGRSLPFSRLFDDNNGFDVDHILPRSRHPDDSYQNKVLCWGDTNRMVKRNQTPYEAFAEQDPENWHQILARVARWKNPGKLRKFEIRSTDDLAEFSSRQLNDTRYTSLLAARLLSTLYGGRDVAENGGKRQIIFASTGAVTATLRRNWGFEQILRNIIPPEPSESTGKPRTDHRHHAIDAIVIALTRNDVIQSMARASALEPWQPGTRSWRHVPQPWCTPDFFRSVEEQVREMLTSHRPEHKVSGELHQGSNYARPYMYKGKSIVHSRTLVSELKVEQIEADDVIVDRAVRDILRAKLKEIGGTLKGSDKVKTFEKPENTPYILTPAGKRIPIRKVRIRETKNPLLVGAGSNERFVASGGIHHVDLFVTRDEKRRETWDSKVIQTTEMYDRFPKHDRRPGRPHTESKNLSRLRQNDDDDESRFLFSLMKSDTIQLEQDGHRQIFKVKKFEATGKMTFIPINNAMPDKLQYSTGAAWSKMPATLKSMSPQKVVVDLLGRVHPAND

SEQ ID NO: 9762 - protein, 1404 aa, unidentified
  REGION 1..1404: note = Description of Unknown: Cas Enzyme sequence
MKKTLGIDLGTNSIGWVIRNADLLDNQIEDFGVITFEKGVASEKGNEFPKVQKRTESRGKRRNYQSEKYRKFALLDFLIQKNMCPLTMDEFCNWKDYRKGKKREYPQSEEFLNWIRFDFNGDGLPDFHLFGKEKDDSYYVFRAFAADENHKNVFDNNPHILGRVLYQMVQRRGFKGRDEEEAKTMLVGSDKNGTKGRNDIEEYIEKYKTLGAALYYHQKDFGGRIRQRYNLRKDNENELKEICKIHQLSQEDYEKLWKAIIWQRPLRTQKGLVGNCIYEKNKKRVAVSHPLYEEYRTWVFINNLNIIPPFGEEKQNYISEKIYPLFYKSKPDFELSDIDKQLKKDGAKRTSKHNDKTKVLSVKLLKQFQDVFGEDWKQKLQWDINGDRNSQPEKKEKSLYTFEDLWHILLTFDGQENLKKFALEKLNLDDEKAIKFSKIKLQQGYATLSISAIKKILPYLQRGFLYSHAVYMANLYKMLGETTISETLTNHFSDEILKILENDDFNRKNSAIINSLISEMLNDDNRYYIADNRNLDKTEEQIVLKSITDNYGLETWGNFDEEKKMEIIDFVSSKYLEFLKKTYTEKGNLFIQPERIHDKIFNFLKETYHVSEDKIKYLWHPSEQENYAKADEYFEYSIGSKKYYVKEESTQNFLSRNPNAEFDGRQLKLLGNPEPLSKGFKNPMALKSLHKLKNLVNYLLQTGKIDEGTRVVIEIARELNDKNKRKAIENWQKDREKENEAFRKEIEVYKEQFPNINLIDENTLIRKIRLWHEQNKICLYTGKTIPFSELIIGNKYDFEHTIPASISFDNELKNLTISDSSYNRLHKGKKFPTQLSNYDSEQTINGESCNSILRNIEFIFGERIVEYKEIKGKTEKIVKWKKIDELEKQFDEWKKKASYANTKEIKDNCIVKYHTIKMDLDYLKSKLATFTITEYKAGWRNSQIRDTQIITKYALPYFKTLFKRVSVEKGGVTDIFKKVYKVQSRNSKKDRSVHSHHAQDAAILTLIPNAFHRERIIKAYENEIDNRTGKTYHEQPLDWENFSEKYILELQDKVLINNLTDNRTITQTYKTVRKRGKVVYDIDENGNSLKRVSKGDTIRGQLHGETFYGAIKQPVRDEDNKILFDENKKMILKDEIYLAVRKPLVYKKDANSPGFKTLDEVEKVIVDKGLFKMIKKQVEESDFKTALIDGVYMLNESGEKVNKIRRIRCFENGLKYTTAIKVHEHSFVSHKEYKQSTLATNGENTYCLFYKNDKGKAMKILSIVDLAELKLKNIQNLYNEPEFSSFEVGKGKNKYKIPLYSVLKSGDKVLFYKENIYELKDLEQKELSDRMFKMYQFEKDGRIKFRHHLAAGIDTELKKENPENSSVNFEEKQVFLRLSQGQWNFAIDGKDFEISLDGKINWKF

SEQ ID NO: 9763 - protein, 1104 aa, unidentified
  REGION 1..1104: note = Description of Unknown: Cas Enzyme sequence
MKKYMLHSAPSTKKSTSSKGGGDIQLSFDVGHSSIGWAVLQSVNGNLPNILGAGAVTFPSDDCLASKRRDFRRQRRHIRATKRRIQRIEQLLAHLGVLTPDQIAAKHQQAGGHSSPWLLAARILRGGKPLTWPELWDTLRWYAHNRGYDGNRRWASEEAEEHDEDTEKEENAKKLMQSHGVETMAETFCKELGVDPEGEKSSSQKRFKGLNAAFPRSIVENEVRRILKAHFGKLSSLDETFERALMDDAREIPCPAFKLAKRFAGGLLFGQAVPRFDNRIISACPVSGGKVCAKSASEFLHYRWLMQLANVRLVRPNPEFTKEERAIIHEKMQARGAFTPSEFEKAVVEATGCPTNNLKTMLMHPDAEKALLLDPVQKLIRSDRVQFLWPHLPERIQKRTRGKWRKVETITLRQILAWCDEIGTDSTTVLQVAHDAAVAKQAKQKTGRSAKAVMASGKDPLDIPLQIERLSGRAPYARHVLRQACEEILSGFDPRRKCKANDPTGGEDKPKDGCLVTTDSMTDAALNKPLDELTNNHLIRHRLLILQRLTADIVADPAFCDGDSERVRAIAIEVNSELKEMSGKSAKQVAQEVGLRLSDFKSVVKKLDEDLAGTNLPINPSLIRKARVAKDMAMVCPYTQANPFSSIELAQGQVDKDHIIPYSQRPSDSLDSLVITYPEVNRWKGNRTALQFVTEEEGRQVPGRPNLQIVTLAKYRAYVENLKVSRRKNPTSGEWEDTDDGKRQRRRKKLLLLPKWDQKDAGFLPRDLTVTSHLTRLGALVLRRSLPHLQPHQITSLPGSVTGTIRTGWKLLGCLAAANPAVLDVSGNVKTKTEIRGVTHMHHALDAIVIGLSHHFFPKNGRLWEAIVRREKQRSAEDNTFLLATGLYQTTQHGVLFAKEPPASLAAQIRTALAQRRVVQHVPKDMGGVRAEQNTWRVLSVRDGVATLRQQMRGPDGKKQTAKFSEEKAAKLMGLTKGKLSDLKGALVIGDNFGLAILDHASEHDDRLVVIPWHKVWHRLAELKLKNGGKCPRVLRNGQLIRFKEKGVEKTWRVCSIKNTARGIMLDVALPDEISPSRAGNRVASFLKNSMEILNSSLTGRNFS

SEQ ID NO: 9764 - protein, 1334 aa, unidentified
  REGION 1..1334: note = Description of Unknown: Cas Enzyme sequence
MKKILGLDLGSSSVGWAFVHENEENTTILGAGVRIVSLTSDETNDFQKGKAISINKDRTLRRVARRGLQRFKQRREAILRKFKSIEFISKDFKYAEEGSFSTHQSYANRAKAATEKISQEQFVQVLLMLNKKRGYKSSRKAQETITDGQEMGVELDGMEIAQKLYHQNITPAQYALPIVLEGGDVPEFYASDLTNELKRIVHFQLSVNSKLPQDLLECVLNKSRNATYYYFDKISGIQIAENKGSREEIKKQKFIWRTSALTEKVDASVLAYILGDLNDQISKASGYLGKISDNSKELTINNLTVGQYQYKSLTENPHTSQRNWVFKRSDYLNEFERIWETQNKFYPELTEELKKQIRDITIFYQRKLKSQKRLISFCEFEAKHRVAPKSSPIFQLFRMHQNINNIEIKSDMPIVIDEEVRNAILEILTYNGTLKDKDFLIGLGINHKEYKINFEKINGDLTRTNIFKILIQAWEKRGNSTKELEYPLKKSDALKVLGGLGLPSNLLDLDIELGGNDFDKQPYYQLWHVLYSLDDDAKVVSALTKNFGFTYELAKAMLRVKLEANYGSLSAKAMRKIIPHLADGLIYSEACAIPYKTHSKISLSNEQNDARQLKEKLELIKKNSIRNPVVEKVLNQTINVVNAITASEKYGKPDEIRIELARELRASNEEREMMTKSLSENTKLNEEVRNILQKDFNLARVTRNDIIRYKLWQETSGISIYTGRPIPASDLFSGKYDVDHIIPQSRLFDDSFSNKVLCERELNNEKDNQTAYSFLKQKFSNTDFEQFVLRVKELSKLKKIKHTKGEKLLLTNENIPDDFIQRQLNETQYISKKAKEILHDICRNVYTTTGSITDKLREDWGLVEIMKELNFSKYQIAGLTYEEQGKNGERLLKIKDWSKRNDHRHHALDAITIALTKPAYIQYLNNLNANNKGIIQNSLQNKYIERIDGKWRFKSPIINIRGEVKSLLESILISHKAKNKVVTKNINKIKTKSEIKLQSTLTPRGPLHKETIYGEQIVYETSLVSVGANLTEEAIFSVAKKKEREALLSRLHAFENDPKKAFTGKNSPAKNPILYDLSRNKEIGNKVKVVSLTPTYTVKKLVGPDLDEKKIQKIVDIGVQRKLMERLAAFGGDPKKAFINLDENPIYLDKQKKITIKSVKLSGITTATAIHTKNNNPINSYPKDWVSLGNNHHVAIFEDDNGNYQDDLVSFFTAVTRATAIPSMPIIQREHPNGWKFLFTMKANELFVFPSDEFNPAEVDFANPKNYQLISRHLYRVQKLSLRYYVFRHHLETNVEDTKELFGLTWKRITNNSNLKGAIKVRLNHLGEIVKIGE

SEQ ID NO: 9765 - protein, 1079 aa, unidentified
  REGION 1..1079: note = Description of Unknown: Cas Enzyme sequence
MTRASLRFAFDLGTNSIGWAVYRLDGFPSNTFSPTVDELLGCGVRLFDDGRNPKDGKSLAEMRRVPRSARKRRDRYLDRRAELIALLTDTGLMPRDEAERKALTTLDPYALRAKGLDQALTPYEIGRALFHLNQRRGFKSNRRTDRKTDDKDKGLIATGAKRLREAFAREDVRTFGEFLWKRHGGAGGQATPRTREAVRIRVQGQGAKALYDYYPLREMLEDEFDQLAAKQHLFYPAILTAEAISQLRHAIFWQRKLKPVERGRCTLLPDETRLSKALPSVEERTIYETLNHLRYGTGVTRDRALDKQQRDLVAATLLLGKKGKPVRFDALRSGLKLGSDVRFSLEDSGKTGLEDFAAQSAAAMSDKKRFGALWHHLPLEERDAIVTRLDEEDDEKIIVDWLTSKYSLDVEAARAVAAWTPREGVSRLGKTANSAVLAELKADVIKYNEAVLRAGEKLGLNWHHSDFRDGVIELPLPYYGQILERQVAFGSGKPEDNPERRYGRITNPTVHIGLGQLRRLINALIVAYGNPAQIVIELARDLKLSKDQKDKERRENAKNREANDLRRLELEKQGEQDNGENRLRLRLFEEQQRANGGVALCPYSLDPIGLEKLFSANIEIDHILPYSQTLDDTRANRILCYRSANRDKRRQTPHQAFGRQSNWADIVAAAAGLPPNKRWRFGEDAMERYQNKERDFLARQINETRHLSRLAREYLGAACGYDNVYVTTSQLTAMLRARWGLNSILSDQNMKVRADHRHHAIDAITIGAIDRRVLQEVARRAGIAEDEHRDRITADVPDPFPNFREHAREKVRAVIVSVKPEHAKGGALHEDTAYGLITNPAEAAIIGNLVTRKPLVDLTAGEIDSVRDPVLRAKLQALAGPFRNDKGKLIDDKGLKASLSAFRVEETVAGKVVEREIRRIRIGKEKTGAVHIKDRRTGVVYKALLPGENHHIDIVQMRDGSWRGFAATVFEVNQKDFRPIWEREKLGGKLVMRLHKGDMIEVDDTDGERRVKTVHVLQPSERRVFLAPHHEGGALQKRHDNKDDLFRWDFANIAGLKKRNARKVKVDEVGRMKQARSNV

SEQ ID NO: 9766 - protein, 1060 aa, unidentified
  REGION 1..1060: note = Description of Unknown: Cas Enzyme sequence
MIPLNVATKRWKEDPFYTEAVVLGIDIGIEGIGVAVRRGPEVIFKRTYMVSLPESAALEGRRLMRSARRCRTQRKRRDFLLRMFCEKHLGGAWSPITKRVLEQRQRGLEGKLASPHALVQCLRHIIAHRGYSYHLKSDGAFLWGDSPKFSDAKNWLKAAYCDGEVARLLQQQAEDLQWSDDQTEDFAALCEEAVRNSEGRSIEATLKRHLAKSADNKRERFRGNAWPREHVQSHLEKICRNHPQFFGGQERMEKLLPRLLAILNHERKNAEERAAHARGKAGKCDFAPVLLGKADITRGFQGDEAIRVLNLFDFLSTRRVATSDGLLHYPTPAWIYQQVDFAKADSAAVAQNQPRLRTTPPELKKTLLEALNQALGLTGKQSLKWEKGSSLNKDYFDQLKDLLCLRRTNFDKRASLSSEAAAHITGSLLTSPVAKVSAINDQLSEYRKLRRDRLRSIITSPQVEFLLGGDSRPEGRIQRIFASEEVTKALGKKTKPDFVVIEVVGGAARNTSEAFEIRKAQLEGRKHREELIKKYEINEADAKGETMLRVSLFEQQRGICPYSGKPLGSPTASTLEIDHIFPREMGGTSEKRNLVLAFRECNAAKGKRLPYEAAKAGDLPLDWKEILKVCSSMKWGVVNKEGALNKRTIFESLQDSSKCPDWGNLTRQSQIARELRDSVAQWMGLKGDATKMAQCIGTPTGLHTAVCRRAWKQTIPRKNRADLTHHLWDAITVSFIPPAKGLNTIEYGGIFYHVTEASAAVTEMTALPVCPELTSLDKDADECLVERPRQSSSKKQRFDKSIYGRKADGTLRIRKPIKKGEGIASDEHSLWKALKASGIPDEKIPPPKVLRSWLDSDATGPLRLKDGTSVGSLPIKAGKPGTVMTQVAHRNHEGQAMGIKVAGEANWRLEVWKTQEGNAVKYHTRIIPHPRALKVFKAANGVAAWKKKDKTTGKTWRQQVTGSLPPYAKKVGHFEKGMKLLIPLNRNGEISDSYDNAYVKTFFLVTSIKSNGQLPMQMAQTKPPASAEDKWTFFDLPRTSFSCAPSSASTLAMLLLHSGV

SEQ ID NO: 9767 - protein, 1018 aa, unidentified
  REGION 1..1018: note = Description of Unknown: Cas Enzyme sequence
MQQKVLGLDLGSNSIGWALLNEDNNTASEIIDLGSRIFIKAVEEKTPTPKNEKRRESRLGRRVIQRRARRKQRMLNYLVSLDLLPKELQNHAQPEIVLNGLGDPYELRVKGLDEQLTPHEFGRILLHFVARRGFLSTKKQVAGDLVDDPDTLDYLNALDNKPTKDKEEGQFKADIADVYQAIKDADARTLGEYLFNLESGKVKRNRSHDGGHLRTERKMYQDELELIWKQQSQYFNHLPSDFMQKDKGVLVIIFYQRPLKLRKDRVGKCSLELNKYRANIARLEVQKFRYLQDINNLQFFDRWQEKWISISDEQKIKLKNLFEYNAKITVTMLKKELGLDRPTKINLEAKNLKGNITAGEIRNIIGSAWDDCSDKQQHDLFEDLFTIKKKSALKARLITHWDFDKQTAVKLCLIEFEPTYSNLSLKAIKKLLPFLEQGMIYSDARQAAGYDYEVAEIEAVNTLGIPPETSNPIVNKGMHELRRLINAIIKQYGKPDVVRIEMARDLEMNTKRYKENEFRQKKNQKANEEAQLAFEGLNLGKKYASRDDKIRYRLWQDQDERCAYSGATIALNQVFSAECEVDHILPFKRSLDDSYMNKVLCFTAENRNKSDQTPVDAWGGDNDKWNQITQALSHWDKSLISKTKRFYTKEADLQKRDFISSQLNDTRYMSKLAQDYVRQLGCDVNITKGFVVSQIRHQWGFNSIIGEVNKKDRTDHRHHAIDAVVIAATSRNLYQNAVRQIKHDRLNIAPPYAHIREELDERLKHTIISHAPQRKLSGALHEETGAGYIEKHGGLVYRKTLSPEFTLKNALSIVDEAVKTKVLEHFENYPNPKEAFNAEHLALLKLGKNPIKRVRVLQSKTNEKKLAQTKFGVRDKTGKIFKYMSYGNTHHVEIIKNSKTGKVKGEFVTTMLASHRAKGINIPKQAIIKTDYGQDWEFVMALHINDTVSIEQGDGERVFYRVQKIDTGAKRFVLRLGIASTLKNKDEEIYIGISKDNFDKYKIVKHDINTIGHFIEHD

SEQ ID NO: 9768 - protein, 1042 aa, unidentified
  REGION 1..1042: note = Description of Unknown: Cas Enzyme sequence
MVKKGQRTILGLDLGTNSIGWALLAEEQGELKSIIDLGSRIFTKAVEEKTPTPKNVKRRDARLGRRVLQRRARRKQRMLNFLVSLDLLPQTLQDHTQPEIILNRLGDPYTLRAAGLDQSLRPHELGRVLLHLVQRRGFLSNRKTLLGDLIDDPDVQSVLHEMGEDDPNTTTDKEEGQFKQDISLLRTEIQAKNCRTLGEYLSTISSPNCRRNRIRDGGHLRTDRQMYREELDLIWQQQALHHTKLTNELKEEIEEIIFYQRPLKLRADRVGKCSLESKNNRARLARLEVQQFRYLQDINNLQYLDHYKNRWVPLSSTEREKLTLLFESKATITFPQIRKTLDFDKKTEFNLEKGGNKKLKGNITITTIQSQYPDWDQLNQQQQQQLVEDLITIQKKSVLKRRLMQHWKIPAEFAIHLCMVELEPGHSNLSLKAINKLLPHLLQGNIYSDARKAAGYGYEAEELQVIDKLGLPPEIPNPIVQKGLHELRRLLNAIIAEYGKPDAIRIEMARDLEMNTKRYKSFVKQQNNNTKANDKATDEYRAVGSKNPHLQLRHYPSHNDKLKYRLWSDQEQRCAYSNQAINMTTLFTAEVEIDHILPFSESLDDSYMNKVVCFTRENRYKGQRTPIDAYGGDEEKWNQIAQSLSHWASKLKGKRNRFYMTADDVQQRDFISSQLNDTRYISKVALEYLEPLGVEITTCKGATTAQVRHWWGLNSLIGETNKKERTDHRHHAIDAVVIATIDRRFYNTITKLAKEMERSHTSINDLHLDPPWKQFRSDLEQQLQQTLIAHTPQRKLSGALHEETGVGFIEGKGCVERKNLDADMSIKRAGKIIDDSVRELVLEHLQQHGNNPKQAFAEGFQLFHKDGKTPIKRVRIIQSSTTLKKLEQSKFGVRNESGVVFKWHAYGNLHHVEIIHHRVSGKVSGQFITTMEATHRARGIGMPKQPIIQKNHGADHELLMALHINDLVSVEHDGERVFYRVQKLESGGNKIMLRLHTAALLNNKNEELRLSINKDVFEKWSLRTEQINVIGKPLISNDQTHR

SEQ ID NO: 9769 - protein, 1472 aa, unidentified
  REGION 1..1472: note = Description of Unknown: Cas Enzyme sequence
MIKKILGLDLGTNSIGWALVEHENGLFNLAECDDKPTKGVIVFPEGVKIEEGKEKSRAAERTGYRSARRLKFRRKLRKYETLLLLSKNNMCPLPESKVTLWRKSGFKEYPGDPVFLNWLKTDEETENNPYYFRDKLSKEKCDWRNNNGIAYELGRAFYHMAQRRGFKSNRLEQSDENIISDTKEQIQDIITEAQDKTQLVQGIEEIFADYDFENRKNSELNTTELKLKKIWKYSCSTVPENRVKEKDFSNFEDAKKEIDRYINRPENLGEVKGKINELSNKIEESDCQTLGQYFWHIYQQDRNIPDHKIRDQYTAREEHYEKEFNVICDKQQLPDGLKGSLHKAIFFQRPLRSQKGLVGKCTFEKTKARCPISRPEFEEFRMWSFINSIKIKNPDDEQLRCLKPNEKDMILPKFYRQKANFKFSDITKALNPKADFAYYKEYDARDAEFLVNYKLNTTVSGCPVSAALRNVMGDNWKTKEYDYDTTNSNGANIRRAVDFKDLWHILFTYNDSDKLKEFATKKLCLDSSRVRKFSNISLQQGYGSLSLKAINKILPWLKKGLFYSHAVFMANLARVVDESVWSNSDKRKLIEDSISEIIGNHTIETSKAKAVNELINEFKKDEASYSEDLESDISRDLEEKLKNIYGGKVWERNSNRDALLRSTCALFESQVKKTGKNVFGKIKRIDDMVLEFLVDNNFVSDSKRLEYLYHPSDLESFKPAKAKDKEGNPIIINNEELEILPSPKTEAIKNPVLMRAMHQLRNLINTLLKEEIIDANTRIHIEMAREVNDSNKRAAWKKWQDKLRDAREDAIKEIKDLYMAECGNEVNPTEGDIERYLLWNEQGKKQIYESECNNISICDIVGADPMYDIEHTIPRSISWDNSTMNKTLCTKKFNRGVKKNRIPSELDNHADILQRIMLWKDKYTKLDTEMKKINASTIVDKDLKNRMIQKRHLLRFEYDYFKGKYERFVMEEVPSGFKNSQIIDTGLIARFARKYLSCLFRTQSDNSNVFVVNGQAVSEFRKVWGIQDEYSKKSRKSHIHHCIDAVTIACMTRDKYNAFAEAWQDVEGHKDKYDVKERLQIPKPWPRFTEDVMNLESEVLIVHTHKDNVPKQSKKKLRKRGKIQYKDKEKKQPRYIQGDTVRGSLHQDTFYGAIKQNGNSTVKYVVRKKLSDIKDADLKKIVDLKVREIAIAARKKEKQLKEEIEGIKKVLKTADRESEKGHSEQIKAIEDHIIKLYIIPPRSGKNIHTPIRRVRTYAHVAEPLPDFKKHLNKKINPDGKERYVYKNWYYVQNNMNYCLALYESADKEKRCAEIVKLIDAVNYFKLSKRNQKNECTLVEPEKRGMKIKGFLRPGMSVLFYKVNPDEIWKLNQNDINNRLYFIKKTSKSGQVAFQYHQESRNDNQIKEDYITQHGTNPPNSLTNGVSSIDFNNSPVPRLLLSPVNMKMILESIDFRITINGKVEPILHSDEDK

SEQ ID NO: 9770 - protein, 1061 aa, unidentified
  REGION 1..1061: note = Description of Unknown: Cas Enzyme sequence
MSNTKIKKILGLDLGSNSIGWALLENKDGRPQKIIDLGSRIFTKAVEDKTPTPKNVNRRESRLTRRVLQRRSRRKQRMLNYLISLDLLPKSLRDNPAPEIILNTLGDPYELRAVALDKPLEKHQLGRVFLHFVQRRGFLSNRKTILGDLVDDPDVTAVLAEAESEEDTSTEQAKEETVFKKQISVLRQTILETLAPQNSKSKDNKCRTLGEYLYTIKAPLTRRNRTHSGGELRTDRQMYRDELDLIWKQQATHHTVLNEDVKEQIEEIIFLQRPLKLRSDRIGKCSLEPKKNRISIARLEYQCFRYLQDVNNLEFMLPSENHWTKLNEDERQKLILLFESKSSVSFTEVKKTLDLNRNVKINLEEGGNKKFKGNVTASAIRKVIPEWDNFDSPQQLSFVEDMLSIQKKSTLKKRLTGHWNLNPETAVQLCMLEFEPGHGNLSLKAINKLLPYLERGMLFNEARVEAGYGYETEQTEAKERLGMPPETSNPIVNKGLHELRRLVNAIISEYGKPDVIRIEMARDLEMNTKRYKANETQQTANTKANEKATEAFQEIGSKNPQLGLRHYPSHTDKLKYRLWLDQEKRCAYSNQCINLTSLFTGEVEIDHILPYSQSLDDSFMNKVVCLTSENRNKGQRTPVDAFSTNPEKWEQIKQAIFKWGKKLKSKQNRFFMSAAEVQKRDFISSQLNDTRYMSRVALDYLKQLGADITTCKGITTSHVRHWWGLNNLLGETDKKDRTDHRHHAIDAVVIATIDRGFYNKIVSTAKSFEESNSALSMNDLVVNPPWSELRNDLDKKLGTVIVAHVPNRKLSGALHKDTGVGFIKGKGTVYRKLLNSDMTVKRAEEIIDPHVRALVIEHLSQFENDPKKAFAEGVKVFHKDGKTLIKRVRVLQSKEYKTLEKLEKSKFGVRDHQGKLYKWFAYGNNHHVEIVRNRNTRKVRGIFVTMMEASHRAKGIGNNVKVPKQPTVKTDHGPDTDFLMDLHINDLVSVEQEGERKFYRVQALERDGKKLELRLHTAATDQKPEEGVRKAITTLVNDFHIQKHSVNSIGKIRNDKTHSRH

SEQ ID NO: 9771 - protein, 1545 aa, unidentified
  REGION 1..1545: note = Description of Unknown: Cas Enzyme sequence
MKKILGLDIGTNSIGWALIDQHFPEKKGIILGLGSRIIPMDQGTLGEFERGNSVSQTKERTTFRSVRRLRERHLLRRSRLHSVLNILGYLPEHYVREIDFETHFGQFKNDCEPKLVYQPKGDNGKPEFIFKRSFNEMLKEFHGKHPDLLEHNKKVPYDWTIYYLRKKALTQRIEKQELAWLLLNFNQKRGYFQLRGEDEEDSVNKMVEFHALRVVDVIDSGDRKGKDEVWYNVMLENGWIYRRTSNIPLDWIGKIKEFVVTTDLNEDGSVKKDKDGKEKRSFRAPLPNDWTLVKKKTEFEIGQSNKTVGCFIYDTLIQNPTQKIRGKLVRTIERKFYKTELKLILEKQMEFHPELQDRQIFSQCIHELYKKNESHRKSLEEKDFVHLFMNDIIFFQRPLKSKKSLIADCRYEVRTYKNKDRSIGSEPVKSIAKSHPLYQEFRLWQFLRNLKIYRKNAEIEGKIISELDVTSQLLTSEDDWVALFDWLNDKKEIKQEVFLKYPPFKLKKEIGNYRWNYVEEKIYPANETRALILSRLGKCSNIPEDFFTRQIEECLWHILYSIEDLEEIEKALTTFAGKHGLDSEFVENFKKFPRFKKDYGSYSAKAIKKLLPLMRRGKYWREEDVSKHVRNRIDAITERLISIGYDRTQIPEITDDDIPKQVLKSFIECENPIQALNTYQACYAVYGRHSEEGEIVKWKNPSEVDHYLKSVFRQHSLRNPIVELVIAETLRVVRDIWNHYGNGMENFFDEIHVELGREMKNPADKRRQMTEQIFANENTNLRIKALLEEMSHDPDIENVRPYSPAQQEILKIYEDGVLKSDLELPEDIIKISKNAQPSRSELNKYKLWLEQKYRSPYTGEVIPLSKLFTPEYEIEHIIPQSRYFDDSLNNKVICEAEVNKDKDNSTGFEYIRENSGKILQLSMGKMVRLFTLESYQDYVKTNFSANRGKMKRLLMDDIPEAFIARQLNDTRYISKVVKNLLSNVVREDNEQETTSKNVAASNGSITSELKRAWGLNDVWNELISPRFIRLNQITNSNQFGEWINRDGKHVFQNRVPLELQKGFSRKRIDHRHHAMDALVIACATLNHINYLNNESAGSSKRYDLRSLLCFKDKTDGNGNYKWNFYKPWDDFTREVKDKLETIIVSFKQNNRVINKTVNRYQKWKMDEEGKLRKVFVTQEKGDHWAIRKPMHKDTVAGAVTLKFKKQVQLSSAIEQVEMIADKPLKKEIKDLMLAGNDKKAILKYFKANMNKFQERDISRVEIYYFDKQNVASRVAIDESFDSSAIGNITDTGVQKILYNHLAKYNEEKDDTFLEHPELAFSPDGLDDLNKSLSSLNDGKTHKPIFKVRCFEPKGNKFNVGTTGNKKFKFVEAAKGTNLFFAIYQNPEGKRSYASIPLNVVIERQKQGLLSVPEVDENGSALLFFLSPNDLVNIPSKEDSTSLNSNPIYVTSDIQIKNIYKFIDSSGTTANFVPCHVSDLIYRLSKEDAGKLKEKYELDYPGIIQNEFGVGSSQSKNQKSLDGMMIKEICRKLNVDRLGHLSEKIS

SEQ ID NO: 9772 - protein, 966 aa, unidentified
  REGION 1..966: note = Description of Unknown: Cas Enzyme sequence
MILGLDIGTNSVGWALINTDSDGKPVGLHAAGARCFDAGLDGDVGSGRGEPRNAKRRDARQARRQGWRRKRRRKNLIGILQKHELLPASIERTPQGIHDGLVALDTSFKKTNPPKNHREEQLLPYILRANAAKEKVELFELGRALYHLAHRRGFLSNRKESEKEDDETGAVKGGIKDLREFIEESGEATLGGYFSTLDPSDARIRQRWTGRQMYIDEFNIIMDEQQKHHDISGETRKELYKVIFDQRPLKSVAHLVGRCELEPKERRCLMALPIAQQFRLLAAVNNLMIEEDEYSQRMLTKDERDTLIEALTTQGDLTFAKIRGKTILGLPRGTSFNLEKGGEKRMCGDRTTSAMVNIFGDKWDEMSVKDKERVINDLRSYEKTDALRRRGKQEWQLEGEALQAFLDVRLEQGYGNISRKALLKLVPNLEDGTPYSTARKNEYKESFLADEPHEKIPIVEKLFPNLRNPVVSRSLSEVRRVVNAICKEYGIPEVVRIELARDLKQSQKHRRDATKKMRDRESEREKARGRIIAETNISNPSRNDILKVLLMDECGGICPYTGRSFGMRDIISSAPTMDIEHIIPFSRSLDDSYINKTLCDAHFNRNIKKNKTPWETSGGTDEWNKILNRVGKFKSQVRHLKLQRFELDEVGEELIEEFASRQLNDTRYASKLAAKLVATLYGGTSDEDGTLRVQTCAGRATAYLRNGWELNGILDDGPRKTRNDHRHHAVDAVCIALCDAKSVKLIAKAAEQLEERYHKLIGNIRAPWNGFVPSIREVIENIVVSHRVDCRLNGALHEETNYGVSIQDNGETLTRIRKPIEALTSGEVNRILDPRVKKAVLDALDGKPAKTAFKDRENHPRLETKNGQSIPIHRVTVEPKIKNTVSVGSKGAPRHIAPGSNHHMAVVAVLNEKGEEIKWEGHVVTRLEAIQRKSRKEPVIQQIWGDTEKSLKRVFKFSLRSGDTIT

SEQ ID NO: 9773 - protein, 979 aa, unidentified
  REGION 1..979: note = Description of Unknown: Cas Enzyme sequence
MRGRNMTRRLGLDLGSNSIGWALLDDSARIVATGVRVFPEGVDRDKKGGELSKNETRRVARGMRRQVTRRAKRKRRFRKLLVEAGLLPPCAALRPGSPERVEWERQAFLASDPYVLRRRALSEPLDSHELGRALLHLCQHRGFLSNRKADRENKKEASKMLAEISQLESQIQASGAGTLGEHLAGLASSNPLARLRGRHTRRSMYEHEFDAVWLAQQPYHQAALTDGLRKKLHHVLFHQRPIRVPKSVIGTCELEHNRRRCPRADRRAQRFRMLQEVNNLLLIDEHGEERPLSTDERSKLLDYLAAADKRSFDDIRKILRFDQAVRFNLERGKRKNLLGMQTDKAMSHKSRFGAAWGAMDEERRNRIVRCILDEEEAAVLRLAEADWGLSAEQAQCVLEAELPAGYMAFSREAIAKLLPHMERGLPLMADDGTACAISEAGYLRPDQRAIERRERLPLPPDLPNPIVRQALHEVRKVVNAILREHGPIDQIHIELARDVKGSLEQRTEYLWRTREREDQRDKAADAIRQHGVAPTRETINRYLLWAEQGGECVYTGRPISLAQLLGGEVDADHILPKPRSLDDSMMNKVVCFRSANAEKGNLTPYEWLAQTDPPRYEKICLRARKMFYGMYGKYRKFLLREVKLDGFIHRQLTDTAYISKAVRQYLQPLVPNPMKDILCTKGQLTAELRHGWGLNNILRDDGLNLKTRDDHRHHAIDAIVIVLTDRSRLQALARENVVPPPRDGFREEVQAAINAIHVSHRVQRKVAGALHEETIYARTAKDGEFACRKPIKDLKGSEVERIRDHAVRAKVIERLREFGIEPGRKKKGEDKKPIPAEAWARPLWMNEEKQIPILKVRLTKPDKTIQPIRGGAAYVKTGSNHHLCIFELPDGKRKAEFVTMIEAARRAAKGEPLINKKHPSEPDAQFIMSLSKGELVLADWKGQERLLQYNTAASTQGQIYLVDPLDARPAAEKQKFVCN

SEQ ID NO: 9774 - protein, 997 aa, unidentified
  REGION 1..997: note = Description of Unknown: Cas Enzyme sequence
MNPYYVLGLDPGIASCGFALIDTNNHKILEMGAHLFDAPQESKTKTSLAVARRNARSSRRNNERTKNRQKHCIRILVAAGLAPEGADGKWFQTVAGDKPSLELRAKGLDERLSDREFAQVLFTLSTRRGYIPHGEGAVGDIDSNADNETGKVLKAVADNARIMRDNGYRTVGEMLYRMGSSRNKAGEYDHSVRCSQIVDEVHALFEAQRSCGNSKATEDLESRYVDNLTWEKKTADHDAQVYSRVGACSYFPNEKRAARADLSSELCNAYERFAHLVMVDEAGAEARLTAQQRDGYVSLLFSPVPANGNKDCKVTYSKIRKDLDLPSTTCFKGVEAEKEKDTEPSTPKAWRCMRSHGVPSELLERMLNDRALADAIGEALTFASTEESLRQQLAPLELSEEEAESLCRLPFSGKLFKGYGSRSLKALGMLTDAFADPSVTTLIEAEKVTGLLGCRLSREGVRSELLPPYEVFDPTCTNPVVLRAMGRMRRIVNAIIRIYGVPNEVHVELGRDLKRSKREKAAVQKKQSQNERDNRRRRELAAGILGIEPDAVPYRIVEKLAFREEQDDKDAYTGQSIDLQRLVEDEHYCEIDHVLPYSRTCDNSRKNRVLALAESNQRKKERTPYEWMTSGEPDAPKWEEFSARVMANAAYDQQKKRRYLLNTNLDEEAQSDFLNRNLNDSRYMSVAVKNYIADSLLFPESDGKKNHVIAVAGGATASLRRAWGLNFGKGNEKDREDDRHHAVDACVIAACSQGTVQKVAKASARGRDSFERTKESRLAGTQPWPTFATEVTEGKCAVVPTRMVSHGVTGRAFEDTNYRLLGVTNDSKKLGVLRGNRKDVKKGNYIIGADGNAHLVDGMAFLRLWLDPDAKRGKGKWYAEPVYYADIPAMRNGSYVPRAAKVHVARAAWDPLPESAMMRQPIVLFRGDVLSVDGMLARYWSFNINSCSLELRPLTVDDDISGFPTLGKWSAGTAVKVVEEDCLGHCYCGLIGLEDEC

SEQ ID NO: 9775 - protein, 1378 aa, unidentified
  REGION 1..1378: note = Description of Unknown: Cas Enzyme sequence
MEKILGVDLGTNSIGLTLREDNDFTWYGVYTFKKGVGEGKSGEFSYAAERTKHRSSRRLYNARRYRKWETLKVLIENDYCPLSKENLDNWKHFKKGTGRSFPIEDILFQEWIKLDFDGDGIPDFSSPYQLRRVLITQSLDLALAENRYKIGRVLFHIAQRRGFKSSRKSGANEKTAVFNGSNETKTIGRNEYENLIIEHGSLGAAFAACEDQKIRVRNRYTLRSDYQVEVQKILEFQSIKDAVFCVRIDKAIFYQRPLRSQKGLIGKCTLEPNKPRCPISHPKFEEYRAWSFINNIKYKNTDTNQFVPIPIALKEKLYQEKFFFKSKRDFPFKEIRKFIYANGGKDWELNYNKKMDDISVSSCYVSARLKSVFGEAWESYKKQIERVNKKGEIVTINYSIEEIWHILFSFEDEEYFIEFLTNVLKLEVDQIKELTTLFNGFPVGYANLSLKAINNVLPFLHEGIIYSESVILAKIPVIIGEKLFEDNKTNILQEIQDKVEEIRKQKTIVTIANNLIFKYYALDYDQRFGWKNTAYKLDESDIKDIEVASQEHFGEKTWSKFDLNSKQSILSGVTGLYQDFFASNKREHIPQPHLVNSVKEILSKNFDAADNALNKIYHPSQIDIYPKKEGQQFLLSPKTAAFKNPMAYKTLYKLKDVFNYLIEKGIIDNETRIVVEIARELNDSNKRWAIEKYQRDREVENIEFANAISELIKDPTFTGVADPNNDSDTDKFRLWLEQIENTEEIIKEVQNINKNKQLSVSQKDAQKYRLWKEQNCICFYTGKVISLTDLFDANKVDFEHTIPRSKSFDNSLANLTVCYADYNRNVKKNQMPTELPNYSEPWNGYPAIKPRLESWEKKVEDLFKQIDFWKFKSRTAMDKASKDEAIRQKHLRQMQHDYWKNKVDRFLQTEISQGFINSQLTDTQIITKYAFHYLKTVFNKVDVIKGSNTAEFRKIFEIQTKDEIKDRGVHSHHAIDAAVLTLIPSSKKREEILKKSFEYEESNYGKQYHEKPFSGFHYSMIEDIKKKILINNIPEKDQVLTPGRKIVRKRGRVVWIDKPNRIPKIAQGDSIRGELHLQTYYGKIKVAAKDENGGLNRDDKGNVLYNQVDGKDEIWMVIRKPIDNINFSTDIIVDEHLCAILKKQLEDGIKQNDLVDFQGKKLRHLRCRVKSARGFMNPENVTVVKEQTYKSEKDYKSYIYADSGENYIFGLYENDKGREVKSINKFEAALYLKNIGRPENKSELFSQKEPVLIRNEESRLIHVFEVGQKVIFYNSLEELREIENDIQALSERLYFIKRLHQASVGNIMFQHHLEARSDEELALAFPKEIFKSAGKDGFSKYQTDFVAPRLLFKPSKPNFIIEGKDFEMTLDSKIKFKF

SEQ ID NO: 9776 - protein, 1054 aa, unidentified
  REGION 1..1054: note = Description of Unknown: Cas Enzyme sequence
GVFMALVFGLDIGIASIGWAAIDEEQEIPLLGLGSRIFVSAEVPKTGESLALPRRLARGMRRRIRRRAHRMWRIRKLFLRDGLADDAALADLHETTADDLTPWLLRADGLNAKLNQRDWARVLLHIAKHRGFKSNRKSEAGDKEGGKLLMGVTGNAKLLKDKNYRTIGEMVWKDEKFAVHKRNKGGDYSHTVARDDLLLEITALFEAQRHFGHGNATEAFEIEYTKIFASQRPVDDGEIADMVGECTFELGEKRAAKATHSAERFVLLSRLNNLMLIEAGERRVLDAEQRKVIETMAYKSASVKYKQIRKALDLPEAIRFNLVQYKSGEIDKTEDIIFAELKAYHKMRSAITNACGELAWGSLTNQPDKLDAIATALTWYKSDDKIREILAPEQLEPALLDAVLALSFDKAVALSLKALRNINPFLTQGLRYDEACTEAGYDHSVPTEARPQQFLPIIDVDEVRNPVVLRALTQARKVINAMIRRYGSPAQINIELARELSQPYSERKDIEGKQKEFQAEKERTVKQFNDTFGRDPRGDEFTKFRLWREYNYCAYSGVYLEPSRLLEEGYAEIDHILPYSRSMDDSLNNKVLCTSKANRDKGNKTPYEYLNGASLSPQWHQYKVRIETHKAFRQAKRNRLLRVDFDETAEQEFRERNLNDTRYIARFLQEFLKLNLQFSPSDNKIKVQTRNGAVTSFLRAHWGLLKVRADGDLHHALDAAVVACTTQGFVKRIADYSRQKELWASDKKSGDNSRNLEIVDTDTGEITETNYQQKNAKDFPIPWLGFRADLKDALTEVFVSRAPTRKATGGVHDEKIRSTKRMTGEKPVTTSKTKLQDLTLASLENIPDKLTRNANLYQALKKRIEAGGKEPFAQAFYLGKNGEEDDAVDGRLIKAIKLERTTKTGVLVRGGLADNGEMLRVDVFTKTGKFYLVPIYLADRVGGVLPNKAIRAATLEQDWPEMDETYAFAFSLCNNDLILISDKDGGDGAFLRGYYKGSDRATGAINMEAHDRVWLKRGIGVQRLVTFKKLQVDVLGNVFEVKKELRHGLAESPD

SEQ ID NO: 9777 - protein, 1029 aa, unidentified
  REGION 1..1029: note = Description of Unknown: Cas Enzyme sequence
MNYRLGIDMGSTSIGWCMLEMDKQNAPCGIINMGVRIFPDGRDDKSKKPLSVIRREKRGQRRLYDRRRWRTQQLVNLLIQSSLLPNQESERATEFLKNPLLLRKMALDEKVSLPEFGRLLMHLSKHRGFKSNRKAEKGENTKSKYKDAIGNCKAIYTDNNVRTLGEYLWDKNKDLNEEEINWEIAKNSGIKPKKGEGNIHLKEPVRFRYEGAKTNKDIIFPTRDLLQDEFFILWEIQSRYHPELTNELKERIRHLIFEQMELKSQKHAIGYCYIYKDERRCPKADPLFQEFRLWQTINNLRVKDSDENIERALSFEEKLSVFAYLNSKASATYESLRKMMFSRNADRYRFTDETRKKTILGNETEAIFNAKVNSELLQHWKAMSSEIKSKVIDILVDNLDEEKQINQIHYLGLSHEISERLVSVNIPIRLEGYCRLSLLALNNLLPHMRQGKMYSEACVAIGKSHSTAYTGEIFDCGDLPYYGKLLKRQSIPLNRPSHEPNADTYGKINNPTVHVALNQLGKLVNALCVNYGPPKYIHLEMGKDVPMSDKERREIISNQNDNEKRNKKISDILSSPEINEPTTKLNILKYKLWEQISKNICERYCIYSGKNIGIEVLFKSEIEIDHILPKTKTYDDSMANKLLVFKDANKFKDNRTPFEAFHHNPPGYDWQSILSRASTLPDSKKWRFLNNAMEMFLTDKDPIARMMADTRYMAVAAREYLSYICGEDNVISCTGRLTHNLRYEWGLNSILNDDSNEKNRRDHRHHAIDAFVIACSDRSTVQSYANAIQESTDKFIRSMKKPYLAFSLSEVTNKINSIYVSYKPNQPNPQKMMQNNQTSGGLMKDTAYGLEGVHPNDSKYSLYTSRTGIQEITRKEVCNIVDIDIRMQLGNLSEIAKSEDEFDSLRDNWARGYNLKKVKILIKKTPITMVSVHDKKDNVYKYYESVENLFVDVFNPNPHDENSVWQLEISNNYLLHQNGYSPKWVHNKSFRTPVLIMRLFKNDVIAYTNDEGNREFRRLRLMSVSNGVL

SEQ ID NO: 9778 - protein, 1091 aa, unidentified
  REGION 1..1091: note = Description of Unknown: Cas Enzyme sequence
MKPYILNSSPEEQHPAVRKWQESDFYNKAVVLGIDIGLQGIGVYLRKGLQEIFAKTLLFEVPETGRLESRRQKRAWRHTRNNRATRRSRLKTLMANHDIPWVADEVLSKTDPFLLRHRAITGKLASSEALSICIRHLVDHRGFDYSAFAEDGAFPWGDGESVKEVIAWIDTNFINEVMAKEILTMVSPLEWKEADVEKFQTALDARMAWCSSNGIDQVLHNYSLEKKSNLRAAARGHNFPRTMVEQHLRSIISRHQDLLQNGEGFTQSLFLKPKTRAEKDAAIFHYNRKTRFEAELVWKRRINKCQFAPSLGFGSIRVSPNSDPTVGAWKALEFLATRRVEVSPKEGRAWLHIPAPETISKLVEIARSNRIAFKEKKPLTSWKDAKGILTADIIAQCGKGAKPTPDKDSPWNESYFTQLQDIIKPTVANLRGNSSISTEVATRLFEIATLSGECFEPDSVKGRLNEAEFYNQRRSAVSTHIALYPQVEFLLGRRVHKKGEFRQASTGRLQRLFKELSEELDEIEAPDYCVVEVIRDAPRNQSQKAEYLKLQNERRKDREARFAERGTQDTGNTSSRRRVALHHQQGGLSPYTGKPLPNPMDPSLEIEHLFPESRGGLSCDENLVLTFRGENGQKGNMTPREAAAANLPGWLSWSEMLKINALMRWSRKKREIFAFETTPETSIPDLGNITRTSQLARQLVREVASWMGVDGDATGERERVGTPSGWLAAQARKSWLGVDGYTKIRSSLVHHLVDAAILAHIPPAAGLNLARYGGIFFTTKDGKTRALPELGPKLEPWLVDSPVLCPVEKSRSNSRTRSLGDETFWAILPPDEKGRQKTRQRTPLKHDAFSDGVEIHAMLARMGVPSEKIPGMNALQKWLDKAAGGSDTPLKLNDGTPVRSIHKFDSKGEFTMPLGWSAKPTKTGSLHGARLLDGKFDRMEIWVGWNARKKAWAYYTRLIPSKRALRHLEQTLPGWWKKNRIEVCGELPPYARKVGSLQRGDQILIPMNRAGQIDYAAPYVRWWYEVTALIASGRVKLASITYRSVEGTPLSHLNDGILTIAPMSASVIAALAGKRDANAEATILGITPPSA

SEQ ID NO: 9779 - protein, 1461 aa, unidentified
  REGION 1..1461: note = Description of Unknown: Cas Enzyme sequence
MKKILGLDLGTNSIGWALINQDFIHKKGNIEGVGVRIIPMTQDVMGKFESGQSVSQTAERTGYRGVRKLNQRKLLRRERLHRVLNFLGFLPEHYQKDIDFINKKGQFIRESKIDYKKNSLGKYEFIFKDSYNEMVHDFRKKGYKGEIPYDWTLYYLRKKALTHPIAKEELAWILLNFNQKRGYYQLRDEISNVQDDKKQKEFVRLKVKNVRSKGEKTKDGKELFEVEFENGWIYPKETVHPENWIGKVKEYIVTTSTNKDGSIKRSFKQVDSEKDWIAIKEKTQQEIEKSSKEVGEYIYDHLLIDPKQKIRGGLIKTIERKFYKKELKKILETQEKYHDSLQNRIIYEKSINDLYPHNIGHRNNLKSKDFKHLLMEDIIFYQRSLKSQKSLIANCPYEKITYTKKILDPKTGKIEEVRETKNLKVISKSHPLYEEFRLWQFIHNLKIYKRKHQEFDKIYLDKEVTNDFFIEEKDWESLFDFLTEKKEFSQKTIIDFLIKNKKIDRKEKNNYKWNYPEDKIYPAMPTQAGFLIRLKKVKDLNPAEFLTPNRLYHLWHIIYSVKDFEEYAKALRSFAKKHKVDEDSFVDAFIKYPPFKSEYGAYSEKAIKKLLPLMRLGKYWNEEEIPEDVKQRIDDIMMRLESIDWEKVDKDKITGKLDEISDDDIPRAVLRSFLDFIGKNPYKGLQVHQATYAVYGRHSEAADIKKWSSPQDIDKYLQNFKQHSLRNPIVEQIVLETLKVVRDIWKYYGSGVKDFFDEIHLELGRELKNPANVRQKISRKNNENERTNQRIRALLKELINEGANPDSPSHHEILKIYEQDIVNHLSKLPDDIEKIRKNNSPTAAQIQRYKLWLDQKYVSPYTGKPIPLSKLFTTDYQIEHIIPQSRYFDDSLNNKVIAETDVNQDKDNSTAMEYILKKGGHTVGSGHHILTAKEYQAHVQRFFAHNPKKMKNLLSEEIPEDFISRQLNDTRYITKLIKSLLSNIVREENEQAETAKRVISLPGQITSRLKYDWGLADKWHQIILPRFERLNQITDRTDFTYENKNGVMVPKIPEDMPGKVNKKRIDHRHHALDALVIAATTRNHINYINALNNEKIKHDLQPQLLNKNKYGHYTKHFQLPWENFPVEAKDKVEKIIPSFKKNLRVINKATNKYWKWVKQADGSYKKLKVKQTKGDHWAIRKPLHKETFYGKFDLVKTPKNKVATFGRTPLSSINKDKHLTQITDKVIRETIIPNHLKNYILENGKYDFENAFSEEGIIQLNKNIKELNNGKPHQPIYKVKMYEIGSRFPLSDNPESPKHKKYVEAAKGTNLFYAVYWDENKQKRNFETIPLKDVIAHQKMEAHLPKEERTIIPVNPDLGKFLFYISPNDLVYVPDENEDVTTIDWDNLTKEQIANIYKMVSSTGKQSFYIPVYVAQAIYNKKEFESLNKMERDLKGKMIKEHMIKINTDRLGNILKTKNSF

SEQ ID NO: 9780 - protein, 1542 aa, unidentified
  REGION 1..1542: note = Description of Unknown: Cas Enzyme sequence
MKKILGLDLGTNSIGWALISHDFDLKNGKIDGLGSRIIPMTQDILGKFDSGISISQTAERTEYRGIRRLTQRYLLRRERLHRVLDILGFLPYHYREGIDFEKHYGQFKTNVEVKINYKKNKQGKYEFIFKESFDKMIEEFKIKWPTIKIPYDWTLYYLRKKALTQKIKKEELAWVILSFNQKRGYYQLRGEEENSTNNKNEEYYSLIVKNVEATEDKSDKGVWYNVILENDWIYRRQSKEPLESWIGKSKEFIVTTYIEKDGSLKKDAEGKTKRSFRRVDSEKDWIAIKKKTEQDIEKKNTTVGEYIYENLLANPNQKIKGELIRTIDRKYYKEEFEKIIKKQIEFHSELQDTELYKKCIFNLYPKNEAHRNNISNKNIGYLLSEDIIYYQRPLKSKKSSISGCQYEYRNYKKEVIRNENGVNVRTKELVREPIKAVSKSHPLYQEFRLWQFIKNLKIYQKEKQIENSILYDINITANLLKEENDWIELFDFLSERKEIDQKAIINYFVSKRLINSKKKSNYRWNYVEDKKYPANETKAQFLSRLSKVAGVDAKAFLTTEKVYKLWHIVYSVKDRIQYEQALKSFARKNNLDTNSFIENFKRFPPFKSDYGAYSEKALKKILPLMRMGKYWNEEDIPIGVRNRIILIMERVNALNISESSSKKDINEALQEVSDDDIPLQIVKSFIPLKNKVPFKGLNTYQACYAVYERHSEIGDVKRWKTPGDIDRYLFSFKQHSLRNPIVEQLVTETLRTVRDIWKYYGESKEGFFDEIHLELGREMKNPADKRKKIARRNIENENTNQRIKALLQELMNDGIKDIRPHSPSQQEILKIYEEGVYQSIEIIDSDIEKIRKSTTPTKAEINRYKLWLEQKYISPYTGKIIPLSKLFTTEYQIEHIIPQSRYFDNSFSNKIICESEVNQIKGNQTAYKFIKDNPARIIDLGQGKTVRLFTLEQYEHHVNIFFKKNRTKLKKLLSEDIPEGFIERQLNDSRYISKLVKGLLSNVVREPGEKEATTKNLVSVTGAITSKLKQDWGLNDKWNEIISPRFKRLNELTKSTDFGYWDSSINAFRIQVPDEISRGFSLKRIDHRHHALDALVIALTSKRHINYLNSLNSEKENFGLRKSLLQINKHNDFTKHFLHPWSNFTIEAKNNLEKIIVSFKQNIRIINKSNNKTWQWVQKHGKYTKQLVKQTKGVNWAIRKPLHKETVYGKVSIKTKRKSMVSLNSAIDNVDLIIEKKIKAIIKKALSKYNGNIKAAKKYFKSNPIELNGFKINKIGIYEFVEGTASRVPVSEITTRKRLLSITDSGIRKILENHIAKYTEVHNETTKERFDLAFSPEGIDDLNKNIIELNNGKFHKPIYKVRIYEAGSRFRIGEIGNKKDKYVEAAKGTNLFFAIYHNEEKNKREYETVPLNKVIEHQKQVAHLSKTERTAIPLNHQKGRFLFSLSPNDLVYVPTDEEIQNPQSVDFNNLSIEQVDRTYKMVSSSGNQCFFIRHDIAKSIKNKYEFSSLNKMEKSVNGEMIKERCWKLKVDRLGNIINVNKG

SEQ ID NO: 9781 - protein, 1404 aa, unidentified
  REGION 1..1404: note = Description of Unknown: Cas Enzyme sequence
MSKVLGLDLGTNSIGWAVVESDVKNGEIAISKLNEKGVIIFQEGVKNEKGNEKSKASERTGYRSARRLIFRRKLRKYKTLLTLSKYEMCPLNINDIKKWKNSNFKEYPKNKEFLNWLKTDDSINKNPYYFRDQASRGKIEKLDLGRAFYHIAQRRGFLSNRLDASDNTIIEDNAPQIENIIEEANNKINMLQELNIYFNGFDKNNDTEKPLFRLQKDFFGLIKNSKEDISILKDRLIERLYRKENLGLVKQNIFAITEKIKEGGFETLGQYFYSLYSKEKIRKNYTGREEHYLKEFELICKTQGLEGIHYGIKDPDKKYYGIVKELYKAIFFQGPLKSQKELVGKCSFEKNKPRCSVSHPLFEEFRMWQLLNNIKIKTKNGDRLRFLHRDEKERIITKFYRKSKPYFDFIEIKKELGINNVYNYKDNVTISACPTSAQLKSIFGDNWKEINIEYTTKDVNGNNIKRHVDYHDIWHILFTYTSIQKLEDYAVQKLKLDNRKAKAFSKIHLKKEYANLSLKAIKKILPYLKKGYIYSHAVFMSNMDKVVDSNIWNNDKFRNELDEKINMTITYSGIESQIIQIINGILKTYKDKNEPFKKERIGDYKNLIRESLEQYLGKERWKGLEGKEYILNNAFSDFIKHYKMRSKKGEFIKAKRLDEKIKDLLLGYSEGGVVYCSDERKLDKLYHPSDIETFKPAFIKGKEGYVLGLGSPQTPSVRNPMAMRSLFQLRNLINSLLIEGKVDRFTKINIELARELNDANKRAAIRNWQKENEVYNKKISKRIKEYYAILSKEIEPTENDILKYKLWEEQNEICLYTGKKISISDFIGANPKFDIEHTIPRSVSEDNSQMNKTLCDINYNRNVKKNKMPNELPDKEVILQRIEHWKKKYENLESEISRLIRATKTATTKEQKDRIIQKRHRLSFERDYFKGKYERFIIKEINAGFKNSQKVDIGIISKYARAYLSSVFERVYSVKGSMTAEFRKAWGLQESFIDEFGQKQYKPKERSKHIHHCIDAVTIACMDKKRYDALAYSWGLEEKGDLENARKILKNTKPWPSFTQDMKKLEEEVFVVHRTKDNVGKQTKKKWKKRGIIQRNDKGNTIFLQGDTVRGPLHRETFYGAIAQDANGTVKRDKNGKIIPNFVVRRELTKLKKSDIEKIVDPGVRIIVKKAVENGFIKFGNSGAKIDDNVTIWQNEAKKIPLKKVRVYTPYVKSPLKNFKKQRDESKQEYKREYHVDNDENYCMAIYENAEKNKRSAKIVTMLEAGQQFKLSVKKINKNNNLVNKDYNGQKLKYILTKGMMVLLYDKTPLELKTFDKKRLIGRLFEITQLDKETSGIKLLHHQEAREKKEITKAMGLKIGMKGGKNIDQYKSYPWIKVSPNNFDVLVEGYDFNISITGEIEFLG

SEQ ID NO: 9782 - protein, 1619 aa, unidentified
  REGION 1..1619: note = Description of Unknown: Cas Enzyme sequence
MKILGLDIGTNSISWSVLDKDASDNYNFYEHEGKIMAGVMIFEDVLNDQGQTGAAERREHRHSRVQYFRRKLRKYNVLKVLLKHGMVPLTEKDLHAWRKSGFKQYPSGALFIDWLRTDEESNKNPYYFRAKFVEKKYDWENNQQLKYELGRAFYHLAQRRGFKSNRLDQSDDIFIEKFKNEFLLDLEDIESKEELADLIKEKFDDFGFENVKNSDLDDTEKRLKKIYDQIIKVCEYKPSLNLCKSPDNIENLIQEIKSILSKKENLGKIKQAIYELEEKLDKSGLTLGQYFWKVYQEQQKNPNAEKIRGQYTDREKHYVEEFNKICEVQEIPENLRKALYDAIFFQRPLKSQRGKVGYCLLEKKKLRSPVSHPLYEKFRILQFINNIKIKENKDEELRFLNDTERKKALEIIDNHKTLDVKKLMQKLYPEKKIIAYVKDSNSAAHLFVNYKPDHKIRLNKLRYYLKKYLGDRFGQVYRSIRHKKTKSNEIFYEDVYYEEIAWHALFTFDKEEKLKSFAMEKLGMEESVAEKFSRLNTDQGYGKLSLKAIKKIIPWLEKGFTFDKAVFAAKIPDILGKKKWEENKIEIEEGLRNLFHSVKQENFIIYIVNSIIDKYRYDGTKYSTQAEEIFYKDVKRALINNIGKVTWEKKRPEEKEFLIEKVFDILITHLKKYQKSKVLPFVERINLENRIKAFLSGENEYGVVYCENKDKLNQLYNPNKLEQFTLVYDKKTGKEILGLPFIKSVNNPTFNRVMFNLRKLINQLIIEGVIDNKTRVHIEMAREINSYNKKKAIERWQHYQEELKQEAIKRLLEFKRGDQLNDDDVKRTMLAMEQRFEVSENEIKDYIKRKKNNKTTQKETDKIIDYIKEKGSISDDDIKKILLWQEQNFICVYTGKQIGVTDIIGPNPKFDFEHTIPRSRSWDNSLENLTVADLEFNRKIKGNKIPSELPEDVYKKVIQRAKWIYEKRYKELDKQISEIKIPKLASVKKRNEAIQKKYFLEMKRDYFYKKYKFFTLKEVPEGFKRSQLNDTRLITKVALSFLGSFFRDDKTGNSLVFPVNAKGVAFFRNIWMGKDFEKKRDTHFHHLIDATITAAINKKLYQKLEEIWKEAENKKMEENEIRKKIANEKPWKTFTEDLLKLEKRILVYHQYKDSTGKQTKKKLRKRNRIIWKQVKTLPASFEEKIAKGIYKKGRDFRIEEKDGIKKFYIPLYQQGDTARGALHEATPVGAIILPGNKNKIITYVKRLPISEFLKNQSAKNPKEIIDPVIREIITKGKGKYKKITQEINKIKGNKKITQLDDESKTKVEQLIKERDEIFTLNGKKIKKIRTKIHHQNKVFDIKTYPDVFLSDKPYKQNIYFLNDKNYGVILIENEKGKRKFYPIKLFDYYKLRKSNSKEVFGEMILDNKLYKPVKFKGKPVIFKEGMKVLLLQNTDEEPEWENDQWLFERLYKIERKDDQSIKLLHHFIPSGSKEKINQISGNKQKIKDLQTEMEKRGIDLLGALNEEWKNYPEDKKAKADLSDIGGFDYNLLLKIIETNEKAKLSILEEIINQVIKKVDGLKTINLNPKSNIKTGNYVLNNPSEVLKYPFIYLTANDFKALIEGIHFEQDILGRIWKLD

SEQ ID NO: 9783 - protein, 1179 aa, unidentified
  REGION 1..1179: note = Description of Unknown: Cas Enzyme sequence
MEKIMNKKVLGLDIGSNSIGFSLLRLSEQNGQTTFEDLASNSIVFSEPNTAEDRRKARGARRLHQRKSARNKNARQVFVDYGIADKLFITDTTRYIENFKLKSNDVYALRESAVFGKKLTKDEFVLATYSILTDRGYTNMFALVEEETESNKEKKKEDEKLNGAIEKNKDVYRANNYALPSMVLTSRRKELGKEYQNVAIRNKGGYHNSLDRDMHKEEFERVVRSQSTNKNIFKNEEDCEQFIEKIVEEKYNAFYQRPLKSFEGMVEYCSFYDEFNPKGSEKRMPLSNIRNIELTLRQSIDNYQAVDKNGEVKVFTKSEKDQIVNFWLTSPNADKINNKNIYKNAGFKSIKIHTKDDSELLILNIQAHRGMLSLLKKYKIDFQDTQNEFYNEVLLELYYYKNYSSRVEQINKIIKKYQLDIDSSFVDEVSKLTQMDGFGRFSLKFANEVLALMNNEGKIHSDALDALGYNSKYLNMPSYGYLPPLEPSKADIQWLQKNISYFDTTHLFYQPMMSPKVKRVIGILRKLINELMKKYGKIDEIRIETAKELNSKKEAEKITKNQTQNNRKNKEAEELLKNNSLNVSDKNIQKVKLFKEQECDCLYCGKNMTLDEALDENIAEIEHFIPRSVIWINSQKNRILVHKKCNQNKGSQNPIVYLKSIGEWESFKGRVKLHPKTPKYKWLTDEDVINSAMAKENWEDSYLNDTRSATRSIAKYLNHYLYPNKNAHNKDGDNHLTSVSGKAISELKYMWGIHTVMPKDEGGKKDRNTNYHHTLDAFTIALCSPSATQALNNHFKKNENRFKTKALKEKLARNIPLSRDGVNVVEHLKTLVEKYETNALYVCPYNKRKTNMKGFKDGNLKLYVAKDPKDESKEMLAEMEKVAIDASLLSKKVGGFDKPRSDDEVKKEIASIVKRLNPQKQQNIIDAIKVYADALLELRAKVNSVDKEIKKMRNKIKTGKQHKEFNDVIKAEMQPFQEESKTLSKQLQSLACSFKVKNGKRQIVRSVKLHKVKIIEKKTGSIVFSKRDKESIERLSLKNFKRANQSKEAFVVKSNESTLSIKLYNTLKGQKVGLNYFSGIANKNIDTEINIKNKKIIDETRDYLTLYKNDIIKVENIKTAKLEYFIVNGGGDLANNKIESKLINVKSEKRTYVTFKDKIVSKVKIDFFGNITEDKPNEK

SEQ ID NO: 9784 - protein, 976 aa, unidentified
  REGION 1..976: note = Description of Unknown: Cas Enzyme sequence
MIRFAFDIGFSSIGYAVNKKYKKVENDLDIWAGVWLFDNENYKSELNSIKREKRRKKRKKERLKKIRKLLNIKLDESFKKHTQNVWKYIKKAKHKKLTQKEFNAIIYHFAKYRGYIDMRKIKKDNEDNKEEGGIKEALKRLDSFNGKNIFEKLLAYRDKLIDIAANNLNSKFNIDRKEAVEFLEYYMPYRNKNIGKLINKINEHFKLDIKSSADIFEEELRYYFILPNNKIIESIIDIVTFQKKHFNNELIQENSLKELVNLLSFKGPVNSLEDKIGWCESGFKYKRSGKYTFDAEKFRVIDLWKKLICIDKEGKEFFIKECMLFDEFYKRVTELNKEEITRDDLKKLLEDLNVKDFKQTNNKFLYLKAHKLYNSLKNRDLILSDDELRDKIEYTLLFYYDFEKRKEILRKYIIDENDLDMIAEHNIGKPSFLSNIIHREIFNRLTDEDLTAILNEYKEKNLTFLNRNYLSYKVWKQQTAYNNPYLENIIKHFIKLFNHLVQNFGTPDEIVIESARSFAISDKEIKNYKDYIKKQNQNELTNNMIKDFINTRFKEKPKDYGKLIKRLKLFLEQNKNLKELKDNSVSYCPLTGEIITIEDAIDGKSTNIDHIIPQSVVIDNSLNNIILISAKINQAEKKDMTPVEYIAKSKNISINKAKKILEENLKKTRIESKTRKYNNMLTELESKEFKYELKGFDLRHLQSTHFGVKEIKEIIIRQYHFNNPDLSYNQRAAKIVFTNGKLTSLLRKVFLPKYKKNRKYFINHLIDALVLLNIDRSMQQIIHTLANKFVDNKIYKQKEFINYIREEYFEKRNIKTKFDLIKAVEFFEEKFNNLELGAYREEVKKLKKRYFKETILSKKDVIKETSAIYTKSGYRTKDRGFKKILICKNDKGKLNAIFINYFDKKDKKCNNENILELYRYSLIKIKDQIGYVIGGSGNTIEIIPVNVEKGKNRIKISVSNFNNKLTINPLGVINNG

SEQ ID NO: 9785 - protein, 1128 aa, unidentified
  REGION 1..1128: note = Description of Unknown: Cas Enzyme sequence
QKEFHPELTDKTLLEKSLIELYPINEAHRNTLKDKDLSFLITEDIIFYQRPLKSQKSLIAECPYERIKIKVKRIDPQTGKEIVREEEKGIKVISKSHPFYQEFRLWQFINNLRIYRKEKRVNDEWKFNVDVTDEMFPGDEDLAELFDFLKDKKEAGQKDVIKFLEKNRKIKSTDKDNYRWNYVEEKKYPMMPTRAGFLARLKKTEGINPKEFLTVERETELWHLIYSVQDKEAYKKALRTFARKNGIDEKSFVEAFEKYPPFKSEYGAYSYKALKKIVPLMRSGKYWDAASVPEQVKERIDHIIERLDSIDYDPERLDKISDDDIPHAVLKSFISMKGRNPYAGLQTHQAVYAVYGRHSEAEEVQYWRTPDDIDAFLNKFKQHSLRNPIVEQVVLETLRTVRDIWRYYGDGKPGFFDEIHVELARSLKNPAEKRKEISKRNLENEKTNRRIRALLKELIGVGAKPESPNHFEILKIYEQDVLGSVNEMDDDIKKVIQAKEPTQKQIERYKLWLDQKYISPYTGKIIPLSKLFTHEYQIEHILPQSRYFDNSLSNKVICESAVNLEKGNMTAYEFIKEKGGSIVTGDHKLFTLDEYVNHVNKYFSHNRKKRQNLLSEDIPDSFIERQLNDTRYISKVVKGLLSNIVRDEGENAVTTKRLIPVVGSITATLRHDWGLNDKWNEIILPRFKRLNQMLNRQDFTFVNEDGVEVPKIPDELAGKINKKRIDHRHHALDALVIALTTREHIQYLNSLNNKKIKYELREKLLTKDKDGKYTRTFKLPWPAFPVEAKEALEKIIPSFKQNLRVINKATNKYWKWIKQPDGSYKKQKVKQTKGDHWSIRKPLHKETIYGKLDFIPASGKDIPTASREPLSSIADKNIKNIQKRINKIADKRIREVIIPNHLKHFTDENGKIDYEKAFSPEGIEQLNKNIVELNEGKPHKPIYRVKFYELGQRFPLSDNPSSPKHKKYVEAAKGTNLFYNIYWDEKKQKRNFETVPLKEVIEHQKQVARLPKDQRTPAPVNPALGKYLFTLSPGDLVYVPEEGEDVSQIDFRHLTTEQRQRIYKMVSSSGKQSFYVPAFVSQPIYAKKEFGSLNKMERSIDGHMIKERAIKIITDRLGNIIDVKTGEL

SEQ ID NO: 9786 - protein, 1040 aa, unidentified
  REGION 1..1040: note = Description of Unknown: Cas Enzyme sequence
MQTIDRKNCFVLGLDLGTNSLGWALVAPEEQRIVNAGVRIFSPGTTGDIDSGKDESNATQRRSARQNRRQLRRRRGRKKKLFLLLQQNGLFPPGESQDAQMRHFIIMALDNELKQKLKNIGRKKVDHLLPYLLRKKGLDEELSLFEFGRALYHLGQRRGFLSNRKQQKDSDTGKVLAEIDTLQDRIQESGHRTLGEYLASLDPEKTRIRERYTHRRMYVEEFDCIWKTQAKYYPEILTEELREQIHYALFFQRKLRNQKHLVGNCELEVGKKRIAKSHLLFQRFRYWQKINDLTGINEETGEVYNLTPDQKQQLAHYFENKGDLTFNKTARMLKLPAVTKFNLAAIEKKLQGNKTAAGMRKIFGKRWDEFSYEQQDQAVADIQSYEKNDALKKRAKKYWNLDSEHADAFAAMTLENGYGNFSQKAIGKLLPLLEQGIPLQQAIAKLYPDRLKMPVQEFLPPVKDVYSELNNPVVIRSLSQLRCVVNQLIKKYGKPATIRIELARSLKAGKKTRQERTKRNKQNRKKRKEARAAIILEKELGFGENPPNWAIEKYLLAQECNWICPYTGKEIGGLVSLLGPESPFQVEHIIPRSRSMDNTYLNKTLCHHEFNIHIKKNKTPWELFHGDPDTYDQVLQRVRRFTGDARSAKLRRFTMKPEEVEEQYDQFCERQLRDTAYASRLSADYVACLYGGRSDGQGRLRVQVSAGQLTSILRAAWELNRILGAPYKSRDNHRHHAIDAIVTACAHPGFVQKIGKAFQSDSRGRLDLAAIEKPWPGFYENARQQVLALFISHAVRAPVNGQIHKETNYGRLRSILVNGRKKEVTFYRKPVIGLNKGEVSRIVDNRIRRVVEEKINEVGSAEKISKDDLPRLSPQGPVIKKVRIWNTIPLQSIGKDFRKRQVELGENHHIEIFEVLDNKGKVKKWSGKVVSLHEAMQRKRQNLPIVNRNHGANTRFLFSFVKGDCLKCTFGQRERIFIIRAFSTESSGVTRIRFTDASDARKMKDIPSENNKRVTINKLKGMKCQKIIINPLGELYRSNA

SEQ ID NO: 9787 - protein, 1396 aa, unidentified
  REGION 1..1396: note = Description of Unknown: Cas Enzyme sequence
MSKNILGLDIGTNSIGWSVIQSDFVNKTGNIKGLGVRIIPMSQDVLGKFDSGQSISQTAERTNYRGVRRLYQRDNLRRERLHRVLNILDFLPEHYKNAIDFEVRKGQFKEEVKLNYRKNSKGKYEFIFDESFDEMLKDFDNQKIPYDWTLYYLRKKALYKPLTKEELAWVILNFNQKRGYYQLRGEEEEVKEDKTKTFETLKVEKVIDTGEKIKGKDDKLYDIYFSNGWKYDKQTTKPENWLEKTKEFIVTTSTIKDGSIKRTYKAVDSEKDWVAIKKKTEQELDEYIGKADNHTVGTYIYDTLLQKPNQKIRGKLIKTIERKYYKEELDKILAKQIELQPELFTNELYEKCIFELYPHNDAHRNNIKQKDFKYLFINDIIFYQRPLKSKKSTIGGCQYESRSYWKTVTDENTGEETKVFVKDEPIKAISKSHPLYQEFRLWQFLKNLKIYKKETQIEGKTKINYDVTDELLKTDEDWVKLFDFLNDKKEIEQKQIIDFFVKQNLIDKKDKDNYRWNYVEDKKYPANETRATFLSRLKKVEGFDIQQFNDEFARNLWHIIYSVKDKAQYEQALKTFANKNNLNENSFVENFKKYPPFKSDYGAYSEKALKKILPLMRIGKYWDEQAVSQEVKDRITNIMERVNAFNLPVKPKKEDVERAFERVSDDDIPRPLIKSFIPFRTKNPYTGLNTYQACYAVYNRHSELNEVTRWTKPEDIDKYLKNFKQHSLRNPIVEQVVTETLRTVRDIWKEYGNFDEIHLELGREMKNPANKRKQMTQRVTENQNTNERIRLILKELMNDGVEGVKDYSPSHQEILKIYEEGIWQNPDAKYDELSEDDIMKIRKNQSPSKQKSTPTKTDIQKYKLWLEQGYISPYTGKTISLTKLFSTDYQIEHIIPQSRYFDNSMNNKVICESEVNADKSNKTAYEYIKEKGGSIVDGHQLLTLEKYEAHCKRYFKKNRTKLKNLLSEDIPDSFIERQMNDTRYISKFVKGLLSNIVREEGEQEATSKNLVPITGAITSQLKQDWGLNDIWNEIILPRFERMNKLTGSNEFTTLNTQGKTIPNVPEELKKGFSKKRIDHRHHALDALVIACTTKDHINYITSINSERKNYSLVSKLRKIVEIQKKDKTTGKITNIKVPSDYHKPWKGFTVDAKNTLEKTIISFKQNIRVINRTNNKYWKYIKQKDGSFKKQLVEQKGKNWAIRKPLHKETVSGQVFIKDKKTVAFNIKLLEKLKNEKLDEKYILTNNKLHRKIKELEKKHYNPKQIVAYFKREKYKFEGENIKKVEVYFFKKATATRTELTDKFTKKHLESITDSGIKKILENHLKNYTNEKGERDFKKAFSPEGIEELNKNIQELNDGKSHKPIHKVRIYEEGSKFPVGEKKPVNRKKYVEAAKG

SEQ ID NO: 9788 - protein, 1038 aa, unidentified
  REGION 1..1038: note = Description of Unknown: Cas Enzyme sequence
MQTVERKTSYVLGLDMGTNSLGWALVAPEEQRVVAAGVRIFSPGTTGDIESGKDESNAGQRREARQVRRQLWRRRRRRKKLFYLLQKNNLLPEGGNQSEQERHLIIESLDNELKAKLKNNSKKKIDHLLPYLLRKQGLDEELSLLEFGRALYHLGQRRGFLSNRKQQKDGDTGKMLAGIDALQIQIQESGCRTLGEYFATLDPEKTRIRKRYTHRRMYEEEFALLWKNQAKYHPEILTEELREQIHYILFFQRKLRNQKHLVGGCELENGKKRIAKSHLLFQRFRYWQKINDLAGINEETGEVYNLTMDQKQQLAHYFENKGDLTFNKTARMLKLPAVTKFNLAVIEKKLQGNKTAACMRKIFGKRWDEFSYEQQNQAVADIQSYEKNDALKKRAKKYWNLDSEHADAFAAMTLENGYGNFSQKAIGKLLPLLEQGIPLQQAIAAVYPDRLKVPVQEFLPPVKDVFPELNNPVVIRSLSQLRLVVNQLIRKYGKPDIIRIELARSLKTGKKSRQERTKRNQQNRKKRKEARAAIILEKELGFGENPPNWAIEKYLLAQECNWTCPYTGKELGGLISLLGPESPFQVEHIIPRSRSMDNTYLNKTLCHHEFNMHVKKNKTPWELFHGDPKLYEEVLQRVRRFTGDARSAKLHRFIMKPEEVEDQYDQFCERQLRDTAYASRLSAQYLSSLYGGRSDGQRRLRVQVSAGQLTSVLRAAWELNRILGAPYKSRDNHRHHAIDALVTACAHPGLVQEIGKVFKKDSRGRLDFASIENPWPGFYEDAEHSVLSLYISHAVRAPVNGQIHEETNYGRIRSLMINGRKKEVTCYRKPVVGLTKGEVSRIVDKRVRQAVEEKIEEVGSAKEIRKDDLPRLSPQGPVIKKVRIWKSISLRTIGKKSSKRHVKLGENHHIELFEVLDNKGKVKKWSGKVVSLYEAMQRKQQNLPIVNRNHGANTRFLFSFVKGDCFRAIQNDHDIIYQVRSFWTVNNTNARFRIVLFDDARKNISKKERHEPMLNGLRKMRCQKIIISPIGMVYQSNA

SEQ ID NO: 9789 - protein, 1360 aa, unidentified
  REGION 1..1360: note = Description of Unknown: Cas Enzyme sequence
NSIGWAIMSYPDADKKDETIRLDDAGVVLFDEGVIIEKGNEKSKAAERTKYRSARRLHFRRKLRKYETLKVLAKNGMVPLSLEEVEDWRQSSFSKYPQNKKFFDWLRTDDKINKNPYYLRARAVNEKLGPLELGRVFYHLAQRRGFLSNRLEQKEDDKETGIVKNEIAEITRKIRESGAKSLGEYFWMLYQRDRNNPDNKIRKHYLGRKEHYLQEFELICQKQELPGELCDALRKAIFYQRPLKSQKSLVGKCVFEPHKPRGPVSHPLFEQFRMWSFINTIKIKTPQDEELRFLTPEEKEKIVPLFESAPSQKTFLFERIAKKLIPGEYKKAKYAYYKAKEAQTAHFVFNYDKKHSVHTSPVIALLKKYIGDDWEQKIFKYTVKKKNGETVEKSADYNDIWHVLFTFEDADKIKEFVLEKLKLDEETADAFAKFNLPQGYASLSLKAIRRILPFLKAGYLYDKAVILAKIPEIVGLDIWEAEENQKKILEKIDDIFNRNTFENKLIRAVNRTLHERHQKRKFEPIVVESLLKGNLYDIFGKKVMLEHSAGRDIFEEAKTLLEERLKYSELEDQIIKQQTIEEKVKEFLKNEYQVPDKELKKLYHPSMMNIYPDAPVSEDGKRYLQSPIVSSIKNPVMMRSMHMLRKLINKLISDGRIDEDTVIHIELARDLNTANMRAAIKQYQRQREKENETYRKEILELFKENNINREPSKDDIRRYRLWKEQNEISIYTGKTIPAYKLFDGTQYDFEHTIPRSVSFDNSLANLTLTESWYNREVKKDKIPTELDDYDEIKKRLEPWEQKLRELEKSIQKVNSAKKQAVTKEVRDRLIQKAHVLKMERDYWAKKLRNFTIEEVTDSFKVSQLNDTRIITKYARAYLKSVFKIVHVVNGRMVAEFRKMWGLQKSDEKKSRAYHTHHAIDAVVIASMTRPLYNLLAEAWKYEEEDKKEEARNKIEKSKPWREFTEDVLRFVDKIPVYHDFRDLLPKHSKKKLRKRGIIRYRYAVSPSGWIKTLIEKGIYREGEDYFIVEKDGKKLYKLPVFAEGDTARGVLHRETFYGAIARKDKNGKIVRNSNGDVEVDYVVRKPIDGLKKEDIEKIVDPVVRKIVREGFETKKILEEKIKKLKEELRNTTEEKEIKLKSELAALEKEKETLFRLPTKKGGFVPIKKVRIKTRVTNPLPDFKQHRDLSAKPWKRNYYVENEQNYALAFYEGVDANGNLKREYEIIPNIEAAKYFRRSQSEYRKHHSLFPETKKGLPLKYILKKGMSVLFYKDSPAELKELPKEELVKRLYVISELKKDGRIYFLPNKLAGQMSELKKSSTSDLNLDGNRILLLTRKNWTFILQSNDFIINIDGTIEFLF

SEQ ID NO: 9790 - protein, 1012 aa, unidentified
  REGION 1..1012: note = Description of Unknown: Cas Enzyme sequence
LDLRKKLFGKGNETMKKILSLDLGITSLGYAVLHEIDDNRYKVLDNSVIMRDPPFDVKSGESTQSKRRTFKSMRKLLEKRKRRIKELARVFQKYGLCEFDECLQVQRENKITDKWKLRAEDALQRILSNQELFAILAHMAKHRGYKSIATEDLLYELEREVGIEEVEKKSTKDDERRAVYAALNRVEELKELYPHETIAQVIHRAVKEGRLQSYRNHDNYEKMIRRGDIEKEIETIIIKQCEMGGIKFDSSKCKAFIEDLQEVITDQVMPENDPELFGKCSCYPEEIAAPRYSYLYDLYRLYKTLSDLKINSIPIDEDQKRRIIRYVEDKVAKGKSIKQLTYKDIRQILGLSVDQKIYSKEDYILIKGKKEPRVLVKFFFLSDVSKFSDLVKKVMSRKDHLHIFAQISEALQFHKTPQKAFEVIKSLLERGGIEVDPKEIVMLVKSYKAGTLNLSHKFIIDALPHLLDGKSESEVKEILGIRTSENYSEFPKSLNHLHLGKDNLFEKYIKPPINNHAVKSLASWVLRRVADLSWRYGPFDEIVIESARDALPKSKKSEIEQAMRRKEKEIDKIIEKYKNEFPSIDRKMARKIKLLESQKFMDIYTGKSISISDLFEGKADIEHIVPRSLGGLNAEYNIVIAHKDSNVQKGNRLPLGWLGEDQDFINRVEMLYNEGLIDWKKRKNLLAKSLDDIFNEVKDTKSLRATSYLEALVTQNLKMFYPFPNEKDRASGAAVRNIPGRSTAKARQILGIKSKSRETNWHHAEDALILATLSRGWQNRLHRLLKENYGKSEEELQKLWQAYTPHLEGLPVAEYIKESFERFMSYGEESLWYKDMFGQKRSISFWVSKKPLSASSHKETIYSPKHEVPTLRKSVLGAFEELGIVKDRYKLNAKEFMDRYDKEIRSKLWLHYIGNENDPVIRAIDTRAKEIAQLFDKYAGEDIKTNKELDEQLKMELEKLLKEPIVVDGKLLRKTKFVYNQLNAMRIDRGLVETDKNFKGILITTGKKKLNF

SEQ ID NO: 9791 - protein, 1156 aa, unidentified
  REGION 1..1156: note = Description of Unknown: Cas Enzyme sequence
YRKLKKSWAAHRHKDNVVAFWLATDPEWTIPPYQSQTNRRPPACQSLILNPVYMERDYKNWKHWMDQLDTSQAPDLTGVTRRKSGEALANENQRKLRQLQFLLDRAQQADPYRLNLIWSQYHRRQKYAPETKEYSEADEALKGHIRDSTLRPDLKGDLDFARQGSFGHFLNQYYQCRRKARDGRYFLHPLPAGAKRKYNPGERRPRWDVKNKLLTLCPHRPRQKRHQMHADIAAIVGLTPAELEQKVKELNKQSIEDLLRCIKGFAANAENAAREQKEHRGELKLILQQGKDKKLNNLAKRIDHLAHALAGKLWPKHNETEQRDKAKRFNTLFSFAQIHNIVFTDRSGFSNTCPVCSSDNAGRMVEDSNKNALAARLPALSVRLIDGAVKRLLEYKSNEIARRHWALIEPDLHDGKKVCVPLILEQNRFNFEPSLKKLKGKNTRNAGKEPASETFKEKADRIRQASGGLCPYTGKPLSGSGELDHIIPRASAYGTLNDEANLIYVSQAANRRRSNQKYFIHNLNSQYKKERFPKCVGDDAIKQWIHETLCGQRSGGEARFVFGDYLSFIDLNNEQRVAFRHALFLDDDDPLKMRVIRALQNRNRTFVNGTQRFYAQLIADKLHGRSRKAGLAGNLSFDYFEYPADPRHPKGVQNLRDVLGVNKEEIQEDYSHHVDAHMAFLLACDDHRGDGSLGVEFGSIASVWPFIDGDISAYKGTEIDRDQVESVALGRKASATGNRPHRQYHRDNFYADRYMPLWLIPEETGITVKKGFSVSNSVDVPLSKKSAKEAALECVAKFANNDDIRRIAGESAHWEAFTRQLIGQSTKKPVYIAWSRHAIEKHCLKHFSAKSLAAGKAYSGAVTFVRGLAYQTQKKKINEPKDIEDALNSKETRKEIRKVCIDLPARREWQRLHDDWQQAEQSEQEDFQAFLEKWFLKQDAAGSKSRGANPRHKRRRQVFSLPIFKENAKYLQARCNIYGDPVRQLIADSDSRKGGNKFSRAAIDPDGNLVEVVNPAFASPRMFKLKQDKVYSENDYRDIDPNRWYELTREQAEQAKLEFPQQVRKIAYRFDNVSRPKIRITIDFDGMTPAQDDRSALVNALLGHVLTKPKNDNEEEKLDKEIREIDAQCFTTAPYIGRKLKKETKEALAVLFDADS

SEQ ID NO: 9792 - protein, 1129 aa, unidentified
  REGION 1..1129: note = Description of Unknown: Cas Enzyme sequence
MGKKILAVDLGITSFGYAVLEEKEENSYICLDNAVVMRDSPYNESGESTQHIRSLQRSQRRLNEKKKKRIRCVAKVFDRFGLLAYEKALLSNRENRIKKRWELRAVDAWQRKLESEELFAIFAHMAKHRGYKSIATEDLLYELEIELGLRAIDGESAAKGDERSQVYAALNRLEELKKEYGSETIAQVIHRAVAEGKFRSYRNHDDYEKMIRREDIEEEIEKIVLKQAELGAFSLPNEQIGALIDALKECITDQEMPTNDMSLFGSCTFYKDENAAPKYSYLYDIYRLYKKLADLRIDNYEVTLEDRKKIIEWVEEKIKAGKSIKQLTYKDIRKILGLSDDQKIFGQDDERLIKGKKEPRIFVPFFFLSSIAKFKKLMAAIQKHPDAHAIFKELAEIIQYAKTPQEAYKKIKELLQKSGIEASDAEIVELFKNKKPGTLSLSHRYILQALPYFLEGMEEKEVQRQLGLSDSEDYSRYPKSLKHLHLGHDNLFEDEKNIINNHAVKSLASWALGLIADLSWRYGPFDEIVLETARDALPKDTKRKIERAMKEREKALDEIIKKYQDQFPAIDRRLARKIQLWEQQKELDLYTGQTISLTDLKDGRADIEHIVPRSLGGLSAAYNIIVALKDSNVQKGNRLPGEWLAGDEGYRNRVEMLKDEGLIDWKKYKNLLATSLDEIFVEKMDSKGIRATSYLEALVAQVLKRYYPFPDPKASKHGHSVRMIPGRVTSKVRSLLDIKDKSRDTNFHHAEDALILATISRGWQNRLHRLLKENYGKSEEELQKLWQKHLPHIEGMTLADYIDEAYQRFMSKGEESLFYRDMFGGVRSVSYWVNKKPLSASSHKDTVYSPKHDVPTLRKSILEAFRALDVMKNRHKMSADEFMEKYDKEIRQKLWLHHIGNTKDAVYQAIEKRAKEIAKTFTDFALKDAKHDKSMDEAFQAELARLLSEPITANHLVVRKVKFIPQKANVIQINRGLVETDKNMMGIFVEKGAKDKLLIHRLDVNNYREFMQKQGMFCYRNEMLFFFGKKGVIHYGCLHSYVETIKKVALFNPRFPLNPEAQPSKFSNGRQIKQVGIGRIHGVIKAYLDLDGHVKSYEVFGSVSAEQLAWFKKESGYGSVEDGAHHEAL

SEQ ID NO: 9793 - protein, 1449 aa, unidentified
  REGION 1..1449: note = Description of Unknown: Cas Enzyme sequence
MKRVLGLDLGTNSIGWALVELDWDNQHGRIVGTGVRVIPMDRKTINSFESGDPVSQTAERTRYRQMRRQYQRKYLRRERLHRVLKILSFLPAHYEAQIDFEKHPGKFKKEVKLNYRPTEDGRHEFIFMPSFLEMMEDFKNKHPEWVRADGKIPKVPLDWTIYYLRKKALHEKITKEELAWIILHFNQKRGYYQLRGDELSKTDESKEEFYEKLTISEVIDTGEKDKKGGTWYEIKFENRPELVYRRSSKESLSPWVGSEKEFIITKSINKDGSVKYSFRQPKEDDWGLVKKRTEQEIEAYLRGEPTSRTVGSFIYDKLLENPDLKIRGQLIKTIERKYYKAELEAILNAQKKYHDELQDRSLYQKCIHHLYPHNENHRANLKDKDFSHLFVNDIIFYQRPLKSKKSTISNCSLEPVKFQLPNPDGEEAIIIPRKAAAKSNPYFQEYRIWQWISNLKIYKKTHRQDGKTIVDYDVTGQMFSTAEDCEELYAYLRDRAKVKQGDILNFLVKKKKLNRALKDQYRWNYPEDREFPMGTTRAGMLSRLKKVDGLDNPGAFLTREREYHLWHIIYSVRDAAQFEKALAKFADESGLNRDSFVQAFRNIPPYDSDYAAFSEKALKKLLTLMRRGKYWSFDAIDSNTQARIEKIITGEYDERIKDRVRKHAIHLNAPEHFQGLPVWLASYVIYDRHAESGDIQYWSSPNDIDAFLKKFKQHSLRNPIVEKVLLETLRVVRDIWRHYGQGEEGFFDEIHVELGREMKKPAQERKRIAKLQAAREKENQKIIERLIELKAAGARSSSPSHRERLKIYLDIAPKDMLTYKSWRDQKYKSPYTGQVIPLSDLFTEAYQIEHIIPQSRFFDDSLSNKVICESAVNELKGNLTAYEFIKKHGGEIVPLGNGKTVTILKWEEYENLVREEYANNRAKMKKLLAEEIPDSFIERQLNDTRYISRVAATLLSNIVREKDEQEVRSKNLISLAGSITARLRRDWGLEDKWNHLILPRFERMEKIMNPDATNDDQITERFTYKNAQGVIVPTVPYKYMSGFNKKRIDHRHHALDALVVAICTRRHIQYINSLENEKVKYELQPAIIKKNDDGRYSKFYRLPWPAFPQKAYEALQSIIVSFKQNTRVINRTKNYYQKYVLTDGIWKKKRVPQEGKNFAVRKPMHKETYWGLAQKLKNGKVITTNRISLSDIKQMKHINDIPDRNIQSILKAHLNKYRIADSDKEKFDFEAAFSPEGITELNKNIVELNGGKPHKPIYKVTKAEQGSKFPLSDKPTSSKHNKYVEGAKGTNLFFAIYEDEDGERHFETIPFIEALVHQKAQAHLPKEQRTPFPVKSTIKKKNKEIPVKLLFSLSPNDLVYVPEPGEEKLDSSILVERVRQKPHRVYKMVSSTNTRAYFIPANVATSIVDKVEFSQLNKLERPLNDTKNMTKDICRKIETDRLGNVQHVF

SEQ ID NO: 9794 - protein, 1361 aa, unidentified
  REGION 1..1361: note = Description of Unknown: Cas Enzyme sequence
LGTNSIGWAFVHEAEHENEQSAIIRSGVRVVSLTPDESKNFKEGKSITTNAERRQKRQMRRNLDRYQLRREKLIRLFQNLGWIKTREELVFDGKHDLHEEYRLRAKAVHEEVSLRDLARILLMINKKRGYKSNRKTKTEEEKGEALDDMALALYLKENNLTPGAYGYERLLQGERILPSFYKSDLEEEFRRIWDFQARFYPEVLTSDLLKELHGQGYKNSASRLKTAFGGIDTVKSKAKDKKLEFFRWRKEGLDRQLEPEVLIFVLAKINAAINSASEYLGAISDRSKILHVRKLTVGEYLYEQLKENPHSSLRNQIFYRQDYEDEFTRIWDTQARYHPELTPELKERIGKETIFFQRPLKSQKGLIAFCPFESREVVKEVGGKPKKVRVGARVAPRSSPLFQEFKIWQILHNLRITDMETGERIDLDADAKQSLFEELNTVEKYSADKILRLLFGKAHKRYSLNYKEVEGNKTQAALYQAFAKMMEEMGEKVSFSSRSSARKRESLTAFFEEHGINSAILHFDAELEGREFTQQPSYQLWHLLYSYESDSSKTGIDKLLEHLKEKFGFPQELGHILAGVSFQNDYAGLSTKAMRKIFPYIKEHPYDEACTHAGYRHSFHITKEENENRILQDRLEILPKNSLRNPVVEKILNQMIHVVNAVMEHPEMGRPDEIRIELARELKSSAEERARMTKGIAGATRKNQEIRELLKEAPFHIKNPTRNDIIRYKLWEELAKRGYKTLYSDRQIPKELLFSKEVDVEHIIPKARVYDDSFSNKTLEYRQVNIEKGDDTAMSYIMRRGEKEVEAYKARVADMYANGQGSIGKAKYLKLLKTNEDIEQMETGFLERDLRDTQYIARKAKEILTGITRRVVSTTGKITDVLRQDWGLMDILKELNLEKYRSLGLTKIIEGKDGRKREIIIDWTKRNDHRHHAMDALVVAFTTAGHVQYINNLHARSRKGSSIYGLEQKLTWKDGAKRRFKSPLPDFRKKAKEQLEAILISHKAKNKVVTPRINRPKYSKKPQRTWTPRGQLHKETIYGSIEQPVVSMKKIGKAFSEEQIAKVTKPLYRDLLLERLRAFDGDAKKAFTGKNALQKNPIYLPNGKPMPQEVKVLEYVQVFTKRKKIDQDLKVDKVIDPKVRQVLQARLDKYGGDPKKAFTNLDEEPVFLEGRHGKIPVKSVVIRAVDKAMALRPLRDHKGREYPEEGFTDYVQTGNNHHVAIYRDANGKLQEQVVSFFDAVHRRLQKMPVVDRDFKKEEGWTFLFTLKENECFVFPAEDFEPSEIDLMDRENAALISPYLFRVQKISARDYWFRHHLESNVDNKEKAAQDVLWKRIQSTKGLEGIVKVRLNHLGEIVQTGEY

SEQ ID NO: 9795 - protein, 1129 aa, unidentified
  REGION 1..1129: note = Description of Unknown: Cas Enzyme sequence
MKKILAVDLGITSFGYSILQETSRNSYQCLDNAVVMRSSPYDEKSGESSQKQRSSQKSLRNLNQKRKKRIKCVAKIFDHYGLIPYQKSLKINRDNPIKNKWDLRAITAWQRLLSPEELFAIFTHMAKHRGYKSIATDDLLYELEMELGLRNLETEDSKKSDERSQVYAALNRLEELKKSYGSETIAQVIHRAVAEGKFRSYRNHDDYEKMVRREDIEEEIEKIILKQAELGALPLDNKQIGGLIDDLKECITDQEMSTIDESLFGYCTFYKDEIAAPKYSYLYDLYRLYKKLADLKIDHYEVTPEDRNRIIQWIEEKIKAGKNIKSITHKEIRKILGLSPHQKIFGQEDERIIKGKKEPRVFVPFFFLANISKFKKIIASIQKHPDARQIFKELAEILQRSKTPRESYDKIEKLLQSKGIYASEAEIVELFRNKQPGTLELSHRYILQTLPLFLEGMDEKEIQRQLGFPDSEDYSGYPKSLRHLHLRDGNLFEQSVAPINNHAIKSLASWALGLIADLSWRFGPFDEIVVESARDTLPEKVRKEIDKAMREREKALEEIIKKYKDQFPTIDKRLARKIQLWERQKELDLYTGRTIKLSDLLDGSADIEHIVPRSLGGLSTEYNTIVSLKDANAKKGNRLPGDWLSNDDTYRRRIDMLKDKGLIDWKKHKNLVAASLDEIYKENMHSKGVRATSYLEALVAQVLKRYYPFPDPEARRHGHTVRMIPGRVTSKTRSFLGIKSKSRDTNFHHAEDALILAIIDRGWQNRLHRMLRENYGKSEDELKKLWERYSPHIEGLSIADYLKEAFERYMSKGEESLFYRDMFGGIRSVSYWIDKKPLSASSHKDTVYSARHSIPTLRKSIFDAFAALEVVKNRHKLTAESFMKLYGKEIRQKLWLNRIGNLNDESYRAVESRAAKIAETINRYQLMDAQNDKSMDDEYQRELKALLAAPIEVNGKQLRKMRFMINKNTIPINRGLVETDKNMLGIHLSKGPKGKLTIQRVDVNNAHKLKRQREGLFCYLNEMLFFFNEKKLIHSGCLRSFSINNQGSKYVKLFNPKFPSNPKAQPKKFSTGSSTRDVSVGSTTGVIKVHLDMDGHVKSYELFGTVTSEQLRWFIEESGYGGVENDTNH

SEQ ID NO: 9796 - protein, 1513 aa, unidentified
  REGION 1..1513: note = Description of Unknown: Cas Enzyme sequence
MKRILGIDLGTNSLGWAVLEKEDGKFRLSQNENKVHSGVIVFPEVTTGAQQTMSKAAERRKFRGARRMKFRRKIRKYETLKVLVEYKMCPLSKEALKRWKGPKNYFKEYPNEKDFLYWLSTGKGKTGFEQKEKNPYFLRDYVSRHKIDMNNTKERYMLGRALYHIAQRRGFKSNRLDTTNINLVQELKDELVDILATEKFVNTDQILDLISDIIKDRTGYVLTDRKGDMEDDTGKRFWSIFNEIKKALKPKKGNHPGVEEGKKKAIEILSRKEKLGKVDGSINELNQKIKEGGFKTLGQYFWHLYQQDRHQNENKIRGRYTSREEHYLQEFDVIMQLQFPDEVDKKYGLATPKKRYTGIARKLYDAIFYQRPLKPQADKVGKGVFEPDKKRIPVSHYLFEEFRMWQFINSIKIRIPGEDERFLTREEKEKIIPLFYRQKEKFPFDDIARKLIAGQYSDYKHFRDVYTDKFVVFNYRKEHYVSGNPVSGKLKRFLGDKWNKIYKNPEKGQPVTYNEIAWHALYRFDDPERLKEFARNKLGMDEITAAKFVKIRLPQGYGSLSVKAIRNILRFLKAGLIYSHAVFVAKLKDILGEEKWEKYKDEIIEGIGKIIEKHRDDIKVETVVNSFIEKNRNKKPQERTKFSEQAKPIIRKEIERLFMNEYGTEKWESKHNKEELLEKALDILKKQLRKNPLKGGEFYSINTLEEKIKDFLKGENEDGVVYCEHPENLEALYHPSKISRFQAVKGKNKNGDKIDLLPEVQTFAVNNPVLKRAMSQLRKLINHLLKEGIIDKHTEIHLELARQVLSMSYKKAIEEYQKRQADKKEEYRKKLEEFKNDKEKCPNCQDIQITDYLILKYRLWEEQNRRCIYSTEDENQISLYDLIKPDSPYDIEHTIPRSRSWDNSLENKTIARADINRKIKRNKIPSEMENWEQILARVQHWKDEYKKLDKEIAAIKVYDGMDEKTRQRRIQERLVKMMERDYLKGKYERFTMKTVPESFKNRQLTDTGHITKMAREFLGSVFKNKNNYPNILTVNGNAVATFRELWGLDKNRDFHTHHMVDAIVAAAISRKLFGQFEEIWKKEDEKGVRYKSISETAKFKPWPSFTEDVLKLADSTPVVQRHIDQTGKQTKKKIRVTVKTPPATGIYKTIIKSDGSIRYRGIVYQQGDTARGALHQQNFYRKVSLFNPKTGSVETFYSIRKEIDKLKKKDLERIYDEKLRQVIEQNIKDGTISFNASGNIKIQGTVWQNKEKAIPLKKVRIKVDDKPMEIKPYPDVFRPADSAKSHFLAMNDENYGMILYENRKGKRHYKLINLYDYYNTEPGDIFEENIIHKNKTFSLVRKKNKPVLLRKGMGVILMNKDEEPIFDSQWIFERLYYIKGIDDDGIKMMHHAYGGSTSDAIAYMNEVVDKIHFNEIVEILNQQGFNIDKQQELKDFENDKKTWFKEKSEILKNAGVIKKEIKISKLTTPKGGEDVVGRFKEFPFIKKRVSDFHALLEGYDFEIRQDGRIEMKY

SEQ ID NO: 9797 - protein, 1013 aa, unidentified
  REGION 1..1013: note = Description of Unknown: Cas Enzyme sequence
PAMRYRLGLDLGSSSIGWCMVRLDHNNQPCAIIRMGVRIFPDGRNPKDGSSLAVTRRMARQARRRRDRLLKRKAQLLTSLVRLGFFPEDAGERKALTQLNPYDLRRKGLHVPLTPAEFARALFHINQRRGFKSNRKTDAKDKEGGLMKKAINELQEHLKQEDCKTVGEWLARRHEQGLSVRARLRGRTAKDKAYDFYIDRSLIEQEFDTLWETQQGFNPDIFTDQARDELRDILLFQRPLKPVKPGRCTLTPEDERAPLALPSTQRFRVYQELNNLRLINPDMSERPLSLEERDKLAGLLEKGNLTFSKIRRTLKLDSATDFNLEDEKRDRLKGNATSLALRKATCFGEAWDEFDLARQDAIVEQLLNEPSESLLIHWLTENTGVNSEQAEILSNVSLPEGYGMLGRRALARILPELGKAVVTYDKAVTNAGFDSHSALSHFQQTGEIMDALPYYGEPLQRHVGFGTGEPNDPPEKHFGRIANPTVHIGLNELRKVINGLIKKYGHPSEIIVEVARELKLSKKRKQEIEHDQAARQTRNKTLVEEASKILGYDPEHIDGAKRRELSQKMQLWTELNPKDVIGRRCPYTGEQISIERLLSPEVEIEHILPFSMTLDDSLNNKTVCLRRANREKGNRTPFEAFGKHPVKGYDYDGMLQRARLMPRAKAWRFGHDAMQRWLRDEQDFLARALNDTAYLSRIAREYLTLVCPQVRVIPGRMTAMLRGKFGLSTLLGGSPIKNRDDHRHHAIDAAVVAVTDQGLLQRFAKASASAREKQLDRLVENMPLPWSSYREHVQRAIEHIRVSHRPDHGYQGALHEETAWGLRKDGKAVRYETPEGGSTRTTKVKSADAMILINSTGDPERHGKDADGNPRAYKAYLGGSNYCIEIVANEKGKWQGEVVTTYEAYQTIRKYGEKEGWKRLRNPKQSQSGKPLVIRLMKNDLVMMKLNGAHTLMRLCKVGQSKQMFFAPHNEANVDARSREKSFQYISKLPGSLQKTEARYVTVSPIGDTKVYR

SEQ ID NO: 9798 - protein, 1373 aa, unidentified
  REGION 1..1373: note = Description of Unknown: Cas Enzyme sequence
MNSYKILGIDLGTNSLGWSVLQSTDDKFKKLKLFDKGVVLFDEGVILEKGNEKSKASERTGYRAARRLIFRRKLRKYNTLKVLARHNMTPLSIDEVEQWRSSNFNRYPKNKEFINWLRTDDKINKNPYYLRAKAVHEKLNDWELGRAFYHLAQRRGFLSNRLEKNKNKNEKGQVKESIAFITKQIEKAGAKSLGEYFWQLYQQDRHDENNKIRKQYLGRKEHYLQEFESICKVQELPDELCKSLKKAIFYQRPLKSQKAVVGNCVFEPRKPRMPISHPLFETFRMWSFINNIKIQTPYDEDMRFLTEEEKHKIIPLFENAPSKKSFKFADIANKLVLTEHKKAKMAYYKSKKAEKAHYLFNFDLKQTVSSSPVTALFNKYLGEDWNTKIYSYTVARPNGEKINKTADFHDIWHVMFTFDDEEKLRDYFENKLKLAPETTDKLVEYNLPAGYASLSFKAVSKILPFLKEGFTYDKAVLLAKIPEILGSEIWYVAENKNKIINKINQIFEKKSTRQKIIAAVNSTIYQIHKEQINEPIAYESFLRENMEKNFGKKTFQKLIETEGVLQTATNLLEKRLQYQSIEQQIIKQETIEQQLKNYLKTEFNVSDKDLNKLYHPSMMDKYTRQPTAADGKRYLGSPIIDSIKNPVMMRSMHLLRKLVNTLLTKGIVDNETVVHIELARDLNDANKRAAVRKYQQEREKENKNYESEIKEIFHKNGINRNVSKDDIKRYRLWKEQNEISIYTGNTISLHELFDGSKYDIEHTVPRSQSYDNSLANLTITESRINREIKRNKLASELENFDEIKLRLEPWIKNVENLQNKINQLKNKTKSAVTKEERDKLIQNRHYLNLKKEYWEKKIQNFTITEITNSFKYSQLNDTRLITKYARAYLKSVFDKVHVVNGSMVALYRKVWGLQDENEEKSRANHIHHALDATVIAAMTRHVYNKLAEAWHSLENNKIKEGKQLIRETKPWDTFTEDIMNLHKNTLIYHDFRDILPKHAKKKIRNRSTIQYRKVEQLPKDILKLIEKGVYKEGINYRVTIQNGKKIYEIPMFAQGDTARGVLHRETYYGAIAQKDEYGKIIKDKEGKIKVDYVKRIYVDDINKTDDADKIVDPAIRTIVKRDIQKRNEINEKLKNINEQLKKTTEDKEKELLEEKNKLEKEKNNLFKLPTKKGGYIPIKKVRIKTRVKQPLPNFKKHRDLSAQEYKQWYYVENEENYAMAFYEGVNNKGKIVREFEMVKNIEAAHYFKRSQQEYRKEHTLVPEQKNNLPLKYILKKGMSVLFYKENPNELLDLTTEELTKRLYIITQLGSQVYFIPHQLGGKMTELKKSAVYSPDLSGKRIMALTKGNWNFIVNNVDFTISIDGKIHFNIIKD

SEQ ID NO: 9799 - protein, 1358 aa, unidentified
  REGION 1..1358: note = Description of Unknown: Cas Enzyme sequence
MSKKLTISIDMGAKNNGIFIVKSDGKAIESKKASCIVVDNISFSKQNRTQNRHRIRNSTRFDLARRLLKEFIDFDLYKQPNKQRQFYQEQIVGLLHNRGFDRVEGAFEELDTLTIEFLQEKIPNIKELSTASTIDIFVNNSESSIKLEKELKFYKESISQLFTNLRAYRVKEFIRKDIEKIVTNKFSKFSSNTEEHIRKILIENRVEFNHERGKLKNQLVKNEIDVSAIDFEKELNKILKVEDEFLDGFSILEHDLKMISDKENDPSISRLFETLIEAIATGAKPRKMYQSEIRKEIEKFSFIASEDKADMYHIVANISNLQLRVLRKYFNGKMLEDNKLDEKKLSKLLYKYFVSRHYTKDFEKERRKELFDVLKEFLNPKKKLYEAKKFFLTCSPEHTIPPYEDMNNRDTYKCNSLLINAKRLTDGLKRSVDILLNQSQFDMLVNSSLIDDKDYSQMLQRILDINSKNIDKSIHPRNVFKHQRDGTNIQYYQDLLKDDFKEFSDFSKEFYSKEESAINGIFDEEDKEYIFLKCAKNTPAKRNIKHELINAIFASNFQMAEDIEIFKQVIEKKKIKTKLEKISNVSKKYQNEFFKNLLYANELKNTKDKKVEYANLNKDIKDILAMVDDLLGVFKIIFSELNQKSYLDNNFLFEENEIKIKKRDKNLKRFVNSIKQTYDVLYLDTGGHNKTCKSCTKENNERSNEEYPLAKRLLSDVAKPINGKLDMLLARIAWETIQPLDEKYLNDVENIEILLEQNKFSFEKSLHELKIRKKEPEEQELAYNICPYTGKKFDKKNGEYDHILSQSSSQKEKIQVYNSEANLILCSSEGNKEKDNKVYTFNELKTAHLKIIFGTEDKEVIKQEIIAVWDNPKSGLNYYTSFRNLKFNEQRAFRYALFFNSNDSYFKKAEALLRQEQRTITNGTQKRLAKLIFSKLPKSYSNAVNVKVIDNKEVSSTRKELAEYYRKFDKNTGEVLEDKNLTKQDKQSSYSHIVDAMVVYYVANKLELDDFKLIEMNEQLDYTQMVKTQHWYETNNKNYKINSKRLFDEKDIGVGYVHLQELISTDSKGKEKTTFKKGMVKDSFVSTTFNLKDFQYFMSKNILEKMENQNYCVNKSRLYEVMFDEKDEVLKNISHYTKLTKELRYTYTKFNPFDILAKFLEPLTADDKKAVFNIIKKKNPLEEDITVQNIMAWFSRGSKLEKSGAKLGYYKSWEIFTKVLVENKEELFSVVETKKYDKKSKEETIVKSIKLDKETALDYLTIPSKKYKHPLFKVTHTKRRDKKKNGYTLYSASKADTQYVHRRKANGKYIYQTRIANGHNKLKGFIKGFSDEKYFFEGSSNIIPLTMKNYREAFASKL

SEQ ID NO: 9800 - protein, 1398 aa, unidentified
  REGION 1..1398: note = Description of Unknown: Cas Enzyme sequence
MKKKLGIDLGTNSIGLTLREGNEFNWYGVYTFKKGVGQDKSGEFSLAAERTKHRSPRRLYNARRYRKWETLKALIENDYCPLTREELNKWKHYEKGKGRQYPIHNTLFNNWIKLDLNNDGKPDYISPYQLRKDLIENKLDLNKKNDRYKIGRAFYHIAQRRGFKSSRKNGDKELSSVYKGSNETKTIGVDKYQDLIDKYGTLGAAFANLELEGIRIRNRYTLRKHYEEEIKKIIEYQGIDKIFAEKIIKAIFFQRPLRSQKGLVGKCSLEKNKYRCPVSHPKFEQFRAWSFINNIKYKVRENETFKSIPLDLKNEIYQKLFLREKDNFKFSDIKKLIVKDQRYNWQLNYKDKTVVSGCPVSAKFKVIFGENWDQITIINNKKEYDINDIWHILFSFDDEEYFIEFIKDKLGLKNEQIKKMHTLFNKFPVGYGNLSLKAINNILPFLKEGLIYSEAVLLAKVPEIIGKTIFLENKNLIIENLKAEIETNRREKQIIYLTNTLISNYFVFLEEDNNSENLHIRRAKGVDEHIKEISKKEVKTVLINYFGRKKWDEKSDEEKTSIYEAVLNKYLKFLDGKQENIEKASYSVSNNPEIDYYKMPKLSEQIKNFLYDNFEIEKNQLKKLYHPSQIDIYPHKENIEKLGSPKTRAFKNPMAYKTLYKLRKVLNNLIETGKIDSQTKIVIEIAREMNDKNMRKAIEVYQRRRERENESYAKAISELIKEPEFKGTANPDNEIDKRKFRIWTEQIEDFDNISNEIVKIENEKSLKPIEKDIKKYRLWKEQNAICMYTGKIIKLTDLFNDNIIDFEHTLPRSKSLDNSLENLTVCYADYNRNIKKNKIPTELPNYNKNWGNYSAIKPRLEKWKKRIDELEKQIENLKFKSKIAIDKDQKDKAIKDKHLKKFEYDYWKNKVSRFEMENITSGFVRSQLTDTQLISKYAYHYLKTYFNSVEVQKGNVTAIFRKIYGIQEKYKKKERIKHFHHAIDAAVLTLIPSSSKKEEILKKNFEYEETFHQQYHEKPFEGFHIKMIHQIEKELLINNMPDRDRALQETKRKVRKRGKIVWLRDKNGKYILDDNGNKIPKIAQGDTMRGQLHKESFFGAIKVVKRDKNNKPLRKEDGSWDIIEKNEGLRFVKRIPVEEVTDLNKIVDPDLAEMIKKQMNGKTLKKTLAEGVYMLDKNGNKINKIRRVRCWVRSTNPLRIKQQTYPSKYEYKNYYYADTGDNYAFGLYVEDDKPYDTAQKKIIPINLFEASKFKKENKKLKINDLFEEYILIGRGKKKQKASLYHIFQPGQKVIFYTESKDELKDLGNLTDRLYKVKNLFDAKQGLIQFQHHAEARNDEQLTIDFPKKDFGQRGKNGFSKFSTDFIQPRLLLSPGNLKCIIENKNFIMKLDGTIKFLY

SEQ ID NO: 9801 - protein, 1366 aa, unidentified
  REGION 1..1366: note = Description of Unknown: Cas Enzyme sequence
MKKILGLDLGTTSIGWALINEAETKDEKSEIIKLGVRVNPLTTDEQTDFEKGRPLSINADRTLKRGARRNLQRFKQRRNNLIEILTINGFISKKTPLTEIGENTTHQTLYLRARSTKEQIKKEEFARVLFTINKKRGYKSSRKAKNEEEGNLIDGMAVAKELYDNNLTPGQFVFNLLSEEKKYIPDFYRSDLQNEFDAIWECQKQFYPDILTNDLYKKLQGQGKQKSSKLFLAIHQIYTAENKGKRDAVKLQHYKWRSEAISNQLKIDEVAYVLVEINNNLNNSSGYLGAISDRSKELYFNKETVGENLYKQIQENPHTSLRNQVFYRQDYLDEFEQIWETQAKYYPELTMKLKEEIRDVIIFYQRKLKSQKHLISNCEFEKHHKAIPKSSPLFQEFKIWQNINNLEFKHSKTKERWKIDDDARKLLFDELNLRGNLKSTDIFKLLGLKPKDWKLNFEKIEGNRTNESLFNIYQQIADNEGYGFDWATKTALEIKKELQAIFSEIGISTKILDFDSELSGNEFAKQESYQLWHLLYSADDDTSLKQNLQIKYGFKPEYTSMLANVSLQQDYGRLSARAIKKIFPFLSKGNNYSEACSLAKYNHSHSLTTEELANRPLKDKLDLLPKNSLRNPVVEKILNQMVNVINQVIETYGKPDEVRIELARDLKKSAKERAETTKYINTATTKNIEFRKIITKDFGIPNPTKNDVIRYKLWDELKTRGYKTLFTNEKINHSDLFSKNIDIEHIIPKAKLFDDSFSNKTLAFRKVNLAKADRTALDFIESDYNTDLSNYKKRVEELYNKGKGTISKGKYKKLLMAEKDLPDGFIDRDLRNSQYIAKKAKQLLQEVIRTVNTTTGVITSKLREDWDLINIMKELNLPKYRGLGLTEIQERKNNKKIEIIKDWTKRNDHRHHAMDALTVAFTTYNHVQYLNNLNASRDKKNSKLYGIRTKITKIYENKNGSKKRKFIPPIVGFRKEAKKQIDSILISFKAKNKVVTRNINKTKLKGKDRYNTKIQLTPRGQLHKETVYGKMKEIIVKEEKIGGKFDKMKINQVTKLIYRKALLKRLTENDNNPKKAFTGKNALSKNPIYLNEAKTKQVPEVVKIQFFEDNYTIRKDINPDQFKDFKSLQKIIDVGARRILENRLLEFNNNAKKAFSDLEKNPIWLNKEKNISIKRVTISGVKNAEALHTMKDHFGNEILDKNGKEQAVDFVSTGNNHHVAIYKDNKGKLQEKVVSFYEAVARVNSGFEIIDKEYNNDKGWQFLFTMKQNEMFLFPSEDFNPNDVDLLDDKNTSIISKHLFRVQKISTKNYMFTHHLETQAITGDILKNKKQLSGHSYNFIQSTEPLRNIIKVRINHLGDIVQIGEY

SEQ ID NO: 9802 - protein, 1002 aa, unidentified
  REGION 1..1002: note = Description of Unknown: Cas Enzyme sequence
MSKKILSLDLGITSIGYAILDEMDNDRYSLVDYGISMFDKATDKDGKSKKLLHSASQSSANLYDLRKQRTQNLAMLFEKYKLASADNLLRQERENKYINKWYLRAEKSFSQKLEIEELFTILYLMAKHRGYKSLDTDDLLEELLIDLEFEVPEKKEKDAEKGKIKQALKTVETLRKEYPEKTVARIIYEIEIQKPNPTFRNHDNYNYMIRREYIREEIEKIVLSQRDFGLFDKTFDIDTFTKELIATIDDQKDSTNDLSLFGNCEYYPEEKVAHQYSLLSDIHKMYQSVANITFGKTKILKEQIKIISDDFFKKIKQGKNIADIKYQDIRKLLKLNDEVKVFGKEDYRLDKKGKKVHYTITKFHFLANLGKIDNSFINTVFEKNNKYEILKEIFDVLEFEKAPKSMYTQINEVFMKYTLVEDARLKDETIINLIKHKTGNSLNISAHAMIKFIPYFEKGMTIDEIKQELRLERNEDYSSYMKGIKHLHVNTFEKDDNLEINNHPVKYVVSATMRLVKHLHATYGAFDEIRVESTRELSQNEDTKKAIDKANRENEAKFQKIIEDEEYQKIANEYGKNLKKYARKIMLWEEQDKLDIYSGKVIGFDDIFSNRVDIDHIVPQSLGGLSVKHNLVLAHRDENIKKSNQLPMNFVTDKVAYVNRIEHLFKEYKINWKKKINLLAETLDDGYKDTFESKSLRATSYIEALTAQMLKRYYPFLDKKKQANGQAVAHVQGRATSNIRKLLGVKIKVRDTNIHHAIDAILIGLTNKSWLQKLSNTFRENMGVIDDEARANIKKELPLIEGVEPKELVGLIEDAYNVYGEDSVFYKDIFGKTKAVNFWVSKKPMSSKIHKDTIYGKKPNGFFTVREDIIKQFIALKITTKTEPQVFVKGFEKSILHKMYSYKTNPNDVICSIIQSRANEIKRLLESFVDLDHKNKETTSEAKEKLDTLVHKELLDNNGNTIRKVKFFQTNLTGFDIRGGLATKEKTFIGFKATYENKKLSY

SEQ ID NO: 9803 - protein, 1468 aa, unidentified
  REGION 1..1468: note = Description of Unknown: Cas Enzyme sequence
MQFKNLFAMKKNILGLDLGTNSVGWALIHQDFINKKGEIIDLGARIIPMTQDVMGKFESGQSISQTAERTGYRGVRKLNQRKLLRRERLHRALNYLDFLPEHYKKQIDFINNKGQFKKETKIDYKENEEGKYEFIFKNAYNEMVKDFRDQGYVGEIPYDWTLYYLRKKALNKKITKEELAWILLNFNQKRGYYQLRDEMTQETDDNKKKEFVILKVKKLNPTGEKTKDGKDLYKIEFENGWLYQKETVHPEEWEGKTKEYIVTTTINKDGSIKRTYKQVDSEKDWIAIKEKTQQDIEKSGKEVGEYIYDHILIDPKQKIRGGLIKTIERKFYKKELDRILKTQKQFHPELSDRKKYEAAILDLYPHNEGHRNNLKSKDFKHLLLNDIIFFQRPLKSQKSLIANCPYEKVTYFKKIIDPNTGETKEVKETKHLKVISKSNPLFEEFRLWQFLHNLKIYKKRHQEFDKIYHDVDFTEILLPEEKDWEKLFDFLRDKKEISQKHIIDFLVKNKKIDKKEKINYRWNYPEDKKYPAMPTRAGFINRLKKVESIKPEEFLNPERLYQLWHIIYSVKDPDEYKKALQSFAQKNHIDAKNFVNAFIKHPPFSAEYGAYSEKAIKKLLPLMRLGKYWDEKTIQPKVKERIDDIMWRLKSIDWEKIDKDQINEKLDEISDDDIPRAVLKSFLKSINKNPYKSLQIHQATYAVYGRHSEASDIQKWESPMDIDKYIQNFKQHSLRNPIVEQVMLETLKVVKDIWQYYGEGKKDFFDEIHLELGRELKNPANVRQKISRKNLDNERTNQRIKALLKKLMNEGANPESPSHQEILKIYEEDIIHSIDKLPDDIEKIRKNNNPKPADIERYKLWLDQKYISPYTGKVIPLSKLFTTEYQIEHIIPQSRYFDNSMSNKVIAESEVNQDKSNSTAMEYIRNKGGHIVGNGHKILTENEYQAHVEKYFSHNRKKMKNLLSEEIPEDFINRQLNDTRYINKVIKSLLSNIVREEDEKAETVKRLIPVTGAITSKLKHDWGLSDKWNEILLPRFKRLNQLTNRNDFTYLNQKGIEVPKIPDDMPGRINKKRIDHRHHALDALVIAATTRNHINYLNALNNEKIKHELQPQLLIKNEHGHYTKHFQLPWKTFPVEAKEKVEKTIPSFKQNLRVINKATNKYWKWVKQEDGTYKKQKVRQTKGDHWAIRKPLHKETVYGKFDLIKTSKNKVATFVRTPLSAINKDKHLEQITDKVIREVIIPNHLKNYKLENGKYDFEKAFSPEGIKILNKNIKELNNGKPHQPIYKVKMYEVGSRFPLSDNPESPKHKKYVEAAKGTNLFYAVYWDEKRKKRNFETIPLKDVIAHQKMEAHLPKEERTTIPINEELGQFLFYISPNDLVYVPDKDENIKNIDLSNPTPEQVAMMYKFVSSSGKQSFYIPIQSAQSIYNKKEYGSLNKMERDLTGKMIKEYMIKLKTDRLGKIKEVIK

SEQ ID NO: 9804 - protein, 919 aa, unidentified
  REGION 1..919: note = Description of Unknown: Cas Enzyme sequence
MGKILGLDLGTNSLGWAIVENDREENKETLELKDKGVVIFSEGVKLEKGNEISRAAERTAFRSVRRLKFRKKLRKYETLLVLSKNGMCPLSEDEVIAWKKSSFKKYPTNEDFLNWLQTDDDKQKHPYYFRDKASKEKISKLELGRAFYHLAQRRGFLSNRLDQSDKGIIELHKPNLFDILEESKTITELTIAINDYFENIEIANKKKKDLDAGGQKLYLLYYSFQKTLKEKESFENIKNKITERLNKKENLGKVKQSIDNLSGKIKEGNFKTLGQYFYSIYGKSNQRIRNQYTAREEHYLEEFEHICKIQGLGKITIKENEPTKRYDGLTLDLYKAIFYQRPLKSQKGLVGKCTLEPTKYRCPVSRSEFEEYRMYQYLNNFKVKTPDDEKLRELTKDEKEKIKPLFYRKSKPHFDFVEVVNKIIPKHEQTVYFKRKDAKTAKYVVNYKLNTSLSNCPTIAHFRNVFGEDWKTLNYTYIITDKKGVEKKRIINYQDIWHVWTTFTTNEKLYDFALTKLGLSQTTALKFSKVTLKNDYASLSLKAINSILPYLKDGLIYSHAVFMANMKSVIVQERWNNKEDRELIQSEIKKIIDNHQIENKLQFIINGYIKINFKNSYSKEADPIYRKELNESFEFEFGKKRWNALNSNNLFEEYYAIFVTKFKTKEFLKIKRIDKKVIDFLKDNDLLSNENKLYHPSDIEKFKLEKVKNKDGVEFTILGSPLSNSIKNPMAMKSLHKVRKLINTLILEEKIDENTKIHIELARELNDANKRKAIQKWQNDREDERKIYRKKIQELYKEDFEPTLDDLEKFKMVLEQREDKKIVSKEDVSKYKLWEEQRHVCLYTGNTISLTSFLSKNPDYDIEHTIPRSVSIDDSQMNKTLCEKKFNRDKKKNQIPFLLSNHSKIMDRISHWKDRFEKL

SEQ ID NO: 9805 - protein, 902 aa, unidentified
  REGION 1..902: note = Description of Unknown: Cas Enzyme sequence
DNLFIGNKNQKDVWDLRREALYRKVDNKELSRIMIHLAKHRGYFSNRKSEEPSDSDGKAVLSGITKNKNILQTKNYLTIGEYISTKSKKRNGKDAEGKLNYENSVARSMLIDEINIIFTKQKEFNNKLVNDELLQTYKTIAFEQRPLKSVAGMVANCPFEVDEKRASKSSYTFELFRALQKLKNLRIITLDGEVALTKEQINQALYKAKTAKFTYKTLKKLFSLKEILFKGLTYFDHKTGEAVKKDPESDELINFQAYRKMHKAIQSTDNLYWQTIENDSDILDAVAKILTTEKDDKESIKQLNEVVENDKVCEALVSLSFSQFGHLSTKAIKKIIPFLEDGLDYDKACEKAGYDFKAIFKGNKSKFLPPLTKQENLEMTNPVVKRAIAQMRLVFNAIARKYGELDAVHVEFTRDIKNSHDDRRKIEKAQGEFKDAKDEARIHAAEILGHKPNSKELLKFRLWKEQNKECIYSGKYIDPNVLCDPYATEIDHILPYSRSMDDSLNNKVLCLTKENQDKGNKTPYEYINSSKWDEFIRRVEGLKNLKYAKKNRLTKTNFDESSANEFKKRNLNDTAYISRFVKNYIEAHIEFKKSKDKQHVFTRNGMLTSQLRYKWGVGDKNRKNHLHHAEDAIIVAFSTQGMVKKLSDISKERETQSFKYKTKEEKSKALRFITPLDEFHKKVQESLANIFVSHMPRRKVGGAGHSQLPYRSYCDIDKNKELKKDRSSIKISKGVLVRGGVCENEDMCRVDVYVQKDTKKYFLIPLYTSDFVKNKLPNKAIVANKKPWVEMDENYEFRFSIFKNDILAIKQKNKDEAFGYFVGVHSGTANITIKEHSNIDNGSFKYVKDKETGKQNSLYLFGVKQSVEKFIKYQVDALGNYVEVKNEKRQGTIKEGKLQRKK

SEQ ID NO: 9806 - protein, 908 aa, unidentified
  REGION 1..908: note = Description of Unknown: Cas Enzyme sequence
MGLAFGFNVGTETVGWTVIENGYDVVESGVNVFPAAIVKSNKERRGNRESRRTARRKRVRIRDFKKLWEESGLKIPETPDNGVPELKVRGLHGALSEDEVYHVLHSALKSRGISYLDEFEDDKKKDSEYTAAVEYNKLLLTDRLPCEIQHDRLTDYGSFRGQTETFFKGTPIKLMNVFTREACRKEIMLFLEKQAEFHGAVDDGFIRKYMEIFDRQRKYYEGPGTEYQRSDYGIYMTERDEDGEYVTEKNIAVRNIGRCSVYPDERRGSGASYTAQEFNMLEDLNNITVNGRKLTGEEKRTVAETVRKSKAVSMPKVIAKAIGEKVNTLTGARTDKSGKQIFHTMEAYRKMKAALREKGYDIDIIPRDELDAVCDMLTVNTDLEPVKMELNDRNIKLPDDILKTFMEVKREKPKLFKKWQSFSLKIMNELIPDMYELPKNQMQLLAEKEKFRELEESLKSYTKIPEDVITEGITNPVAAKAVRRTVKVLNALIAKYGYPERVIMVMSRDANPEEEKNRIKMQQKNAEKELKKVLDRIKEEYGININEDEFKRDGKLALKLKLWNEQDGICPYSGREIDIGKLLDNSEEYEIDHIIPLSISGESNRMNMVLSYAAENRDKGVNTPLGYRSNVNRKWNAEAFREFVEETYRGKKFQTKRENLLYAGRLTKYDTLLWFRSRNLNDTRYASKTVFNFLQSYFKAKDCGTKVDVIRSKFIAQVKQGLRFKNDSNSIMYSKHAVNAMLAVFSHEGYRTWKKMLDKCYVDGEVIDTRRFNKLLENDRLYNESVWQDKGMRIRASVRSAEPEVKYAFQVDRKVNRSLCNQTIYGTREIDGETYKIRKLTLRTEQGYKKFKKMIDDGECEKFLMYGTDKDTFNYLVNICNMYPDAKNPFVQYEELTGNIVRKQQKNG

SEQ ID NO: 9807 - protein, 1477 aa, unidentified
  REGION 1..1477: note = Description of Unknown: Cas Enzyme sequence
MKKILGLDLGTNSIGWAVVNEAETADEQSSIVKLGVRTISYDNFVSTETGKESKDPVKDFSGGKGISCNAGRTMKRSARRNLQRYKLRREHLIEILKNNGFISDNTILSENGNRTTFETYRLRAKAAIEEISLEEFARVLLMINKKRGYKSSRKAKNTEEGQLIDGMEIAKRLYEENLTPGQLSYELLKSGKKYLPDFYRSDLLAEFDKVWNFQSQFYPEILTDELKEKLSGKNDKQTWAICQEPFGIVGVKREGKRDEQRKENYLWRANALSDKLDLEYLVIVFQEINKQINNASGYLGDISDRSKELYFNHQTVGQYQMAQLDKNPNYSLKNQVFYRQDYLNEFEVIWETQAKYHKELTPELKKIIRDVVIFYQRPLKSQKGLISFCEFESRKIEVEVDGKKKIKTIGCRVCPKSSPLFQEFKIWQRLNDVEVSGMIVPNQQQDLFGYSKDYTYGKRRLQQEEKELLFAELNYKEKLSKNEVLKILKKQKDVDINFKELDGNRTQAELFKAYQAIAERSGHDVGDLSKKSAKEMIDCISNIFGTIGINTEILSFNSDLEGKEFEQQPMFRLWHLLYSFEGDNSAIGNAKLIEKLQDMFGFEKEYAMVLANVVFKETGDYSSLSTKAIRKILPHLKDGNDYSVACEYAGYRHSKKSLTKEEIQNRVLKDKLELLPRNSLRNPVVEKILNQMVNVVNGVIDSYGKPAEIRIELARELKKSAKEREELSKSINETTKLHEGYVKKLQDEFGLTHVSRNDIIRYKLYKELESNGHKTLYTNTYIPREKLFSKEFDIEHIIPQAKLFDDSFSNKTLEARQANLDKSNTTAFDFVATKYGDEFANGEYKTRIENLYKDGKISKTKRDKLLMKEADIPSGFINRDLRDSQYIAKKAREILEEIVKFVVPTTGSVTDRLREDWQLVDVMKELNWEKYNKLGLTEYYYDCDGRKIGRIKDWTKRNDHRHHAMDALTIAFTKHSYIQYLNNLNARVQKGIDDYIDLDMVELKDLDKKDRSSAIYAIEKKELYRDSHGKLRFIPPMPLNEFRAEAKRQLENTLISIKAKNKVVTRNINKAKNNVISEIIDKEGNKKTVKGQLTLTPRGQLHEETVHGVIKRYAPEKVKINAHFGESKIKCVVDKRYKCALLDRFLKYEKDPKRAFAGKNSLDKNPVWLNESHTEKVPNEVVLFEFVYTKRKEVSYENFGKSGNKKLDKEGVIKALNKIIDKKTRDILIKRFEEYGFDAQKAFSNLDENPIWLNQEKGIAIKRVTITGISNGEPLHDKRDKDGNLILDEKGNKQPVDYVNTGNNHHVAIYRKPKLDKNNQPVLDENGDIVYELDEKIVSFYEATSRAMLGYPIIDKEYKKDKGWQFLFTMKQNEYFVFPRYETIVDENGNVQQIKTFDPKDIDLLNPDNYAEISPNLFRVQKISTKDYVFRHHLETMVQDNAKLKGTTWKRYGLNGIENIVKVRVNHIGQIVSVGEY

SEQ ID NO: 9808 - protein, 1306 aa, unidentified
  REGION 1..1306: note = Description of Unknown: Cas Enzyme sequence
MKKILGLDLGTNSIGWALVEQNFANKEGNILGIGSRIIPMTQDVLGEFGRGNSISQTAERTGYRGVRRLRERHLLRRERLHRVLNILGFLPEYYAYQIDFEKRFGKFKNECEPKLVYYNNEFLFKDSFNEMLEDFRKHQANFLINNDGKDCLVPYDWTIYYLRKKALSQKIEKEELAWIILNFNQKRGYYQLRGEDFEVEKDKIFIKLEVQNVVDSGEKVKGKSLYDVIFTNGWKYDRQIVKTEDWIGKSKEFIVTESSLKDGSIKRTFKAVDSEKDWIAIKTKTEQEIDNSQKTVGTFIYENLLLDPNQKIKGKLVRTIERKFYKAELEQILRKQSEFHAELKSLDLLADCARELYMNNQNHQQSILAKDFVHLFLNDIIFYQRPLKSQKNLISNCTLESRKSKEGVVFPIKVISKSNPYFQEFRILQWLQNLAIYTKEDDKNVTQEFFDSNEKWDDLLRWLKSRKEIKQEVLLKFLLERKGFKSKALTIETAKYRWNYVQDKDYPAYETRALIQLRLDKVVDISTNFLNDEIEYQLWHLIYSVTDKTEYEKALVKFASKHNLDETSFVDSFKKVPPFKSEYGSYSEKAIKKLLPLMRFGVDWNYEQIDDNSKIRIDNIINAIVDENIKNRVREFIEIRNITNEKQFQNLPLWLAQYIVYNRHSESADIRKWQSVEDLSQFLKDFKQHSLRNPIVEQVITETLRVVKDIWVKYGKGAKDFFSEIHIELGREMKNTGDERKRLTNIVTDNENTNFRIKALLAELANDSMVENVRPYSPTQQDILKIYEEGVLNSVENIEEDILKISKTAQPSSADLKRYKLWLEQKYKSPYTGQIIPLNKLFTHEYEIEHIIPQSRYFDDSLSNKVICEAAVNKLKDNQIGLAFIKKHHGEVVQIGNGKTIKVLEVADYEEFVKQHYTKNRTKRNKLLMEEIPEQMIERQLNDTRYISKYISQILSNIVRDDQPESTDDGINSKNVLPGNGKITTKLKQDWGLNDVWNDLILPRFLRMNELTSSTDYTSINTNGKLIPTVPLEQSKGFSKKRIDHRHHAMDAFVIACATRQHINYLNNMSSKVEDLKDEEKRKRQIEQRNKLKNDLCLKTKPDSNGNYQWIFKAPWKTFTEDSRSALENLVVSFKQNTRVINKATNYYESYKDENGNLRIDANGNPKKGFIVQKGSNWAVRKALHKETVSGKIHLDRIKVGKDKILTATRKSLDASFNEKTILSITDTGIQKILLNYLKFKNNDSEIAFSPEGIDEMNKNITQFNEGKKHQPILKVRVFEQGSKFALGETGNKINKYVEAAKGTNL

SEQ ID NO: 9809 - protein, 1464 aa, unidentified
  REGION 1..1464: note = Description of Unknown: Cas Enzyme sequence
MKTILGLDLGTNSIGWALVEQDFENQIGKILGLGSRIIPMSQDIIGEFGRGNSISQTAERTSYRSVRRLRERHLLRRERLHRVLHILGFLPKHYDDSIDFTKRFGKFKSDIEVKLPFDKEFLFKASFQEMMDDFKIHQSEFLKKKNNEVGLIPYDWTIYYLRKKALKYRISKEELAWLILNFNQKRGYYQLRGEEEEESSNKKVEFHSLRVVEVVADEEVNKKGEVWYSLHLENGWIYRRSSKNSLIDWKDKVRDFIVTTDLNDDGTEKLDKEGAVKRSFRAPGADDWTLIKKKTEQDIVQSNKTVGAYIYDHLLLNPKQKIKGKLVRTIERKFYKEELELILRKQQEFHPELQNEQLLQDCVRELYKHNEQHQQMLETKDFVHLFLNDIIFYQRPLKSQKSSISNCPLESRWSKDGTKYPIKVVSKSNPFYQEFRLLQWLHNLEIYRIEDDLRVTSEFISSIEDQEALLEYLSLKKEVEQKHVIEFLLKLKSGGKKIAKGEIEKYRWNYVQDKKYPMNETRSLIQSRLERVDNVPSDFLSFDKELALWHIIYSVNDKIEYEKALKSFALKNSLDEMTFVEAFKKFPPFKSEYGSYSEKAIKKLLPLMRFGKKWSYKAISSVAQNRIDKILTGEFDENIKNRVREKAEQYNLTTESYFQNLPLWLAQYIVYGRHSESAVAGKWNSISDLEEYLKDFRQHSLRNPIVEQVVTETLRVVRDIWKQYGNGAKDFFDEIHIELGREMKHTADERKRLSSIVTENENTNFRLKALLVELAQDHSVENVRPHSPMQLEILKIYEDGVLNSVDTIEDDILKISKSAQPSSSDLKRYKLWLEQKYRSPYTGQIIPLNKLFTSEYEIEHVIPQSRYFDDSMSNKVICEAAVNQLKGNQIGLAFIKNYHGQIVNLGNGKVASIFEVEDYEEFVKQNYAKNRAKRNKLLSEDISEKMIERQLNDTRYISKYISQLLSNIVRDDKPDSKDDGVNSINVLPGNGKITSRLKQDWGLNDVWNDLILPRFLRMNQLTNSKDFTAVNSNGKVIPAVPFELSKGFSKKRIDHRHHALDALVIACATRDHINLLNNESALPQKGKTKDEQKKYRFDLQRKLRNKETYIDAKTGEQKERFTTFKKPWETLTQDAHSKLKTIVVSFKQNTRVINKATNYYESYKDENGKLRLDKNGKPQKDFIQQKGTNWAVRKALHAETVSGKVNLPWVKVGKKEITTATRERNDLISIFKNVKSLDVALSKVEKITDTGIQKILKNYLEINKEKLEYALSPEGLEEFNNNIRAYNEGKEHQPILKVRVYEKSKGRFKLGETGNKTKKFVEAAKGTNLFFGIYQDENGKRSYETIPLNVVVERQKQGLSSVPELNEKGNQLLFHLSPNDLVAIPSESGGIDVNGIYKMVSCTGSECHFIKANISSLIKSYDSNCKVGELGSLNKLEVTMDFQFRIKEECIKINIDRLGNVSII

SEQ ID NO: 9810 - protein, 1101 aa, unidentified
  REGION 1..1101: note = Description of Unknown: Cas Enzyme sequence
MSRYWRGWRVIRINRTLYSFDIGTNSVGWCVFRLDTKGEPRQLLDSGVRIYSDGREPKSGTSLAVGRREARAMSRRRDRYKRRRKAVLRTLIEFGLLPDSTSARKALMAETNDRRAGEIAADVYTLRARALDERLPLAHVGRALFHLNQRRGFKSNRKTDRAANDQGKIAAGISKLGTAIDAAGARTLGEFLHKEKLAGRWVRVRPHRMPSKIEGKEEDVYGFYPERSFLQKEVDAIWNAQAHYYPDILTDERREHLATVIFHQRPLKRPKVGKCSFHSDEFRLPRAHPLFQEFRLYKEVNELALIYPDQHSEKLTREQRDLLVHMLRTTRKTRFSAMRAKILKKQGGIRLNKESDSRLDMKGDEVWAELADKKRFGARWNSFSHGQQWEIVDKLRETEDPLALAAWLGDTFGLEPEKVDAISSARLPEGYGRLGATALSEIVEELKADVIPEAEAAKRAGYDHVMLGRGDEVDELPRYQEILARRIPPGTDEPSDPYDVRKGRITNPTVHTGLNQLRRVVNALMKRYGKPEQIAVELARELKLNDEQKQEINREIAKNTRAAERRSEKLQELGQPDNGYNRLLLKLWEELDPAEPVNRKCIYTGKPIGIGILFSSEVDVDHILPWSQTLDDSQANRILCLREANRAKGNHAPADVPQWQGHYDAILERAARLPQNKRWRFGRDAMKKFKDDEGFLARQLTDTQYLSRLAHEYLGALYPDEEPDAHGELRRRNHVRVIPGRMTEMLRRHWGLNSIISDHNGKNRSDHRHHAIDAAVVGVTTRSLLQRIATIAGGREALALEETIGGIEPPWPGFRDDLKVMMDRITVSHKPDHGTLPKRGEPGRTAGQLHNDTAYGFVYDIVDGDRVQRFEKGVPVVVRRKNFLTLSEKDIPTIRDPLLREALGEATYGLSGKDLTAALEKFRKRDDYKHIRHVRVTETLSVIPISDLDGIAYKAYKGDANHRYDVWELPNGKWVEEIVSVFEAHQTDWTSKVHTDNPAARKVLSLHQNDMVAYEHPSDGYTIGRVVKFSSGMVAFAGSREGGALKARDADKLDPFRYFYKAAGAMKSVRMREVRVDEIGRVFDPGPQDRDSRKQRSNGIN

SEQ ID NO: 9811 - protein, 1128 aa, unidentified
  REGION 1..1128: note = Description of Unknown: Cas Enzyme sequence
MNKKILSLDLGITSIGYSVIEEFDNDRYSLLDYGVSMFDKATDKDGNSKKILHSQSESSSKLFNLRKQRKKDLSILFDNFKLANKDKLLIQEKQNIYKNKWQLRCVKAFEQKLSINELFTIFYTIAKHRGYKSLESSDLLDELCEELNIPLEITKSNKNEDEKGKIKKSLKNVEELKQNSNKTVASIIYDIEIQKNNPTFRNHDNYNYMIRREYIEEEIINIVKSQVKFGLFESSFNSDIFIQKLKDIITYQNPSTNDMSLFGDCEFYPQFKVANQYSIISDIYKMYQSVSNITFNSKPTIKITKEQINLVANDFFTKLKKGKNILDLKYKDIRKILNLSDDIKIFNKDDDYISKGKKVHHTITKFHFINNLSKFDTNFIINNLSNENGYKNLKEIFEALQFEKDPTEIYKKLKDKIEDNQTIIYLIKYKSGNSLNISAEAMIKFIPYFKDGYTTDEIKEKLKLNRSEDYSEFKKGIKYLHINQFEKDNNNLKITNHPVKYVVSATLRVVKHLHNVYGSFDEIRVESTRELSQNEETKKAIEKANRELEKQIDTIVQNNEYQIIAKQYGKNLQKYARKILMYESQDRRDIYTGKGIEFKDIFTNTVDLDHIVPQSLGGLSVKHNFVLVHKDTNIQKSNQLPLNFVKDKEDFINRVEYLFAEHKINWKMKKNLLSNSLEETYKDTFESKSLRATSYIEALTAQVLKRYYPFKDIKKQKDGSSVRHIQGRATSNIRKILKVKTKIRDTNIHHAIDAILIGMTNQSWLKKLSDTFKNNMGVIDDKARANIKKDIPIFEIIINNEVKYLEPKELVNLIEDNYNFDGENSIFYKDIWGKTKSINFWVSKKPMVSKIHKDTIYSKKDNGIYTVRESIINHFINLKITPTTLSKKFEEEFNKKILNKMYLYKTNPNDIIYKIVQQRANDIKVLLDSFMLEDTKDKETLSILKTNLDNLIHSDLLDNNNNIIKKVKFYQTNLTGFNVRGGLATKEKTFIGFKATLENDKLNYTRIDVANIDKIKKDNDNSFKVYKNDLVFFVYPDKSYKGGKIVSFLEDKKIGAFQNPRFPATIQFQPFNFCKLGSGKKVGTKQQALAQTIGIIKLNLDILGNIKSYQKIGQCNSDILEHIKTIKG

SEQ ID NO: 9812 - protein, 1248 aa, unidentified
  REGION 1..1248: note = Description of Unknown: Cas Enzyme sequence
LSAANNKIKRVLGLDMGANSIGVSLMDIHQETDEGIIFEPIFENSIIIPTSNKKATPAEERREGRSARRINDRKGRRKKEARRAFVRFGIAEEAFIENTTEYLNNLNKKINHKKYKDIYDIRRKAVTNNIKLSKREFLLACYPILTSRGYNNMFEVVGEDDANKEKENSLVLGGISQNKQKMIEKGYLLPSMTVTEDREARLTQDNLSVPVRNKSGQYGHSLDRNMHKEEFLIFTQSQRDNTLIFKSREECDAFCEDILDEDCHNLPYESRVGGCKPSKTFYQRPLKSFEGMVDYCSFYNGFNKEGIKEKRMPIAHFKNIKRTLIEKLTNYPVINKSTGEVVSLSNEEKWGVIDHWLFSASSDKITTDNIIAKTDKKYKSLVLHLGGNIDNSPKLDATSRKAEDVVNIKTHRFISDTFRKYNLDMGGKHQDFYTGMLETCAYFKNKGSRDIDIKKKKLFDDLEGCLTDEEKEAFLADFYTVDISAFGSFSLRFTNEVLEVMEKESKTHHQALEKLGYYSRYLKMPKYAYLPPLNPSEKDIEWLSKNISYFRREHLFYQPVMSPKVKRVLGVLRKLINDIIKRYGEIDIIRVEASKDLNSKDEKESIEKAQRANKKKKDEMLVKIFANDDISSLSLGNIDLDKLVEKFVFAEEQGFVCPYTLNPFTPRDIIADGVLEVEHFIPRSIANINGKKNKLLVFRSANQEKSNKSPIAYFGDRWDSFVDTVNSFDGMADNKKDWLTDKDRIDDICNNDSHWGDNYLNDNRSVVRVVQKYLNHYLYPQDELFGKNEEQHIFAVSSQAVWQMKDIWNINGVMPRTEEELVFNKGEENEVVITQEKKDRNEHCHHAIDAVAIALCSPSSVNILNTYFKQSEKNPHKMGALMEKVRSSFPTTKEGVSVSEYVRRVVLEYKEDKRYVCHILKKKSGKKGFKETNLNISLKDGVIVQTKKYSITPLTDGFVVVKGAKDGRRVVDEAKMNKYIDTMKASLVVPLTDDEVGLVDAYLEMLTEKKNSMLDLAYDIKGLGWKIKSFKKPLSEDEEAIKEEVKLMKQALKDDEVSFGQSYLVFPSISGEKHNIYSLDVYSSVDTKNPILYLPNRKGTGKAVFVSALSDEGKKVLDRSSNKELYLARQTNSIQFTTVYKTAKGYGVGLNYFPSVCDADFPVALSNSAKKDNDRIALLELNGGEIVGITKDEGDGKTSFELFSSTGGGVISGVSNKINLKKINRINTDKKGKPSSVTITPNNNILEL

SEQ ID NO: 9813 - protein, 1165 aa, unidentified
  REGION 1..1165: note = Description of Unknown: Cas Enzyme sequence
MKKVLGLSIESNNIGYSLLGTSMTSSSITFDDILSNTISFSTPLSAVERKEGRLQRRFNERKSQRKRRSRRTFIEYGICTSDFLSSPSSYFEQLSIPDRDVYRLREKAVSGESLTKAEFALCVYSTLTARGYLNMFLLDSEKESKDSPSRVTGLIFLNKKEYLKKKLKIPSMVLTSRRDKHSTVYQNFPIRNKSGLHYNSLDRELYMDEFSTIVESQSLNTAIFKTAQASLDFTQKILSEEYGAFYQRPTRSLERLVEYCSFYGKFHARGGEIRSPLGHIGGVEVSLRKFLDSLLVISESNESRPLIQPEIDLLVTFWLSTPTANVITSQNVFKSAGITDLKASDLSKNPPPVNIKEYRDILSLFTEYKIPLQNDPSSFYTEAILVLYYFKIYDERAKRISSLLLKHNISMHPSFLSSLCKMEGLSGFGHYSLRFILEILPHLQNKDLSYSDALNKVASFDIHKTIPVYGYLPPLEPTRADIEWLTHNLPYFESSHLYYQPKMAPTVKRVISIIRKLVNMLISKYGPIDEINISVSKDMNSKKELSSIKDNKRFFNTGKSEAVKILLKLGVEVNRQSIEKVKLFLSQNSVCLYCGDSISLTDLFYEDRVKIDHFIPRSTIWIDSQKNKLLSHSCCADKKNSIPFLDFLNSPTLWADFQERVPFSRAGTKYQWLTNKDLLLEALSNPQWKDIYLRDTRTSAASIKEYLEHYLSPRSLNPSSQSLGTTVSVISHNAVSEIKTLWGLDRTISPVNTQRLTSEFSNFQPALDSFPIALFSAFAQASLQNLFLLKEKPSSRIVLKGSPLNSNLVPLHEHLRSASLLYESGEKLVVSHKKKKLNTRGFRSGNRKVFLSTPTKEYPEPLLIEREVIKIDTSLLFISVGGFDKPLKDKDVLKRVSIIQLKLDPIKQKKLIPAIRVYALGLLRLRRRLVEVESEIAKTLKESGKSIPLSLKKDSLMKKIDTLLCSFPVRGGKQQIVRTVRVFPSKIKKTRADSIVFQSSSRRGIVRLTPESFSDAKHSGFPFLIKANANTLCVELHPSPSSYPFQVIGLKFFSAISNPAVGVKFHDKYSNIFNGTSPSMVLYKNDVIKVNDLRNNSTEYYVFNGGGKIGETANALTVRNINYSVFGIPKPKGTVSFTQERRITLSKNVSVSKVKIDLLGSITEP

SEQ ID NO: 9814 - protein, 917 aa, unidentified
  REGION 1..917: note = Description of Unknown: Cas Enzyme sequence
MSKKILSLDLGITSIGYSILEEIKNDKYSLLDYGVSMFDKATDKDGNSKKLLHSASTSSSNLYDLRKKRKQNLALLFEEFKLSSKSLLIKQEKDNIYINKWELRAKNSFERKLEVGELFSIFYAFAKHRGYKSLDSGDLLEELCEKLGIELEHSSKSVKDDDEKGKIKTALKTIENLRLEYPQKTVAQIIYEVELQKQNPTFRNHDNYNYMIRREYINDEIKKIILEQRKFGFFSDDFDVEEFSKRVIKTIDDQKDSTNDMSLFGFCEYYKDKEQKVAHQYSLLSDIFKMYESVSNISFNAKPTIKITPNQIKKIADNFFAKIQKGKNIADIKYKDIRKILNLSDDLKIFNKADSYSNRGKKQENTITKFHFVNSLSKINNQFIIDIFEKKNKYELLKEVFDVLAYEKAPHAIYEKLKDKIKDDKTIIDLIKYKSGNSLNVSHYAMIQFIPYFEQGLTTDEIKKKLGLDRKEDYSTFKKGIKYLNIKRFEEDDDLKINNHPVKYVVSATLRVIKHLHSVHGVFDEIRVESTRELSQNEQTKKDIEKANRAFEKELDAITEDVEYQKIAEQYGKNLRKYARKILMYKEQEGRDVYSGEGIELKDIFTNSVDLDHIVPQSLGGLSVKHNFVLVHRDTNAQKSNQLPLNFVKDRQAFINRVEYLFEHHKINWKKKKNLLATTLEETFVDTFESKPLRATSYIEALTAQVLKRYYPFPNEKKQSDGSAVRHIQGRATSNIRKLLGVKMKVRDTNIHHAIDAILIGFTNHSWLQKLSNAFRENMGVIDDEARANIKKEIPIIELIVNDEVEYLEPKELCQRIEESYNEFGENSVFYKDVWGKVKVVNFWVSKKPMVSKIHKDTIYSKKKDGVFTVRESIINKFIQLKTTPTTSSQKFIENFEKNILKKMYLFKTNPKDVTCK

SEQ ID NO: 9815 - protein, 943 aa, unidentified
  REGION 1..943: note = Description of Unknown: Cas Enzyme sequence
IFTIAEHPKDGKSLALPRREARSARRTTARKAQKLRAIKRLLIQNKILTQNELDNLFIGKEAQKKDVWDLRREALYREVDNKELSRIMVHLTKHRGYSSNRKSEEPTDSEGKAVLSGIGHNKTILETSKYLTVGEYISTKDKKRNGKDSEGKLNYENSVSREMLQNEIEIIFVKQKKYGSTLVNDELLNKYKEIAFTQLPLKSVAGMVANCPFEESEKRASKSSYSSEYFRALQKLKNLRVVNEDGFGMPLIFEQIAQIIHKAKETKTFTYKSFKKLFPQYKGMQIKGLVYNDHKTGEVKDPEGVKFLDFSAFQKIQKAVQKADNLYWQEIENNYEVLDAIAKVLTTEKDDKESIKQLKETIHNEKVVEALVAVSFSGFGHLSNKALRKIIPFLEEGEDYDKACEKAGYDFKAIFKGKKNLLLPPLSEQENLEMTNPVVKRAVAQMRLVYNAIARKYGAIDSVHVEFTRDIKKSHDDRRKIEKSQGEFRDNKEEARAHATEILGHEPSSKELLKFRLWKEQNGECVYSGKEINPLTLQDPYATEIDHILPYSRSLDDSLNNKVLCLTKENQDKGSKIPYEYMSQEKFDEFEQRVKGYRNIKQAKKSRLLKTNFDESSELAFKDRNKNDTSYISKFLKNYMEAHIAFKESKDKRHIFTMNGMLTTQLRYKWGVGDKNRDNHLHHAEDAIILAFSTQSMVQKISAVSAQREGFIYKAKEEKAKSLRFIAPMEDFGKRVKESLSEIFVSHMPRRKVSGAAHKATVYSGKTLSMKKENGKVDVLKGGSVSNNVKLKHGIALNDGMPRVELFQNKKTKKYYLVPIYVSDFVKDKLPNKAIVAGNKPWIEMDDEYEFLFSFYKRDLIEIKSKKTAKKESIQLLGYYDSTHSGTAKLIIKSHDAKEELGIGAQSLVFIKKYQVDPLGNYVEVKSEKRQGSIKEGRQKRKK

SEQ ID NO: 9816 - protein, 1441 aa, unidentified
  REGION 1..1441: note = Description of Unknown: Cas Enzyme sequence
MKKILGLDLGTNSIGWAVVNEAETTDEKSSIVKLGVRVNPLTVDELTNFEKGKSITTNADRTSKRSARRNLQRYKLRRKHLVEILLENKFVTDETILSENGNKTTFETYRLRAKAATEEISLQEFARVLLMINKKRGYKSSRKAKSTDEGQLIDGMEIAKKLYEENLTPGQLSLDLLKRGKKHLPDFYRSDLQAEFDKIWSVQKQFYVFLTDDLKTALKGKNEKATWAICQKPFNIVGIKRKTKGLEEKIENYQWRVNALLGQIGVEELAVVLQKLNGQINSASGYLGDISDRSKELYFNKMTVGQYQMAQLDKNPNYSLKNQVFYRQDYLKEFEVIWETQAKFHKKLTPELKRLIRDGGISPVSKIHRCGIFFQRPLKSQKGLISFCEFENKQIEVEVEGKKKIKTIGCRVCPKSSPLFQEFKIWQILNNVLVTDLKEKEMRPLFQEEKELLFEELNYKEKLSKAEVLKILFDKPKDFDLNYKSLDGNTTQADLFKLYQDIIIRSGHNIDDFSKDSSKEILKKVREIFNALGINTAILEFDSTLEGEELEKQPMYQLWHLLYSFEGDKSNLGNEKLIEKLQHSYGFDKEYAIMLAGVVFKQDYGSLSTKAIRKILPHLKDGNVYSVACEYAGYKHSKKSLTREELDAKKLKDKLELLPRNSLRNPVVEKILNQMVNVVNGIIDTYGKPDEIRIELARELKKSAKEREELTDVINKTTKLHEDYVKKLQEEFGLSHVSRNDIIRYKLYLELETNGFKTLYSDTYIPKEELFSKRFDIEHIIPQAKLFDDSFSNKTLEARSVNLKKGNMTAYDFVESEYGDVSLNDYKQRIEKMKSKISKTKYDKLLMPEDKIPSGFINRDLRDTQYIAKKAREMLEDIVKFVVPTTGSVTDRLREDWQLIDIMQELNWDKYDALGLTEIIEKEDYEGHKYKIRRINGWTKRNDHRHHAMDALTIAFTKRSFIQYLNNLNSRIQKSIEEKVYLDRVELSDLNKKERVSVMYAIEQKELYRNSKGKLRFNPPMPLDEFRAEAKLALENVLISQKTKNKVVTKNINKAKNKSVTAITIQDGEQKIIKGQMTKTPRGQLHLETVYGSLKRYITKEEKVNASFDVKKIQMVANKGYREALLVRLCEFGGDAKKAFTGKNSLEKNPIWMNEQHSDKVPEKVKIVGFETIYTIRKAVDPDLNVAKVVDVKIKKILEDRLKEFKNDPKKAFVNLDENPIWLNKEKGIAIKRVTIKGVNNAIPLHSKRDKNGNLILDENGNKQPVDFVNTGNNHHVAIFKKPQLDKNGSPIIDENGNPKYDLDEVVVTFYEATNRANKGLPIIDKEHNKSEGWEFLFTMKQNEYFVFPCYDATGNMIFNPLDYDEEWFKNPDNYALISPNLFRMQKFSSHDYWFRHHLETVVTNDIKDLTYKRLMSLPFVTTIVKVRVDHIGQIISIGEY

SEQ ID NO: 9817 - protein, 1132 aa, unidentified
  REGION 1..1132: note = Description of Unknown: Cas Enzyme sequence
MGKKILALDLGITSLGFKAVQEAGENSYRVIDHGVIMRDAPFDVKSGESSQKQRSTQKGQRDLNEKRKRRIKKVAHIFESFDISDFETCMQVQKENRFVDKWRMRAEDALSRKLSAEELFAIMAHMAAHRGYKSIATDDLLYELELELGLIEKSTEEKEAKDEKRQVYAALNRVEQLKKKYPSETIAQVIQRAVEEGLLSSFRNHDNYEKMIRREDIEDEIATIIQTQYEFGLFDDEEKKDHFIEALHEAITDQTMPENDPALFGKCSFYTDEIAAPKYSYLYDMYRLYKTLGDLSIDNYQVTQEDREAIVAYVEEKIKSAKNIDKITYKEVRKILSLPNESKIFSREDEQVIKGKKSQRAFVKFFFLPKIKNFPHTMKSVVAHPDSLKLFAQLAEIIQQEKTPKPSFERISSLLKSHGIEVHDKEILALIKGYTPGTLSMSHRYIQDALPHFSEGKNEVEIKELLGINTSEDYSHFPKSLKHLHLGKDNLFEKQPQNSINNHAVKSLASWTLKRIADLSWKHGLFDEIIIESARDALPETIKKEIEKGMREKEKELDKIVEAYKKEFPSVNRKMARKIRLLESQKFMDLYTGDVINISNLFEGRADIEHIVPRSLGGLSADYNLIIAHRDANMQKSNRLPMDWLGGNSEYVNRVEGLFAEHLINWKKRKNLLATSMDEIFNEVKDSKALRATSYLEALVAENLKMFYPFKEEKARKFGHEVRNVPGKTTSKARQILGIKSKSRDTNWHHAEDAMILATLSRGWQNRLHRMLKENYGKSETELQEIWQKFTPHLECMSIAEYVKEAYERFMSLGEESLWYKDMFGARRSISYWVNRKPLSASSHKDTIYSGRHEVPTLRKSIIAAFDALNLITNRNKLNSESFMKLYEKEIRSKLWYVHNANTNDPVMRAIDERAKQIAKLIDSYILKDPQHNKEIDEQYKTELSDLVNKSIDVDGKVVRKVRFVYEKLNAVQINRGLVETDKNMLGIFIQKGEKKLMISRMDVNNAHELEQNKNGLRVYLNEIIYLYNDKKLLHYGCLRSFVEGNGKIALFNPRFPANPSSQPKFFSTKNEKTTGQIKQIGVGSATGIIKVQLDLNGQMKSYQKFGTIPKELEMQFLKESGYGSMEDDTHH

SEQ ID NO: 9818 - protein, 1128 aa, unidentified
  REGION 1..1128: note = Description of Unknown: Cas Enzyme sequence
MSKILAIDLGTTSFGYAVLHDIDGSRYVCLDNTVVMRDKPYNEKGESPQGSRAVQRSLRRLIEKRKKRIRCVAKTFEFFGILEHKKALELNDPARNPIKDRWELRAVVAWERPLSPEEFFAVFAHMAKHRGYKSIATDDLLYELESELGLIEVSEQEKAVDDERRQVYQALERLERLKQEYRTETVAQTIHRAVSEGKLRSYRNHDDYEKMIRREDIEDEIEKIVLEQSKRGSLDLSENEVGEFIDALKECITDQKMPTIDESVFGHCTFYREEKAAPKYSYLYDLYRLYKKLADLKIENYDVTPEDRTKIVKWVEEKVGKGRNLKRITYGDVRKILGLGNGQKIFGVDDDRIVKGKKVPRVFVPFFFLAELSRFKQLFSAIARHPSNRVIFRELSEILQFSKTPKESFEALNAMLKRESIEADSKEIVELFKNKKSGTLTLSHRYILEALPLFLEGMDEKEIQRHLGFSESEDYSQFPKSLKYLHLGEGNLFEAEGNVINNHAVKSLASWALGLIADLSWRYGPFDTIVVESAREVLPEKVRKEIEKAMKEREKRVDVIIEQYRSEFPTIDRRLARKIELWQQQKEMDVYSGEVIGLTQLLDGSADIEHIVPRSLGGLSSGYNTIVALKHTNADKGNRLPGDWLAGDEAYRNRVEMLFAKGLIDWKKRKNLLAENLDEIYTETFDSKGLRATSYLEALVAQILKRFYPFPDEAHRKNGAAVRLIPGRVTSRIRSLLKIKSKSRDTNFHHAEDALILATISRGWQNRLHRMLRDNYGKSEEELAQVWEKYTPHIEGVSIADYIAESFERFMSKGEESLFYRDMLGGLRTVSYWVDRKPLSASSHKETVFSSRHNVVTLRKNILGVFLALDVVKNRHKLDGDTFMELYNKEIRRKLWLYRERNFNDESYRAVERRAAQIAETIDRYRQRNVRADKEADIEYQEALRILLQTPLSAAGKTIRRMRFVYEKLNPHRIDRGLVETDKNMLGIVIRRRENGKLSIVKIDVNNAGKMLTVSEGMIVYLNEMLYLFGERGLLHYGCLRSYVDNRRNIALFNPRFPANPKAQPKKFSTGSQIKQVGVGSAVGVIKPRIDLDGSVKSFQVFGEVTTEQVTWFKKETGYGGVENDTHL

SEQ ID NO: 9819 - protein, 1063 aa, unidentified
  REGION 1..1063: note = Description of Unknown: Cas Enzyme sequence
DFQREDFGEYFGKFENEKELIKEIDTILDLLPEKKYKEFKNFLLNIKKQVQTGAKHRKVYLKEIEKEIQTYNFIDNKDEFFNLIGNISNFQLRLLRKYFNQKQDNIYNDEKLTKLLKKYFKRFKNKDFAKLSNLNSALEFLQSTSPALTIPPQEEMDNRDPYRCNSMLIKEEIANDLKNAIKKLIREFDFLDDEIPLNMKLQRIMDLSSKVYKNNPRTVFKHQKGDIGFYKKLLGENFEKFSRFAKKYYSQEEKIINGIYDENFVFRKCNTHTPKKKNIRELLLKPIYSVEFTQEETDTFTDKIKQTKIKGNKRLYSFLNDIATLYKTHQNSFWEIIKTDDKDVKKIKDLMPLAIQAFDTIMKEMNKKSIFENIDENRFLNIALQTYNILFKDVKGFSKTCKHCSIENAKRSDENNPFAKRLLSDVSKPIDGILDFILDRIAFELTELVPVEDIDELRIVLEQNRFNFEESLSEIKGKKKKIKEFKEHKYCPYTGEEIKNGDYDHILPRSKELYNSKANLIYCSRKGNEEKGNKYYFLENLSKKHLKEIFKTEDLSIVKEFISKHIAEIDENRYTNFNNLPYEQKIAFRYALFMEHSTPEFKKAKRLLKQDKIKLISNGTQKRFARLIYEKLKQKRKINPEKVTVKLVDSKIISDVRLELSINPQTGEIIHEEIEKQEFQKPLSHAIDAMTALHIVGEYDFWDIYSPKTIIKNIEKRQTFINAKKIDSFQLFKDSIMSADFTDFDDKEIEVLKEFGLWENGIKKEKYFKLLFDLFENRNTNALKKLKFMDKHLFFTIRKDIKDVFFKQKSGKITELIYPDKKTIPPKREKIYKAIYNHLKDHEKDLFKDGVFNEENYKEVMQKLFKPTGKKRGKKRHVFSVPVKAQAKYIVMNNSTYRFLSNENIATKHYLINGKIVDIPYFSKNTLPKDIKEIIKLLNYMDLSKPVYEVEIKTNEISDYVETLKYYFTEKSRIRVIGKFIKSAFDVDFSKVDTFTSDDDEFKKFIDKIENDEILRKYLGPFRDNGGKKALLLDEDEKTITLKYVAEGIGAKKDIALKYGNIK

SEQ ID NO: 9820 - protein, 1008 aa, unidentified
  REGION 1..1008: note = Description of Unknown: Cas Enzyme sequence
MKIVGIDIGIASIGWAVVKYDEKNSKNSQIIKSGVRIFTQAENPKDGKSLALPRREARSQRRNIKRKRQRLNKIKKLFLKFLNLSNDDLFGENTIYHDKKKKDVWQLRDKALKRVLSDKEFARVLTHIAKRRGYKSLSKVEESSEKDNKKVLTAIKQNKELLKNKNYQTIGQMIYQESKLNKTYKRRNREGDFSNSIERGLLADEVKTIFKTQRELGNEKATKDFEQLFMDIAFFQRDLKSVDEMGKCIFEKNEKRAPKRSVSAEEFVTLTLIINNLSLIDENLSERFLTSDEIKKVLELCKLKETVKYKDIRKALELSEKIYFKNLDYIDKKSGEWDLTKAENIKFDHKFEGFHKLRKAITKVTSKTTWYNLSQEKELLNQVATILTIHKSDEKKQKELKEAFSKTALNKDELERIIDALISKVSFKEFIHLSIKAIENILPYMLEGSKYNFACEKAGYDFKIQSEEKYKLLPPLSKDENKSLTNPVVKRAFAEFRKVLNAIIREYGAIDQLNIEFARDIKRSFKDRKKIEKAQEEYRLLKKKLKERFIEKFDYEPTGKELLKYRLWEEQNGRCVYSGKPIQIQRLTEQGYTEIDHILPFSRSLDDSLNNKVLVMTKENQNKKNRTPYEYIIQDKNEEFWHIYTENIKGLKNIKKAKRDRLLKINFDENSQNYFKDRNKNDTAFIAKFIKNYVENKLEFAQNSKTQKVFTRNGQLTSLLRHMWGIGEKDRNTHLHHAEDAVILAFSTQSEVQKLSTISAKRENFIYETPKDKAKKVHFEAPYESFRKDLKKSIDEIFVSFAPRRKVTGAAHEETIYSNKTFVAKTPSGKLEELKGNSKTHHVKLERGIAKNGDMPRVDIFRHKKTGKFYAVPIYVADFVKDKLPSKAIVAGKNKDGTPKDWLEMDENYQFVYSVYKNDLLEICVKRRGEKEYQTILGYFVSIHSATGNVTLKSHNNKEDHIFKYDKDLSSVVIGIQKAKYIKKYQVSPLGKKTLVKKEKRVGTKRSL

SEQ ID NO: 9821 - protein, 1234 aa, unidentified
  REGION 1..1234: note = Description of Unknown: Cas Enzyme sequence
MSKLSISIDMGAKNNGVFIVKTNNDKIISKKATNIIVEKGSINFSKKSRRENRHKDRNYKRRKQSKRLLWEILESKKYNNAQVEHINGLLNNRGYTFLSVENEFEVLQDRTIEFIDNYFEDLKGLKSKENFEKKFDNFINDEELINFIDNTVNNITQLIEQLKIFEKIEDIRKDFKSIKEKNYNKKFKQSSYLTKIFDKYEIYYSFENEDKTITKIKLSKIKSEELVPTITKYNIDLSKIDFNKEEQILKDINELFNSFKIDIDNKYTQDVQKPNQKDIKDNFKKILELIKNDLTSHKEKPNLIDFLLNIKKEIQTGSKPRKQYLKEIKEEIEKLYFIDDKDKFYNLIGNISNLQLRVLRKFFNLHSSHKAQFNILKKYFISHHYKSDDEKQRRKNLFKILNQHNILEEFLYSCNPLLTIPPYEDMNNRDTYRCNSLLINPEYITDSLKKSIDILYGSQEFEVLHLDNLKYPQELQRILDISYKMIDKQIHPREVFKKDKGDIGFYQKLLKENFKEFSNFAKEYYILEQKAINGIFENGFLMMCNKNTPSKNNFKHILLKPLYEYDFTKEEVEKFNKKIKGLQSHIKRVSEVAKDYQNSFYHYIEACWDNQKCSNDKRIKDIVKNIDNDLKSFQNIFNELDIKTYLNKIEKIDKDNLKRVINIFKQTYEILFKDINGFSKTCKTCTIENNYRSSGDEAIAKRLLSDVAKPIDGMLDFMLDKIAFEIVEQIDSIEDEVEIILEQNRFSFEENLALIKGKKPKKREAKDILNLNICPYSGENINDTNGEYDHILPQSEEPLNSKANLIYCSSEGNKNIKKDIKKFPLEKVSKKHLKEIFKTDSLDEIKNIIQDGIKEIDIDKFTNFKNLYLKEQIALRYALFCDKNSNEFKKAKEIIKNDKLKTITNGTQKRLARLIYQKLSVKFDKKFDCNVKVIDNLLISATRKDLSYDKTTGEINELWKDKNQDSHSHCIDAMVAFYLANSYIKGGYHQKRDNLASIEPDFEFGDIYIRKQNSSEIKTRTKQWYDTTNPKYNIASKRLFDQNDIGVGYIQLEEMQTTNEKGKIEYSYKKGIVKDSFIKSNFTKKNFDYFIQDNILQKIEVNRNKTKEILYQVNKNKLYEILFDKKEEVLSNISHYKKLTKELQYTYTKVDPFDFLGKFLEPKTSDDKKAVNKIINKSLTALDDITFNNLMAWFSRSNKLDKNGAKLGYYKSWEIFTKTLIDNKNKLFKIIEKE

SEQ ID NO: 9822 - protein, 972 aa, unidentified
  REGION 1..972: note = Description of Unknown: Cas Enzyme sequence
MSKTVLGLDLGITSIGWALVDVDEKNIQNNKIIDCGVRIFTAAEHPKDGKSLALPRREARSARRTTKRKAQKLRAIKRLLLSYEIITQEELDHLFIGNKKQIDIWQLRRDGLYRKLSNKELSRIMIHIAKHRGYSSNRKSEEPSDSEGKAVLFGIGKNQEILATKSYQTIGEYISTKKKKRNGKGSDGKLNYENSISRSMLIDEIELLFAKQQEFGNRFVSNELLQKYKEIAFTQRALKSVEDMVANCPFERDEKRAPKSSYTFEKFRALQKLKNLRFIDENKDEKALNIDEIDQIISQAKKTKKFRYKSLKKLLPQYKNMQIKGLLYYDHKTGELKDPEGVKLLDFSAYQKIQQNIQNINHLYWGRIENNEDILNDIANVLTLQKDDKESLNHLKAFIDDENVCNELLALSFSGFAHLSNKALKKIIPHLEAGKDYDKACEDAGYDFQAIFKGEKTLLLPPLSKQENLEMTNPVVKRAMAQMRLVYNAIARKYGAVDAIHIEFTRDIKKSHKDRKKIQKAQEDFQKLKEEAREHAKEILGKEPSAKELLKFRLWEEQKGECIYSGKYINPQTLCDPFATEIDHILPYSRSLDDSLNNKVLCYTKENQNKGNKTPYEYMSEDEFYKFEQRVNGYVNLKQAKKSRLLKKNFDTSSENAFKERNKNDTSYIAKFIKNYMEAHIAFKESKMKRHIFTMNGMLTTQLRYKWGVGDKNRDTHLHHAEDALILAFSTQSMVKKLSDISTQREKFIYKTKEEKAKLLRFETPMENFGEKVRESVSNIFVSHMPRRKVKGAAHKETIYSLKVKSKGVIPINGGLAENGEVKRIDIFVKDGKYHFIYLYPIDFIQPQIKDVTIKGKVIDDSYHFKFSVYKNDLIKLIFKEKSVFGYLSFAESDGRFNIAAHNQVVLDKKLNRHSTGSVIEIKKYQVDPLGNYVEVKSEKRQGSIKTDWDKKLKKRAIHRRKQKAKKNISEV

SEQ ID NO: 9823 - protein, 1372 aa, unidentified
  REGION 1..1372: note = Description of Unknown: Cas Enzyme sequence
MKLSICVDMGAKNNGVFIAKTDGKDIVDKKAFTVVIDKKSINFSKKSRRENRHRVRNDDRHDLARKLFLEVVNINDIIVKEKKNQWNENQVIGLLKNRGFDRFEGAFEELHKLTQELLKNYTSLSNQDIVNIQNSEKLINFINSFGIDKKKQLEEKLSLFITEIENIYTNLKIYKNKNNILSDIQAIRDEKFSKFSTNTEEYFKNLLNKYNISYKTKRGELKKQLSNQELDLSKVDFDLEIENINKLDLDDKFIENFEIIETDFKFNEKDKENDISLLGTLKYTLEGIKSGAKPRVMYLQEIKQIIDKFDFLQNIDKKELFNVVGNISNLQLRVLRKYFNGKNNNKFDDKKLSIVLYRYFLSRHYNKGNEKRSEKELFKVLKEYIQPKKDKNFLEKDRKHYNYYSDDGLYKAKKFLKNCNPELTIPPYEDMNNRGTYKCNSLLINPNAINDNLKEAINILEKNEKFKKLNIENIKEYNKKLQRILDISSRIIQEDYYPRAIFSKEKTNKTFYQNLLGSYFDEFNKFATKYYKLEEKAINGIFDKEDKNNIFIKCNKNTPARNNIKDTLINNIWNTNFTKDEVDILKETIKNQKIKDKKLTTVLENISDTAKKYQNSFFKDINEAYHLKSKDKRKYINETPKDLKYILDLSDDILELFKDTLKEQKSCFINNDFDIAKEKTTKKGITLYPNLKRFINSLRQTYDILFVDIHGHNKTCINCTIENNIRSNEDEPTAKRLLSDVAKPINGKLDMMLDRVAWEVVKQINSLDEINNIEILLEQNKFNFEENLKVIGIRKKAPKDEELEYDICPYTGKKITNIEYDHIISQSSSRNQNKQIYNSEANLILCSKEGNQEKGDKDYNFDNLKESHLKVVFGKSNKEEIKQDIRDTWQNSEGLKKQNYINFKNLSFKEKLAFRYALFMIGEEVYNKALELLQTEQKTITNGTQKRFAKLIFEKLQKKFKKQIDCDVKVTDNKLVSATRLELAEYYLKYDKTTGEIIDDKNITKQTYQNDFSHIVDAMVVYYLSNNLNMNDFVNLIDGVDKEKSKIEVKTNQWHETINPKYNIASKRLFDQNDIGVGYIQLKEIKTTNEKGKNLYIYQKGIVKNSFVDSKFTKKNFDYFMQNGILEKIEVKRNKQIEILYQVNKNKLYGMLFNDKVEVLNNYSHYVKLTKELQYTYTKTDPFDFLDKFLEPKTIDDKNAVKKIIKKDIPTLDNITFDNLMTWFSRSNKLDKNGAKLGYYKSWEIFTDTLIKNKDTLFKEVEKEREDKKTKEKIKYTVVTIDKDKALEECKKTIFKQVIPKKRKVKKSYTLYTASKNDTQYIHRRKDNKGNYIYQTRIAHRQYKEKHFFKSKLFVLRNIIPLKMDNYKKAFQ

SEQ ID NO: 9824 - protein, 1190 aa, unidentified
  REGION 1..1190: note = Description of Unknown: Cas Enzyme sequence
MAKKLGIDLGSSSLGWFLRENDEIIANGVITFDTGMKKDQGGYTSPTKDRRLARSKRRLIQARKYRKIELLKILVENGLVPLSKDELDKWYKYRKGNQRIFPETEKFKKWLACDFTYIENEKKYKNPYELRATALDNKVHKYELGRALYHIVQRRGYKDIGEKDKETKKQIERREESGFKTALEAHKYLSKALKEEFIDKGKRARNQYPYRLEYEQELIKICETQGFDISKNEQKEFNDEFVKKVWKSIIWQRPLRSQKGNIGKCSLEPAKFRCPASHPIFEIYRTWSYINTIKTVEYLDEKHTEKHDIPLEFKKDLFKKVFLIKSINFKFETIQKHLDKLFKVKKEYNYLNKSTGKYDSSVSGMPVCKGLINIFGEKIKEELEQLHTYDIGTKEHAVVGKYSVYDIWYLIFDTDDEHLEDFAIHKLGVKNVIKKDNNGNEYSENPVVKLKNSAFSTSYADLSVHAMKKIIPFLKDGFLYNQAVLMAKIPDLSPDWQKNKELIYEIIKHISEKYADNKAMVNIANNLIDKYKSLTDIDKFAHKNFNYKLDERDYKDIEKACISYFGKITWNEKDNKQKIINQVAAYYQSFFADTERKYIEVPTLSSLLKQKFEENNLKIDIDKLYHHSHKKNIYPKPVYSRKYDKEILAVPLIDSIKNPMFNKSMSILRRLINELIVKEYVDEYHDENRKSNTEIIIEIARELNDNNKRIAIERYQRERRDNREKYRQFVKELKGENLKNENEVISKFELWAEQVFVQPNDAKNINKNVEILKEKNAIKRYELWSEQKGQCMYTGKMINISQLFTPEIEIEHTIPRSLLPDNTMANLTVCYSRYNSDVKNNNMPTACPNYEVDTKDGTAIKPRLKAWEEIRDRYKKQYEDRKKPKGIEDENAKNKRIQEKHYYKMHYDYWKDKVHRFTTEEIKDNWVRRQLTDTQMVSKYAREFLKTYFKKISVQKGSVTADFRKIFGFQSENEIKSRNKHTHHSIDAAVLTLIPTNSSKRVAMLQKMYKLNERKGKQFRANPDGFTDFNAQDLINLIDNNTLIVNYKKDKITEQTYKTVRNRGKIKYLKRNGQYVLDEKGNKIPLVAKGTTIRGKLFQETFIGKIKNVEKDENNKPIRNNNGTWKFVTGKQALINVKREKIEKLNIEDIIDPDIKRIIKLQLKEGKSRNELKDHQGKIIRHVRVKTKAG

SEQ ID NO: 9825 - protein, 905 aa, unidentified
  REGION 1..905: note = Description of Unknown: Cas Enzyme sequence
KAQKKFGFFDSIDFENFEKEITEIIIHQNSVELNEENINNCLIYKEEKVAPIYSYSFDVFNLYKLINNLKVDGLDISKEQKEIILDFVFSNIKNLKNTPNLSVKKIKEILKIEDKKTKINNTSECKIIKGKEKENTLIKFNFISNFSKFDKEILRVIFKHNQHEDVLDKLAYLLHVKINPQDLIESITTALKEYKIDFEDKKIQDFTISLHRHKKSGTSSYSFRALRDLTALMKDGKDESEAKKILGVDNREKYSKFKKGIKYLKPIDKKGTLQYELDENRISNHVVKSLVSWYGRVIVDLDNKFGRFDTIKVESTKELSLGDKTKKQIENAQKRNEKEWSDLKEGYKEYLEDKNIVIQNKNEYILKLKLWKEQQKVGIYTHKSMGEEDVLSARTQIEHIVPRSCGGANAYYNKALDFANENIKKGNRLPLDYLTGEQREVYIEFIKELKDDGKINFKKFKNLLAEDLKDSFRDVNDEVSLHATSYAEKLMGEILKRYYPFVDEKKRENGIGVMNIQGRATTYLRNILSIKSKSRDTNFHHVEDALLLALMSKSYLQNISTNFEQNYKLTKEKAKENFKKIVPLIDGANPNEVIAHIKKLYDEDIEQNPFYKTTNGTLKTPYFWVDKKPIGTKAHNETIQSKKDYSYYVPLHSLLEKVKPNYKMSPDEFIKKYNQEVLEKVKVYKTNPKDFLSQIFLKKREKIVSILIKANFATSEDEQKKYNDLLRDEMKEPIYDVNGNIIRRVKRVGEEANIPIRGGVAYTSKSLICVKFSYIDSNILDIQRVDLRNYKKEDNTKQINIFNNDLIEIFVIKSKKTILKTMGIVKGFSKNKKDYSYINIRNPKYPLLKEKQPKQYFNQILISSTCGIKKYKTDASGIVLGYYFIGRVLENEKGLFSKVVTYRKI

SEQ ID NO: 9826 - protein, 992 aa, unidentified
  REGION 1..992: note = Description of Unknown: Cas Enzyme sequence
MKKILSLDLGTTSIGYSVITEEETQKYSLLDYGVSMFDKPTDKDGNSKKLLHSQAISAKKLHKLRKERKKNLATLFEKYKLAFASKLLEQEKKNIFIHKWQLRAKKVFEEKLSIEEIFTIFYHIAKHRGYKSLDSGDLLEELCDVLGIVIAQKKEKKDDEKGKIKQALNTIESLRQKYPDKTVAQIIYEVELQKEQPIFRNHDNYNYMIRREHINDEIATIIRKQKEFGNFENMDSEAFIADIIAVIDDQKESTNDMSLFGKCEYYPKEYVAHQYSLLSDIFKMYQAVANITFNKEKIKITKEQIGRVAEDFLNKIKKGKSVKELKYKDVRKALNLDDSIKIFNKEDSYQRAGKKVENTITKFHFVDTLSKIDKSFIEDIFSADESYVLMREIFDVIHKEKSPKRIYEQLKDKVSSEAVIIDLIRYKKGSSLNISSYAMMKFLPYFEEGMTLDAIKEKLNLNRKEDYSAYKKGIKYLHISTYEKDDSLEINNHPVKYVVSAALRVVKHLHTKHGAFDEIKVESTRELSLNDKVKKEIEKANKEREKEIEKIVSDKEYQTIAQDYGKNIHKYARKILMWEAQERFDIYSGQSIGLDDIFSNRVDIDHIVPQSLGGLYVQHNLVLVHRDENLQKSNQLPMNYIEDKEAYVNRIEHLFSEHKINWKKRKNLLAMNLDEIYKDTFESKDLRATSYIEALTANILKRYYPFTDEKKSVDGSAVRHVQGRATSNIRKVLDVKTKSRESNIHHAVDALLIGVTNHSWLQKLSNTFRENFGKIDDKVRQNIKKSLPYIDGAEVKDIVKEIEQNYNSLGEDSIFYKDIWGRVKTVSFWVSKKPMSSKAHKDTIYADKGDGIFTVRESIIAKFINLKITPTTSPEDFMKKFHKEILEKMYLYKTNPNDVICKIVEQRAEEIKELLWSFEFLDAKNREEMQEAKAKLESLVHRELFDNNGNVIRKVKFYQTNLTGFEVRGGLATKEKTFIGFKASKKDEKLEY

SEQ ID NO: 9827 - protein, 1020 aa, unidentified
  REGION 1..1020: note = Description of Unknown: Cas Enzyme sequence
QMTFKNDLKEVIKTTKLDEEGNEKEKTFKVVDIYPLTIESIEYKKEDGKHNFTLHFTNGWSEIKKLKNYTFKYKNIKGKTFDYIVETEYNENGDIKTIQGKERKFREPDFSDKSNDWTLLKKKTEKEALKFNVNKKYIDEKGNPKHYISPDIYETLKTDAVSKDHKRTKIIGGKFQVVDRKFYREELNDIINNQKKYHPKLEDQKLINDCIKLLYPNNGNHRKLLENKKAIEALLVDDILLYQRPLKSKKSEIANCKYEIKYWKTDVDKETGEILDEKPIYNKVVPASHPLFQEFRIWDKIHNLKLIEKEPKDSKLINVDVTKQFFKTPDDYQALFELFNSKKTVTQTAFLTHCKKVFRIKTKDFKWNFPEDEELKGNETRTSFVTRFKRCGFDNYDKFLTLEKEIALWHYLYSVSYNERTANNKKSLKKFFNNYFKDFNDITEVTIEKLVNDFANYPKFDSKYAAYSHKALSKLLPFMQMGNNRFKGTFTEDETKNNKWKKSINERIETILQKLKQIDFTAEKLDFSEVEEKGNLKENILPFPKGLFNVFKDFEKPEDFSALNLTQASYLVYGRHSELAQEKHWNSPQQIIDELHKELKHNSLNNPIAKKVLHEMMQVVAEIWKTYGEKEDEFTYKKLFDRIHVEVGRELKKSAKEKKNIFDKQKNNRKQNKRLRQILQEFLADNNYKANTKNNDHFERLKIAEESVLIRQNVDKKFFEDKTYTKKEIDDILKKETITKQEFDKYKLWIEQGYRSPYTGLMIKLTDLFDGNKYNIDHIFPQALISNDSLTNKVVCETEINKLKSNQTGRDFILNPKKRKVFCAAYNREVEILTEENYISLVKEQFAGQKREILLSKEIPSKFINSQLNTSRHIARKTVELLSHIVREKGEIEYRSKNVLPVTGMVTNKLKRVWKLDHVWKELVSPRFIRMNELTKSNLFGQWRISKNGEKYFDCQIDDIILEKMGEFDIKRIDHRHHALDALVVALCTEEHVNYLNNINANTKKNDYGKQKQLEKYRLT

SEQ ID NO: 9828 - protein, 925 aa, unidentified
  REGION 1..925: note = Description of Unknown: Cas Enzyme sequence
KFFDNAKRKRDDYKLLKDYFNFFHWSSDNEKKDKDLKEQKKQLFQWLSTYSSLEEFLKNCDPKLTIPPYEDMNNRGTYKCNSMLIKPSEIKEEIKQAIDELLETDEFKILTQEIDKNTGEFKYVGIIELKRKKYNKILKKFEEIDYTYSKYLQRILDIKLTDNNKFYHPRNVFKYGKIITKNQDNQKEVIDTRESFKRLFGDHIYNSLKDIATKYYKQEEQILNGIYDEKNSIFEICQTSTPYKDNIKEVLLKPIYSYEFSKDEAEKFYDEIKKIKKDLEKFNDEYKKHQNSFYSVIETCLNEDDKCLNDKDLENIITDLKENTTINKIKNILDNLNIQVPIFKDINTNRAINVIFQTYNILFKELKGFSKTCKYCSNENAIRSDEKNPIAKKLLSDVAKPIDGMLEMMLDKLSYEILQNIQAKDLKGIKTLEINLEQNRFEFEYNLQDIKGKLSEKEKDKFEKRASLNKLDINICPYTGDSFTQGDWDHILPQSKGIINSKANLIYVSTQGNRGKTNKKWTLEMIEKKAPLHLKKVFNTTNINKITDTINKYIKQIDIKKYTNFENLSLNQQKAFRYALFLDETNSAYKIAYELLQKDKLKTITNGTQKRLARLIYKKLTDKFDLKDNIEIKAKVIDSALVSATRRYLDEKYSNLTLKKRENQDSHSHCIDAMVVFHLANSKAQKITQNNIKEKISKREFYFDFDSFYLDESKINHLVPKQRFINAKDISSYKLFDDTIYSEHYKHIDKDYKNLDILIKYKLVYQNIKGKKHFILTKEDIQANKHILIDVSKTSNTLYTLFKERKKENLTELKFLDGLRYSTSRKEIDKIFFDEKQTKLLDFNKVKDIPPYSYNLYKAIYKKLKNTKDLFILNDDKSTLNTKVLNNLLESMFALPDKHRQVQENKHKRKRGKKRHKYTLPILGR

SEQ ID NO: 9829 - protein, 904 aa, unidentified
  REGION 1..904: note = Description of Unknown: Cas Enzyme sequence
LFGEEEMSKQETIFSFDIGWAFHGWGVKLPYGDIDTGVYAFEHYDDYEQYAEIRRGKNRAESKKRRLNQLKQMFVNAGLSSSKKEVTSKLKKASHQNRIWQNLQQAHSEKITPEEFMQILYRFAKRRHYIDMRKKEEATQDNATKKEEGEIKKSLSKMAEIYENLQPKENEVKTWFSALFKRREVLIKIFEKNAILVDRKKFPYTNASLKKIIGEEKYKKVDEKIIGYELLLKNEQIAESIEAIAKKQRDLGNNASIFAQSFIDEYKKLITYKGTQPSFADKIGLCLSGSGKKRHPQSSIDAEITRIKESYFHILIETDKEKNPLQDENGSDIEVSLSELGIDYDTYYSMVFELSKANKKGEVTTKKMIDVIKKQDKMLKDRYFVYKNFKHKQEHDKAIVLRLAGHRRLHELSDGFCEVFLQNDSLRDQVEFEMLCYRDPDVLKEKLKDIVSSHNTPYNEEDLELLAVSDVGKPAPCNNETYRKIQEWLEQGKNFQTALIEAFPNALVNLKHHYRRTLDYKLYLKKQKQQGINNPFQNKVIEEFIFVFNRIIQKYGEADRIVLETTRAILSDNEKKKIEDTIAKNEKLNRQINDILDEYATKQGKKPAKGSRERLKLFVQQGGELKFGGKNARCILTGNPISIDAAIEGDRTNTDHIIPQTWIHDNRLENKILMDRAVNQGDKEDKTPIQYLLSLGYTIKEAKDKLKENLKGMKLSKTKVRHIFEEREKEKIKKDAEDRIHNMDQRMKGIQDASIKLIMDLLVDQYCFNTKEKLSIAQYREKVLPVTGKMTSLFRRGWLTGYKKRRDQYYNHAVDALVMLNFDRAFLTQYVTLLKQAYIEDKNPIWIAKEKMVPTIDKFEEKVQSFIEEYKEQSRVVVRRPLKKYVGRVFQQMPKNADVDHAVK

SEQ ID NO: 9830 - protein, 1451 aa, unidentified
  REGION 1..1451: note = Description of Unknown: Cas Enzyme sequence
MKKILGLDLGTNSIGWALIDKENDKILGMGSRIIPMSQDQLGDFGKGNSISQTAERTNYRGIRRLRERNLLRRERLHRVLNLLGFLPQHFAEQIDFETRFGQIKEETEPKLAYKLIRNGENGVDKFDFIFKNSFEGMLNDFRKHQPHLLQNDRKIPYDWTIYYLRKKSLTQKIEKEELAWIILNFNQKRGYYQLRGEEEELENQKKQIEFHSLKIIEVRADEQKKGKIDIWYSLILENGWIYRRSSKTPLFDWKDKIRDFIVTTDLNDDGTIKTDKEGNEKRSFRAPGEDDWTLLKQKTESEIENTNKTVGTYIYDALLQNPKQKINGKLIRTIERKFYKEELKQILLKQKEFHSELRNEDLYDECIRELYKNNESHLFLLSKRDFVHLFLEDIIFYQRPLKSQKSSISNCSFEYKKYTVNGVEKTEYLKAIPKSHPLYQEFRLWQWIYNLRIHKKDDDSDVTAQFLDCERSYEDLFEFLNNRKEIEQKSLLKYFKLKDSTHRWNFVEDKKYPCNETRTFISTRLAKVESLPDKFLTNEIEAHLWHIIYSVTDKTQYEKALKTFAEKHKLNVCSFLENFIKFPPFKSEYGSYSAKAIKKLLPLMRTGKYWNENSIADEFKDRANSIFERLKLIDFNEEKIEDVADDEVPKQVLKSFLKKNDFIKRLQLYQASYIVYGRHSEASVTDKWGAVSDIENYLGEFKQHSLRNPIVEQVVTEILRVVKDIWAYYGKGVKDFFDEIHVELGREMKNTAEDRKKISDQVIKNENTNLRIKALLAELNNDPEIKNVRPYSPIHQEILKIFEDGVLSSDIEIPDDIIKIIKTAQPSSAELQRYKLWLEQKYRSPYTGEMIPLSKLFTTDYEIEHIIPQSRYFDDSFNNKVICESAVNKLKDNQIGLEFIKNHHGEIIQTGFGNSVKIFEITDYEDFVKTHYLKNRSKRNKLLMEDIPEKMIERQINDTRYISKFISSILSNVVRDDMNDYGVNSKNIIPCNGRITAILKQDWGLNDIWNDLILPRFERMNRLTNSNAFTAYNEKYQKYLPTVPIELSKNFQKKRIDHRHHALDALIIACATRDHINLLNNAFAKSNVRFDLNRKLRKFEKVAYKHPRTGVQIVKEVPTDFLKPWANFTVDAKNYLESVIISFKQNLRVINKTTNYYEKWVETNGTKTKKSVKQSTGDNWAIRKPLHKETVSGKVLLNRIKVPKGKILTATRKNIDTSFDLKNIMSITDTGIQKILINYLNSKENNPVLAFSPEGIEDMNTNILKYNDGKFHQPIYKVRIFEIGSKFPLGETKNKTSKYVEAAKGTNLFFAIYQNEDGKRSFETIPLNMVIERQKQGLSAIPDTDEKSNRLLFYLSPNDLVYLPSEDERDNNLPITFDNLTKEQITNIYKVVSFTGNRFYAIPFNAAKSIVDKIEFTQLNKLEFTLNKQSIKDICIPLKVDRLGNIRHTAK

SEQ ID NO: 9831 - protein, 1418 aa, unidentified
  REGION 1..1418: note = Description of Unknown: Cas Enzyme sequence
MKKILGLDLGTNSIGWALVNTKDNKIEGMGSRIIPMGTDKQDYEKGVGITKNATRREKRTTRKGNKRYKLRRNKLLFILNELGMLHDQFQFKNGIPEPTKLQDLELLPISKKTKQFDALGLLDLKVKALEKSIEFKEFGKILYQFNQLRGYSGGNNNEVVNKKKDEHEDVEKKRYEVIVQKVEILKVEQSEYTFTVRGGKNKGEKQYYFDITINYDGEEVEGQTELQNLKEKEGQEEELEIRITRKKDDNVTYKFALPQKSNWRKAMELSEKTLQEENLFISQLRLRDLKQNKWTKIRNRVFLRNRYKEEFDKVWEVQEKQYPILKDCPKETLKKITFYIFPGNSESQQSLRKTALEKGLKYIIKDQIIYYQRPLKPQTELISNCRFEKEEKVIPSSHPFFQEFRCWKQINNLFVTSKMLVGNKYIYQNRYLTSEEKKAIYEKLQSQKEVGFATVVEILNMDKSKGKLDKEQKDYYLNGLNVKAKLKGCDTLLSIKKEIDDYFNDFISQDEKLVEKLWSVIFDVNNHDGSEYDVESKRVSSIIAVLENLTDKQKAKELSLRLAQKIKFPRKYASLSEKAIQNILFLMHPNPLNIPNKIQQHFKNIQHLIETGEILDNFSYDLEEYVIDFVGKNPNVLEKGGLMESFAISLVYGRHTAETIKAQIKNYHDIKYEVRNLRNPVVEQLANETMQVIKAIWKQYKFNPEELEIRVELARDLKNSATERESIWKGQIKSKKNNDRIKERLAENNIHPTDENILKYRLYEQQKEMSPYTRNKIIPFSALFDKRLYDIDHIIPKSRYYDDSISNKVVCETNINEEKSNRTAWEYITGQHSPDIRSTEDFVKYVNDNFYGKKKKNLLAEKIPLNPVERQLKDTQYISVAIKNELAKIVGSDNVKTSTGEITDFLRSRWGLRKLFMELTESRFKQMELWVLDENGNPKTEWVTRTVIDDGEKKKNLYEIKNWSKRYDHRHHSIDALVVALTNQSHIQRLNNLNKYYQDELTSRKDEFKIELKEGEKVLEAFLNLEAKRRDEILRQIESSRYFEKPFDNLVEQARNQLETMIISHKPKDKLGIKTDHFDKNTPDKILKKQIKVRAGLHQETYYGKLKGRDTKRVELSLLSITKNKTTKQEEIIELIDKVLEKEIIEHKKQYGSIKEAFTGEGLKAFNDNRVVNAKQPTYKVKVWYNKEEKKESGLQRLYDKNDKQSVITGDNYLFLIMEKNGKRIFDIASLYDSVSIAKNALKENNNDFKNKIAEDFRIKYKDKPEKVLFTLQQNELVYLPTDNDDEVLRKSKTEFIEWISKVHNKKSFCKRVYKVVKFTGKDCFFIPHNFANSISVAKELSTKELDKLKETYGEKKIPKQEKNYEEFGSFGNCAKTEVNDDFIKELVLKKDFKGTSPIKIQDYCIKIQIDWIGNISI

SEQ ID NO: 9832 - protein, 1265 aa, unidentified
  REGION 1..1265: note = Description of Unknown: Cas Enzyme sequence
MKKVLGLDIGVASIGWAYIELCEDNKNNRIVGMGSRIIPLSTDENNEFTRGNEQTTNANRRMKRGARRHNQRYKMRKDQLNSALTKAGMQASASLFELDALALYGLRAKAVTEQITLEEIGRLFYMLNQKRGYKSNRKANNEEEQGAEKSQKKVVEQDSNDNKPLKVIKKGYLDLIADREAILAKNGITIGQFFFMALNEDKHFRVKENIFLRASYMNEFDAIWAKQKEFYPEILTNDLYEHIRNRIIYYQRRLKSQKALVSECQFEEHHKCSPKSSPLFQVFKLWQDINNIKIISFKAFKGLEPDPNFDKSRQRELSIDEKLLLYNKVAQREKISKKEALELFGYKAQYDHYGWNLKKDLEGNRTLSSLIKVFEKTGIENNDLLRFSLRVNSQKETAIDKETGEIIPALTIDPEFEKQPLYELWHLLYSVDDPIVLHNTLVNKYGLSEKQAKALAALDFHKAGYAGLSARAIRKILPYQQMGRIYDKACFMAGYNHSNSMTKSENEARELAEQLQILKKGSLRNPVVEKILNHTINLVNAILEHPEFGRPHEIRVELARELTQNAEQRERTFKRNNDSDKRHKEIEKRLREELGMSRVSKNDIERYKLWEEFGEMSPYHPTVNGSYSNPITLSNLYNGTYDVDHIIPRSRVFDDSFQNKVLCPRQTNIDKNQMTAFDFMLGQGAEAHQSYVELVTQHFKSGKITKAKFNRLMMAAKDIPEDFINRQLNETQYIAKEIKSILKDVCRDVFATSGSVTDYQRHHWGYDQINQKLNWDRYDAAALASVEVGENGQRIKRIEGWSKRDDHRHHAIDALVIASTRQSTIQRLNNLNQIVEAKSDLNKRDTLISSDLLGVKEYVESQCPFPESMVEAAVANILVSFKSGKRVAIVNKNSYKHKAGDKPIQSTLTPRGYLHKETVYGKIREPEQIKLSTRFDKLEKVANKNAQAYLSTYLEKFDNDARQAFNAKGITKMMEELAKCPVGGITLKENAVEVACFKESFVLKYPVETIKAKDVEFIVDPVIKRIVRNRIEEKGEKEAFKNLANEPVWFDKEQGIQIKRVRMYTGLEGLVPLHKTLGGQTYSTSSNIEAAKAVDFVSTRNNHHIALYKNSEGKTFESVVTFWDALNRKRLGIPIVIKNPASVLDYVLQKGLDDQGVLENLPPQDWQFITSLQQNEMFVHGLTKDEIETLYSNKEYKTISEHLFRVQKIASKYYVLRFHLETKVEDDSLQGLNLGKYLRYSSIGNFNCIKIRINNLGQIIQIGET

SEQ ID NO: 9833 - protein, 1064 aa, unidentified
  REGION 1..1064: note = Description of Unknown: Cas Enzyme sequence
MKRTSLRAYRLGVDLGANSLGWFVVWLDDHGQPEGLGPGGVRIFPDGRNPQSKQSNAAGRRLARSARRRRDRYLQRRGKLMGLLVKHGLMPADEPARKRLKCLDPYGLRAKALDEVLPLHHVGRALFHLNQRRGLFANRAIEQGDKDASAIKAAAGRLQTSMQACGARTLGEFLNRRHQLRATVRARSPVGGDVQARYEFYPTRAMVDAEFEAIWAAQAPHHPTMTAEVHDTIREAIFSQRAMKRPSIGKCSLDPATSQDDVDGFRCAWSHPLAQRFRIWQDVRNLAVVETGPTSSRLGKEDQDKVARALLQTDQLSFDEIRRLLGLPSDARFNLESDRRDHLKGDATGAILSARRHFGPAWHDRSLDRQIDIVALLESALDEAAIIASLGTTHRLDEAAAQRALSALLPDGYCRLGLRAIKRVLPLMEAGRTYAEAASAAGYDHALLPSGKLSPTGYLPYYGQWLQNDVVGSDDERDTNERRWGRLPNPTVHIGIGQLRRVVNELIRRHGPPAEITVELTRDLKLSPRRLAELEREQAENQRKNDRRTSLLRKLGLPASAHNLLKLRLWDEQGDVASECPYTGEAIGLERLVSDDVDIDHLIPFSISWDDSAANKVVCMRYANREKGNRTPFEAFGHRQGRPYDWADIAERAARLPRGKRWRFGPGARAQFEELGDFQARLLNETSWLARVAKQYLAAVTHPHRIHVLPGRLTALLRATWELNDLLPGSDDRAAKSRKDHRHHAIDALVAALTDQALLRRMASAHDDTRRTIEVLLPWPTFRIDLETRLKAMLVSHKPDHGLQARLHEDTAYGTVEHPETEDGANLVYRKTFVDISEKEIDRIRDRRLRDLVRAHVAGERQQGKTLKAAVLSFAQRRDIAGHPNGIRHVRLTKSIKPDYLVPIRDKAGRIYKSYNTGENAFVDILQAESGRWIARATTVFQANQANESHDAPAAQPIMRVFKGDMLRIDHAGAEKFVKIVRLSPSNNLLYLVEHHQAGVFQTRHNDPEDSFRWLFASFDKLREWNAELVRIDTLGQPWRRKRGPETGSEDATRIGWTRPKKWP

SEQ ID NO: 9834 - protein, 971 aa, unidentified
  REGION 1..971: note = Description of Unknown: Cas Enzyme sequence
KWCEEFDVVPITNAGEKGKGAGDETDDEKKKGEKNTIEAPADSGRSRFSRPALRILKSLILSGLKPSALHQKLRGRDAGLLAKIGMDILDKPPVKEKKDASSNVVQNYTKQPRPWVLVSDLSFLLAMRKTGATEDSWEDLFIPNQRLDQVVHEITSGGNSDVNAERQRRDKAIQKLIGSQNDPKVRHRLATFWERLQVLEREHGQPGQIVLEFIREDFMGEKAKKKLELFQKEREDKRKAAREHGGLKFELYQAQGGLCLYGKQVIKDGKCVYLENGLPMPGTPGWDNLVIDHIVPREAPYNGPDATVNYILTTSDANNAKRKRTPFDWFQQDRLAEWDGYKNFVTSKIGALGGKKVQLLTRSDAAELVGKYTSLAETAWIAKLAQTLIRLHFGWPLEHERGQERVTVVPGGLTGRIRRKYLLNTLLDERFKNLPTSQIKPEDEEDAEKDRKDLRHHGLDAMLISFFPDWMRNPHKGDFFRFPQPLDQPFPGKRNKLAVREFFKTQLSEVLPENLFLEKAKLAETAYGRSFQPEETAANGEMVKYKTAKLPLVELAYIKNPEGKATYDFTHARRTARGISDEKIRANVEAFLETQPSEADWAAFCQKFEAELASQQKPGKAIKIEVRKVEEVRAHRVSVKDMAYEQGNSRQYDVMYARENVNEIVEDLPEQKVIKAKLREFFAGTPSEAQWKTFAETLKPIDRCKLRSEFDEGGKKSKARTVKHLVFAHRPIPMKFNLKKAHARIDKICDEHVRQRLRAFINQNPPPDQSAWNAFCDSFAHERKEENGNLLKDAKGNVLYGAEIKKVRVNDGSPDEYKDFSKDGTGTFYKNKKEHKGQFVYVVDDGTPDGTVNVRPVYVFESVQAVKMAVESVPKFKSLTGYFQSGCTIGIKEPVPADSYKLVVWNDEKKKRRIAATTPLAANSKFMLSTIITASQAAEMQTADGTVIVFSSLEPLIKAGLHRVNRKSETE

SEQ ID NO: 9835 - protein, 1042 aa, unidentified
  REGION 1..1042: note = Description of Unknown: Cas Enzyme sequence
MSQAPSTLKPKNPKSYVIGLDLGTSSVGWAAVEIDDKGEPIDLIALGSRHFEEVLDDKGKKLKNEKRREMRGARRNLARRRMKKKAVLNILQEAKLTPEGETPYAANESTLAPYEIRSRAATEPVTLEELGRAFYHLAQRRGFKSNRGAKLAGLEDEPEVRDLLQTDEPGDDEDNDTGVVLAAIKDLEDEMGGLTLGQFFYQELLAGKKVRRRYTKRSHYEQEFEVIWSRQRTAHPKTLTDDLKVRLYKALFYQRPLKPQKFLVGYCSLEPTKRKAAKATLTAQRFRIWQDLANLELLDHETGEKRSLTLEEKDQLFTVLDSKNEASWTEVAKTLGHKLHSPKKEGIGLSFNLQRTYESGLAGNKTRTKITKKSGDLWNSLDKEGQRELVEIMLTCENRATLYRTLRSKYNLDPKIALDLAVMDLEDGYAMLSSRAMEKILAQMKAGLKRTEAQIAAGYTPWLDVVEPQDQLVEPPKRQDITSPRVRKALNQTRKVVNALIREYGKPERIRIEMAREMSLSKKERTEWEKVKKEGEILNLKAKEKLREMGIQSPTHTDVTWYRLAAQLNWICPYSGATIPQTAAATGEFQIEHIVPYEISFDSSFNNLTIGRQDYNLRKGKRTPFQAFGGTKEWSEMCDRIEALRGPGSRRKIKLFQSEEIPDEDKMISRQLNESKWIAREAAAYLEPLTKIAERNLQLQALPEEDRPKVQVGVDATRGAATAMLRYHWGLMEALYQINEKRRDDLRHHAIDAVAIALTSRSIFNKVSAARKGSNKPVVPLSDELVPKAFPWLMPKLRQLVPQVVVSHETTRQILGAFHEETVYGRREEKVYHIRKRLTSLTDSEVERIVDEKLKAAVLQRIAEYISEHGKLDMAKAFADGLPFGNPLPAQRARILARIKDAKMIESPSHRPTKFMLQGNNHHVAIFENIETGKRIGQFKTMVEAAQTFRHSKRKSAVETNLAPGWKFIMWLAGNDTIRTETGIYRVQALDPASNRVQLREVQAATVSDQSQRVLKSINQLHAVKLEVDYLGRVREVPEGTV

SEQ ID NO: 9836 - protein, 1050 aa, unidentified
  REGION 1..1050: note = Description of Unknown: Cas Enzyme sequence
MTNGYVLGLDLGISSIGWAVAPQSELGDIADIESMGSFCYPSPIAEVEKGRRISNRVGRGAKRRSRHRLDHFQARRKKLVRLLVHLGWWPNDKTTQENLRHAKLREEAGRITLVHPIALKVKGLEEPLSEHDLGKVMLHYQRHRGYLSTADLPVLLAHLRPKNTAAVIEVAEAPGLQTSEQKEALDFNKSMVFTQKKMQGRTVSQFQLDELENLRAVRARLSPTSLELRLMPKEQRDERSKKRTTRTSERYQRWMFIEEFDLLWAKQAETRPEMTEELMREIRSLVFHQAPLKEKSRDVGFCELLPKQRRCRTGELVFQRSRILQTLANLDVLENGEPRRLTSEERTKALTYLMVRDKSTLKALREAMELTNARFKAEPPEDEPEKGKAKKKKTASAAVTESIKGSAFGAKLAKILGVTGEALADGSMDDLVHDFISIPTADKLFARLTSTYGLEPDAATELMALEPPKGYGKLCARLLRRIEPKLKEGMDLHNAVIEAGYKWPHMQEAPEPAEKLVIDREWTTGNPSVDAAVRWSAKVVNQIIDRYGKPKVIRIELPRQMAMGNEARAQEFERINKRAKENEQYAKELEEAGIEPRMKYIKMVRLWNESDRRSPYAPSQEIASLKDLIEHYDLDHIVPQSHAAEDGMDNLVICPRSLNQEKGAKTPWEAFGHTTRWAEIEQFLAANRSISPRKKQRIMAKERPEMAMEARMLAATGYIGRQITSLLRTLGKEVAIELVNGQITAEARRRYGIDSVLDEEKSTKKGIGKNDKFSGEKDRSDLRHHAVDAAVIVAVNRSLAGRLRQYYKDLENWKKYRKVEGEAPTVTLEEPFANYRNRVLELLPGCPVVRPANRKISGPLHKETMLPLDEFKNVTGPPNTFQVIGQNVIRFGEEGEVTGAWVKSTVHHGLIFETLSGKRRVESVSLFEAAKRVSENNRARKRGEKPVPIVRPVERRFTGLERCVMSISNSDTVEYTGDKGAGPGFYRVGTIAVGDTTEVSLIWCRDAKSDPKATNSVRLRSDDAFRNLAARVVQNIFGEVIFREPGAADD

SEQ ID NO: 9837 - protein, 1477 aa, unidentified
  REGION 1..1477: note = Description of Unknown: Cas Enzyme sequence
MSSSNRILGLDLGTNSIGWAIVDKEGSEFSLIDKGARIFSEGVKSEKGVESSRAAERTDFRSARKIKFRRKLRKYETLKVLSENNMCPLSIEEVIAWRKSGFKNYPLNPQFISWLRTSEEDEINPYLFRDKASRNKVALFELGRAFYHIAQRRGFLSNRLDQSAEGIIEQHKPALEDIIENALSFTELQIELTDYFQDRDLIEQKAADLDEGEKKLKTIYNSFLKTIKDNPKDFDKTKILLSERLNKKEDLGVVKQKIGEISQAMIVGNFKTLGQYFCNLYNKGKIRNQYTARDEHYLSEFEVICLAQGIEGIIATEKLPEKRYVGLAKELYKAIFFQRPLKSQKGSIGKCTFEKSKSRCSVSHPDFEEYRMWSFINTIKIKPPTDESWRFLTSEEKVKIIPKFLRKKDNFNFEDIAKELVPSGCKYLFSKVTTKVISVDYLFNYHLNSSVSGCVVSTSFKNALGDDWKSKIYTYETLNKRGENVTRNVDYNDLWHLISVSTSDLYLQEFALTKLKLDNKKATLFSKIKLKKDFASLSLTAINKINPFLREGLLYSHAVFMANIENIVDADIWNNLDDRKYIQTKIAALIATNTFDNNLLEIINGLIKECKTGGHFYSKEAENIYKSDLDKKVSAFVISNKIEDQKESIMGLLFPIFIEQLKKHEFISIKRLDEKVFDFLDGQNDDGQVFCNSKNKLKKLYHPSDIEVFKKKIIKDEFGNEKVVLGSPLTSSIKNPMAMRALHQLRKVLNTLISEGQIDHKTIIHIEMARELNDANKRKGIQDYQKEIENNRKVYIEEIKSLYKAATSIDIEPTEDDILRYQLWMEQDKKTIYEEQCTNISISQIIGSNPDFDIEHTIPRSRSQDNSQMNKTLCSKYVNREIKKNKMPFELNNHSDILVNVAPWKIKADILTSEIEQISKSIKAATTKEQKDRKIRLRHKLNLQKEYFKGKYERFTDEKPKVGFKNSQIPDTGIITKYSQAYLKSYFKRVESVKGGMVAEFRKIWGIQESYQENNKKYYHEKDRSKHTHHTIDAITIACMTKEKYDVLANAWTHEDKGQLGEARELLANSKPWLTFTEDLKKIEDEILVSHYTPDNVKKQSKKIVRIRGKKQFRDENVLDKKGNTIPIFGKRLHEVEISSKIEGKDYFKIQKNNETVYYEYLFDKTGNIIHKKIPFINQGDTIRGSLHLSTIYGAIERENESGEKTIKYVVRKPISKDFTDADVKNIVDNGIRERIEKHGLKNVLTKEETIILPEEKKGENGATANLKPMLIKKIRLFQSTVKNPLHIKAHATVSKSRHEHKQTVYAQNDENYCMAIYEGLDKKGNVKRSCLLINMFEAGKYFKLSNNDKINYPIAPEKDENELPLKYILTKGKMVLMYDKSPDEFSEMSENKVLERLFQITQLDVEGSCIKLLHHQEAREKKVITEFMGLKIGMKGGKNLGEHKNFPWIKISENSFDCLVQDYDFTISASGKIILK

SEQ ID NO: 9838 - protein, 1092 aa, unidentified
  REGION 1..1092: note = Description of Unknown: Cas Enzyme sequence
MKSSPSNKSSLQLAYDVGHSSIGWAVLSADAKGKPAIVGCGTVIFAADDCLASQRRAFRRQRRHIRSTRARIARIELLLKHLGVMSDKQIADKHRPGGGHAAPWLLAARVLRGGKLLTWPELWDVLRWYAHNRGYDGNRKWSDNDAVSEQEDHEKVGNAMALYEKFGTSSMCETWCAICGLDPLGSKISCNLGGLERPKAMNAAFPREHVEREVRKILEAHVGKLKGCDGKFAAALLEDWGLAGCANIQLPLRFQGGLLFGQLVPRFDNRIIASCPLTFEQAYQGALAAGANQEAAAAHAQKLSKVPAKSCTEFLRYRWAMQVANVRVAAGDGAVRSLDAGQRRQLDEAMRSAGFMTKGSFKSAVRSLTGGATDNLDQLLLHPDADEALILDPVKKAIAKEPWAGLFATVAPADQGKVLGRLRREKAISIEDFVGFGGQPARSIVAALVMQQATAKGKGKKPKAPDVDLLKRTLRVRRPTGRAPFTREVMRQASDFVFATDRHPTEEGGPLYRTEAVRMAQLQRALDDQTNNHLVRHRLKILRRLHSQIVEVYAGGNADAIERVAIEVNRDLRNLSGKKAKQVAQDLGQRLSNFKSVSQKLEEDLEGHNVRITAGLIRKARLAEDLGWKCPYTGKSFDAFDLLHRRVDKDHIIPRSERPSDSLDSLVITFAEVNKMKGKRTALRFIEECGGQRVEGMPNLSVKTRAEYLADVKALESFRGHDDDVRRKRKRKELLELLAYVEKTFTPRDLTQTSQLVRLGAQMLEAEFANSKKKPVITSLPGSVTGTVRRSWGVLGCLAAANADVLDPDDPDDNGQARVRPKTEIRKITHLHHALDACVLALADRFLPRDGGAWDLLVKRRLSSAEQKCAKTLFGPQIKISKDGQLELNDLPTFLKQQIATRLAERRVVQHVPAEMSGLVAEQNPWRVLEVVDGQATITQRMRQADGTRPKKIDTQKVGKLLGLAPDGDSAKLKANKSVLVINGNFGVALDPEPQIIPFHKVWHRLQAIRKTNRGKPPRVLRNGMLIGLSTGPEDRRGLWRICSVKNSKRGVTLDLARPDQCGASWREVALKRLQQDKVALIQSLLCGGADY

SEQ ID NO: 9839 - protein, 1085 aa, unidentified
  REGION 1..1085: note = Description of Unknown: Cas Enzyme sequence
VVLNKKRNSKASKKGKIPQQKSRPPQTIPLGKPAPTPYLRPMSTIWAFDLGKGSIGEAVWNAGMKRFDHVASLLIPAEFASTKAAAARRRMMRTRQAHKAREAWLEEVWTQAGLTPLHGRKVGKVAGQWQLISAGDEKLEREFPAPGDSTCYTSCLLRIKLLRGEKLEEWQIYKALRSAIQKRGYDPKIPWKTGTRRKTTRREEVDEDKGTEERMAKFEEELRAMSAKEDHWLSCYFDAWKMGLWNPAQPDALQERLSHHAESTRNRILPRKLVEAEIRLLMEAAGKQLPKLQGKADYVLHGPAEKAYASYFLDSRKAHGLREGAATDWQGVLGQKIPRFDNRIIEKCVLMPRYNVCKVEVRCDKDGKPYPESLLPSEVTCLLKLKNMRIQRIGGPLNSLTPEELRAAFEVATAEGYKLGKREWKKLCLQFGGVPVAPVEMVEEPKAGGRSRFCRPALDVLKRLLLSGESPDQFHAAELARLKGNTDLSKGVVPADLKFLLDMGTAWQGIYVPNQKLEALAQRTADSGAAIRELIGSQNDPIVRHRLTTFWERLKDLEEAHGAPTEIAIEFVREDFMGKKALFDYREFIKRRADERKKARADAAELGATERSATMKMELLRQQGGECLYKGDKLIPTKLDEYEIDHIVPRSQGGPDAMVNYALTLKTTNADKGNRTPFEWLSSTDGWNAYENRVKGKQTVLRNKKVRLLLLPEAAELADKYTALAETAWIAKLSQTIAGLHFGWKNGVDDQGKKRVTVISGGLTARIRRKYKLNSLLAGDGVSEEDAEKNRDDDRHHALDAMVLAFIPGWARDESKQRWFRFPDGVGDNPREFFAHVISKVEPTNKCLSSAALEQTAYGVREIEENVFAVGRESLVSLLVKVNNGKETMKSPDKAETQRIVEPAIRREVETFLKGRASLTLLEWKSWCDAYRVGGKGPRVIKVLMTKTKANALGEYVDVSKDGTEQMRRGEMHRGYFVYWSAAPTKKDPDKRQAKVRPVYAFESVARVKRELNIQGAKSAQYFQSGCTVEIENRVEHSKTPLEAGRYLLNSIWEQGNVVVTSSSGKVSAPLGLAHMLNAGFKRSE

SEQ ID NO: 9840 - protein, 1105 aa, unidentified
  REGION 1..1105: note = Description of Unknown: Cas Enzyme sequence
MAKSLPTGGHMNIRIGIDVGERSLGLAAVEYDDDDGPIRILAAVSHIHDGGMDPDTSKSPKSRLATAGVARRARRLTRNRRKRLLMLNEVLNKYGYPVPASEVPQTHEAWKARARLVETYVKDAKERDRLIVLATRHMAHHRGWRNPWWSYQRLTESTSPTEQLTNTLAAAEARFGSQVNAAMTLGQLVSKVAAAGMPIRHTKAADTNPVGALLIDQVRQEDSLAELQLILKTQKVDPEAMNAICAAVFFQSKPTIPKDRIGKCDLQPDQIRAPIATLEFQEYRVRAAVGNLRIGREKRRLTEVEHDQAIDFLLTWRDEMRPRWRDLAEELEVAPRDLTDPSLDGQGGSNAPYDRTSSIVESKFKKTTKVGAWWLGASEVEHGELIDTICDLSGEDQEYATDSVADLLSLDDVLEDLNKLNDALETGRASYSRDTLRRLNAQMRDNRTDVHEARKAEFNVPDDWSPKRPSLDDPIEHPTVARVNALVRRFLTTAVQKWGMPDRIVIEHVREAFAGPTGLAEIKSEIRSNTWKREKTAELLKAQGIDHPNNSSIKRNECVERQNCICLYCGTTITLLNCELDHIVPRTGGGGSRRDNLVAVCRACNKSKGKMPFAVFAEHSKNPEIAVPAAQERVRNWQRSGMTNKSFRMLQSDVKKRLAMSADDEDFGDRSIESTAYAAREMRARIENFLDQQAARLQVERGQVVVFSGIVTSEARKAGGIDDMIRLRNFTRKSRFDRRHHAIDATVLTSMRLGVAKTLKDRANLHRDNRYTGKDPEWKEYRGASQGEQEAFTRWQNRMEGLGELIKAAIENDAIPVVRPLRLSPRVGSVHADTVEPLVRKEIGEAFTKDEILRIVDRSLFLRMSSLAGDGDLDTDPQRSAELRWAPDRSVDLFPSNAAYLAVRHGAVAIGGTVKYARVYAWRTKTGFDYGMVRMYVGEFPKIGFSGPGVDIFTAPLPPYSQAIRTANPRLRKRIESGEARQIGWVATDDELELAPSEFAIGDTKMALFMQQLPESRWLITGFFDPTKFSIAPSYLASEGIDESTAESVASVVKANRIPLGVNVVLASANCTIIRRTVTGAPRWHGDGLPRSWNVREAAEQAFSS

SEQ ID NO: 9841 - protein, 947 aa, unidentified
  REGION 1..947: note = Description of Unknown: Cas Enzyme sequence
KDVEAILSKANQEVKQKVLDKEEINGELKDFQGLWVSSACYLVYGRYSEVGEVQFWQTPYDIENYLKNEFRQHSLNNPTVEKILVETLHVVEDIWKYFGEEIGTDEEGRTIYNKLFDRIHIELGREMKKNNKQKEKDDKNNKENRKANERIVELLRELKKTNSTLQEKSPFQQEKLRILEEGLLSSIEYDKDSTEYELSIGKITKKEIKEITAKELSKISRNDFERYKLWLDQRYQSPYTGRFIKLSDLFDRKKYEIEHIFPQERITLNALYNKVICETEINGAKKASTGYAFISNAKSKKVFCAAHDTQVEILSVDSYEELVKSNFLGRKRDILLSKEIPEEFTNSQLNNSQYISKMAMKLLSNIVREKDEDTFRSKNVLATNGTITSTLKRHWQLNDAWNEIISPRFKRLNDLTNSNLFGDYREINGHQVFINTVPEEANKNFDPKRIDHRHHALDALIIALTTENHVNYLNNISSQEENDEEKLKTRKGYKFQLTNSRKGFNDEKEWYFLPPAQITTKDGIDVFEYHFGETKSKVFKDIAQNALENTIASFKQKNRIIRQRWNKYLKPIDGKIKIEKQEGVKEVVNYNVRKRLHEDTFYGKVKLQNKIITISLEKALIEKFDLVDAGISKEIENLMQNQDGSIKEIIETLKIKYPKVNVYEKYVATRFGNELESFASIPSDKIIKAIQSITDTGIQRILENHLDNFKEVIDGKTKFDTENAFSSDGIKELNKNITDLNNGKFHHPIYKVRTSDSMGTKFSVSEEGQKSTKYVVTAAGSNAFCGFYQNGKDRKYYIPTLKETVESLKQGFEPCPATHPEAPEYKLIFVLNPSDLVYVPTEEEIENQNLVDFSKIKKEQMNRIYKFTDGSMSNDGNIIISFIPTNFSSVLFNLNKDKQKKAGIDLPIQNEVGVGSQGSKNQNTLAGIQIKSVCWKLKIDRLGNIIK

SEQ ID NO: 9842 - protein, 1046 aa, unidentified
  REGION 1..1046: note = Description of Unknown: Cas Enzyme sequence
MELVFGFDIGTTSIGFAAIEFDAASRQGRIIRIGSRIFPEARDVDGTPLNQTRRTKRMMRRQLRRRKMRRQELNRALADAGLLPVHKSEAWDQLMLMDPLELRAKALREPLSPYELGRALSHLAKRRHFRGKDLEETEDGSSLDGEETSLSPADAAELGIRQRTIATLAATGETLGQHLASRGKDARKRGVHALRSHVEREFQAIWAQQSEYHPDILTESARDHLYDIVFAQRPVFWRMNTLGDCRLEPGAPLLPKGSWQSSQRRMLEKLNSLRIEGGNGRPLSEAERTAILSKLQTQQAMTFPAIRKVLEPMFQAEGLSTKYIKFNLENGGETKIPGNPIECKLATIFGEAWDGHPHKQAIRETVYACIGKADYGQIGNQRVVILRTTDRLKSRAAAVASFAKDFSLDDTIVSKLMELSFPTGWDAFSASAVAKLLPELERGVMMGQLLASPDWADWRQTTFPNREQPTGEILDRLPSPANKDERARQIRLRNPTVVRVQNELRKVVNNLIDFCGRKPDLIRLELARDVGLGKNEREEKAKGMRQAEKRRSAARADLISKGFPEPAHRDIEKWILWKECQEKCPYTGDSISFDALFRTSDFEVEHIWPRSRSLDDSQANKTLCRKDVNIAKGNKTPFEFYKSKSEEWDDVKTRIWKMQASKGKDGMSTGKIKRFLKEELPDDFASRQLNDTGYAARQAMEQLKRLWPDVGPEGKVYVQPVNGKVTAHLRKYWELNHILGDTGEKNRADHRHHAIDALVVACAHPGITQKLSAYWQAKDDPRSAGPEKPKLNPPWPTIRADAERAAKEIVVSHRVRKKVSGPLHKETVYGDTGEDVTTKTGTYREFVRRKKVEVLTKGEYDDIRDGHIRSVMKAWLEEKGGDPKKINWTSYPRVTEGGPEIKSVRLLIKQQIGLMAPVSTGYADLGSNHHIAIYQRPDGKTEFEVVSLFEASRRLAKREPVVVRHREGCRFVMSLAQSDMVKVPPSNERQGLWNVQSIWSSGVVVLIRHSDAVNGDIWRPSGGPLIKLGAHKVSVDPIGRVRPAND

SEQ ID NO: 9843 - protein, 1045 aa, unidentified
  REGION 1..1045: note = Description of Unknown: Cas Enzyme sequence
MRKMKYRLALDLGSTSLGWAMVRLNANNEPCAIIKAGVRIFSDGRNPKDGSSLAASRREARAMRRRRDRLLKRKNRMMAALLRHGFFPHDEAARKALEKTDPFALRAKGLDHALLPEEFARALFHINQRRGFKSNRKTDKKDNDSGALKTAIGQLREAMQVTGSRTVGEWLHARHQQGLSVRARYRENRTLNDNGKTKIEKSYDLYIDRAMIEAEFDALWAKQCELNPTLFHNTARDELKDCLLHQRPLKPVKPGRCTLMPDEGRAPLALPSQQRFRIYQEVNNLRLLREGLTGEPLTLTQRDQIINLLERPVREKKTAHEVSFDQIRTTLGLDGSTQFNLEDEKRKSLKGNTTNATLGKKVFFGDQWFTWSERQQNAIVRQLVNQENESRLIKRLHKYCGVSESTARDIANVSLAEGYGSLSAKALEKILPALRNDVITYDKAVRAAGFSDHSLLQAGDEVEGMSFDTGIERVNQLTGEITRLQAFFQLPYYGQYLQRHVGFGTGKPEDTAEKRYGKIANPTVHIGLNQVRTVVNALIKRYGHPSEVIVEVARELKQNWLQREEEKKRQVANQQRNNRLRADIATLLGISPERVHRADIQKMLLWEELSFNVADRRCPYSGVQISAQMLFSDQVEIEHILPFSQTLDDSLNNKTVATRQANRIKGNRTPAEAASDFETQGWRTEDMLQRASLMPKGKRYRFASDGMAQWLREDKGFLARALNDTRHLSRVAHEYLSLICPQNTRVIPGQMTAMLRGKFGLNDILGVGGEKNRSDHRHHAVDACVIAVTDQGMLQRFAKASASAREKQLNKLVETMPLPWDSYREHVQRAIGNIWVSHKPDHGHEGAMHNDTAYGLLGGGRVHVRKTVDGVRTREIGSLKVIEFSDASASTRHGLLPNGDPKPYKGYKGDSNYCMEIVRNQKGKWEGEVVSTFEAYQLVRQHGGNRLRHPKLSLSGKPLVMRLMIGDYLRFQTDDQLFVMRIASINSAGRLSLASHHEANTDARNRDKEGSWRYTYKQAGSLEKAKGRHIKISPIGELRDPGFIA

SEQ ID NO: 9844 - protein, 1375 aa, unidentified
  REGION 1..1375: note = Description of Unknown: Cas Enzyme sequence
MDQDYYIGLDMGTNSVGFAVTNSHYEILKSHGKSQWGVRLFDTAKTAADRRFSRTNRRRIERRRQRINLLQEIFAPEIAKIDPGFFPRLNDSFFIPEDKLEYQTNTIFNDPTYTDKNYHQDYPTIYHLRQELMEDQTPHDVRLVYLALAHILKTRGHFLYSDSGEFKLGDQYANVFNNLILLLDEVLEIHIPETLAQQWHEILTDRSTKNLEKQTQLLITLDRKDPQIKNLAKLLTGYEAKFTDLFGEQYKEAGTTKVKLSKVEEDTLDQLRSTLEDDHFELILAASAFYNLVRLETLLQGADSLSQTKINIYEKHGKDLKRLKSVFRKYVSQEEYHYFFSKSAKGLDNYVAYSGYHTVKKVKHPVLQKCNQESFLDYLKKTISRFPQEIQANNDVVEILNEVEKGTFLPKITDKDNSLIPHQLHHAELQLILRNASTYLPFLNEIGSDGFTKAQMISLISDFRIPYYVGPLNPAHSIQKSPNSRSHHAWITKLVNEPVRPWNFNRVVDVEQSASDFIANLTNKCTYLIGEDVLPKESPIYAKYSILNLLNSVKVKGERLETSLKQKIFRHFFLDPDRKRKATKKAIADFIKSETGSNIMETDIEGMDLEIPGEMKAEKLIEKIAPGKLTAEEKETIVRLITVFPDSFKMIYTRLSRELDKKLTPQQITQLSRLKFTGWGRFSERFLDGIEAPNEKAEFKTIVDLMWEESLNLQEVLSSRYLFKDIVQQINDDLIGSSRSFSYNAIENYPVSPAVKRMVWQAIRIIKELIKVNHGKAPSKIFLEVAREEGEKVRTKSRKTQLLELYKDLKKQEESLYSDLNDRSEAELRSKKLFLYFTQLGKCMYTGERISVDSLNNKGADGHDIYDIDHIYPRSVTKDDSLLNNLVLVKSSANRDKGNEYPIAEPIRTARRGFWAQLKTSGLITEEKFRRLVRQSHLSEDELAGFINRQLVETRQAAKAAADLIKQFLPETRLVYVKAGHVSDFRNRQSDFRFPKIRGMNDLHHAKDAYLNIVVGNVFDSKFTNNPLNFIRKSNSEKPKYNLARMYDFTVKSPDGVLAWQPGETGTIAVIKKMMTRNNILVTYQTHHQHSGRNGGIFNQTILPKGQGQFPIKTADSRLTGQSGIDKYGAYTDETGATFCLVEHQQGKKKARTILSIGLGWYLTHPLNEEALQNYCLETLRLQNPKILIKDIPYNTIISMDSYPLRILAKTGTSLKVANTIQPIFSAELEPVIKEMFFQINKETVEDEQAVVGEEFIKADFLRLYDAFIEKLGNPPFSRLSAYANQASNIKQGRQKFQELTVKEQAKVLNQVLTLFLCDSRLSDISLISPLKNGKPQNTQAGMITIAQNLPWDKKEFSICYQSVTGLFEKWVKVS

SEQ ID NO: 9845 - protein, 1046 aa, unidentified
  REGION 1..1046: note = Description of Unknown: Cas Enzyme sequence
MTNQHAPYVLGIDLGTNSIGWAMIRFDDTRPVELVDMGVRIFEAGTTGDIESGKDESRAIERRAARQRRRQTDRQSRRLRSLALVLQEHGLLPEGELKTGSDRHAFFLQLDSELRNHYAEQGIALNCAAGLREFPYYLRAKALDEKMPLHATGRALYHLAQRRGFLSNRKTDSNDKETGPVKEGISDLAQKIKQANMRTLGEYLFNIDPVHEKRIRGRWTARSMYEEEFNLIWEAQSRWHPQLYNENIRWNIHKAIFYQRPLKSQAGTVGYCDLEPFKKRAPKALVVSQQFRILQKINDLTVHFADGDVRPLNNDERVSLFEYMNERESVTFKQIRKRLSLPPDTEFNLERGGEKKLPGNVTEARLLKIFGKNWHSFNDAFHHEIISLIMGSEKAESVRKLGKNKYGLDDDQAEKFSRLQFENGYMSLSKKAMTKLLPLMKEGVSFKTAEKKLYDNPRNLCLDFLPPLHTHKNDRFSPQPDAGLDIRNPVVTRSLTELRRVVNNIIAKYGKPLRIHVELARDIKRNREQRKLISTENRDRQRSRESIVAQIKEKLGEHYMPSEQDIEKVLLMRECRCICPYTGRTINMENLLGDHPQFDIEHIIPFSRSLSNSFANKTLCYHEENRNRKRNKTPWEAYGNTDQWDQIVTRVKSFCGPTARIKLERFQLRDLSSLDEMSSQQLNDTRYASKIAARYLGLLYGENAMRHIQTSTGQITAYLRAGWHLNRILSTQGIKNRDDHRHHALDAIVIALTSRSAIQTLSKAAGNAYNAKGRTRTFLNQLEEPWEGFLPEVQEMADNLFISRRINRRVRGRLHEDTNYGYPRTDENGKQWHPIRKVLTETFKDTDIDNIIDPVVQDCVRTHFEANGSNPQKAFADPDNHPRMHDGTVIHKVRCKRTVSTTPIGSGDGTRFVATDTNHHMEIVETQNKNGEIIWEDHVVSLMEAVQRHKAGLPVIKRDHGPGSTFIYSLFKGDTCTITENDETIYCTVIGIAVGEVTLVRMYDARKQVEIRQTKSRIRCNANSLRKKQLRKLLITPLGEVIPAND

SEQ ID NO: 9846 - protein, 1531 aa, unidentified
  REGION 1..1531: note = Description of Unknown: Cas Enzyme sequence
MKKILGLDLGTNSIGWALINHNFENKQGEILGLGSRIIPMGADKLGDFEKGNPVSATAERTSFRGTRRLRERDLLRRERLHRVLNIMDFLPQHYANEIDFEHRLGQFKKDKEPKIAYRKNSNGKFEFIFQKSFNEMVADFRSTQPQLFYTKPNGKETKIPYDWTIYYLRKKALSEKIEKEELAWILLNFNQKRGYYQLRGEDEEMEDNKNKSFEILKVSEVVDSGDKIKGTDTILYDVFFENGWKYDRQTTKPEDWLGKTKEFIVTTTTLSSGETKLSFKSVDSEQDWIAIKQKTEQDISNSDKTVGEYIYDTLLQQPNQKIRGKLIRTIERKFYKNELRQILEKQKEFHPELQDKNLYIACIEELYEYNDAHRNSISNRDFTHLFVDDIIFYQRPLKSKKSLISNCTLEFRTFKVDGVERREGIKCIAKSNPIYQEFRLLQWMKNLKIFKIDDKQDIDITDELLPTIADREKLYEWLNNKTEIDQKAFLKYPDFNLEERIKEEIGLEQFRIFKKDKKQGLHTYYRWNYVADKKYPLNETRGEILKRLTKIGISSNFLNRKNETHLWHILYSVEDKNEIISALNKFANKHNLPETFVDIFKKYPRIDKEYGAYSEKAIKKLLTLMRFGKWWDFSAIDENTKDRIDKIQTGEYDEKIKNRVREKAINLTENNHFQDLPLWLASYIIYNRHSEASEIKYWRTADDIELLKQHSLRNPIVEQVINETLQTIRDIWNHYGEGKENFFDEIHVELGREMKNPADKRRKITERVTENENTNIRIKAILTELLNEGDNNVRPYSPMQQEILKIYEEGVYHNENRADELNEIDKIRKKSQPSSSDIKRYKLWLEQGYKSPYTGEIIPLSKLFTPAYEIEHIIPQSRFFDDSLSNKVICEAEVNSLKDNQLAFEFIKNNKELTIELSHGKFVKLLHPDAYEENVKRYFAKNKPKMRKLLLEDIPDSFIERQMNDTRYISKVVKMLLSNIVREENEEEGTAKNVIVSNGGITNTLKQDWGLNDVWNTLITPRFERLNQMAGYEKYGSWENKEGKQVFQINTIEPELLKLNKKRIDHRHHAMDALVVACSSRNHINYLNNAAAAKNKQSERFDLRAKLRRIENFTDKDGKQRTVAKEFLKPWNTFTQDAKRKLNHTIVSFKKNNRIINKTVNYYQKWEKQSDGSMKKVFVKQNKGDNWAIRKPLHKDTVSGLVNIRHKKSVSFSTALNNVENIVNKALRKKIEQLQKQGLDKKKITKFFKDLNNEWQGESISKIDIYCFSNDNENIRLAASRVKLDDSFDEKRIESITDSGIQKILLAHLENYKGQTDEKGKPIPPEKLAFSPEGIDELNNNLTELNGGKAHKPIYKVRTSETFGNKFNVGTEGNKSSKFVEAAKGTNLFFAIYINDEGNRSYETIPLNIVIERQKQGLPSCPELNDKGQRLLFDLSPNDLVYVPSLEEQENPNSVDFKNLNEEQIKRIYKLVSSSNYQAFFIQSAVSSSIVDKYEFSALNKMERDINDIMIKSVCWKLDINRLGEIKNVFR

SEQ ID NO: 9847 - protein, 1191 aa, unidentified
  REGION 1..1191: note = Description of Unknown: Cas Enzyme sequence
MSAKQNISSPHPDLHLAFDVGHSSIGWAVLQTPAAPSPEPAAELLGCGAVVFAPDDCLASTRRGFRRQRRHIRATRQRIARMRRLLAHLGVLTPAQLAAPGGAWPWLLAARVLGGGAPLTWPELWDVLRWYAHNRGYDANRAWSRQEKPDTEDSEKAQRAHELLREFKRRHGRPGTMAEVFCDHLLLREFERRHGRPGTLAEVVCDHLGVDPRGPVKSSRQRVRHLGAAFPREGVEAEVERILQAHKGILPGVDDPLIHALLRDHTARPVPGLRLPARYGQRQPDGTLRPGGLLFGQLLPRFDNRIIARCPIAYERVYQQVLAETGDREKARREAEKRAKVPAAHDADFHRFRWAMVLAQINIAVPGAPQPRNLSAPERNSLHAVMEQKGGLTKSELTQAVRQLTGRAPDNLDRLLALPDAERALVLDPVRLYCHRDPLLSVLWPALPARLQRRLRGQWRRGRALTVADVLAACGDARPAAEAALAQYLEAEAAKKKRAPDAPRIPDAPAGRVLRVERARGRAPHTREIMREAVAFVLATDRHPAEEGGPLYRSDAIREAQLRRALDEQTNNHLVRHRLKLLAGDADAGPRALNGLFRDLADTYAGGDLGRIGRITIEVNRDLRELSGKTAQEQAQLIGQQLANFKSVEKKLTEAYAGLGVRVGPGLIRKGRIAEDLGWTCPYTGQPYDALDLLHRRVDKDHIIPRSERASDSLDSLVITFAEVNKWKGQRTARRFIEEEQGKPVPGLPQLSLRTPAAYQQAVEKLECFKGHENDQRRKRNRKRLLLLRHYVEKEFTPADLTQTSQLVRLCAQALQRLCLGRARPPVVTALPGAVTAAVRKAWNLTGCLALANPLALNPDDPDDHGRPLPHKKTELRKITHLHHALDACVLALAAHLLPRDGEAWRLLLKRRLAPDEQRRARQLLGRVAAITPQGELRLNDLPPALKEQVSRRLRERRVVQHIPADLSGLRCEETVWRVFDPADPHPNARRLARWLANKNIPIPAPDAPTVLIISRKRNGADAAPAAGKVFHQTPAWRWVYEIKDKTALLGLAPEGDPAAAKLKRLKAVKVLGDNFGLALDPEPALIRPHKIWHQLAALRARNGGKPPRVLRKGTLIRVNQKAARSDYRGIWRVRGVQLNQRSGYLVDLSPPDQIHYVRQPGSFQNVSVATLLKCGLEILKTPLSGVAAPR

SEQ ID NO: 9848 - protein, 1431 aa, unidentified
  REGION 1..1431: note = Description of Unknown: Cas Enzyme sequence
MNNKTAPKQNSSNPDQQALAEKPYFLGLDMGTSSLGFAVTDRYYNVIRKRGRHLWGIRLFEEAKTSATTRQFRTARRRRKREKERVCFLQEVFRAALEEKDPGFLQRLDDSFFYPEDKITKQKYSLFNDPDFSDVDFYKRFPSIYHLRHHLIKSNSEQDVRFVYIALLHIMKNRGHFLYSGGEYNPNQQYEACYASLAEACNTLLGDADFPNVDTELREVLVKTNIPRSSKQKQILEVLENGGYDLSKKQRTELTKLLAGLKCTFQTLFNDEELEDAETKQCELSKDYDTARPNIEESIGAERIELIDSAYALFNWMRLSAILGEHNLLSEAKVAVFEKHKYDLRWLKKVVKLLIALDQEAIRASAKSENDLNKPHIYTRIFNISQDKLTNYVAYAGHYSKRGRKKELTYRNRNQTDFLAFLKKELTPYKELPQVKELVNEIDKGDFLPLIVGTDNGTIPRQVVGAELKLIMQKASTYLDFLDEETCNKIQQVFEFRIPYFVGPLNPSHRFDKDEGRYAWVVRKEQGKVYPWNIREKVDLEKSAEVFIERMTRNCTELTGEKALPKQSLLYTEFMMLNIVNAININGVRLDNKTRQGLIEHLFRNPNAPKRVSRKRVQDWLISEGYSFNDTELGGFDLDIPVHLTALHDYRKLTSTDIDMIDMENIIRVITLFPDDSSMIRRRLEADYGDSMTEEDLKFLSSRRYKDWGRLSERLLAGIKGISAKDYNKTIIAMMREEPLLLMELLSNDYSFSDQIKEINRAESPPSLDISHSILDDYMASPAVKRMIWQTLLVYKDLEKIMGGPPEKIFVEVTRNDLAPKERTQSRKRQLQNLYEACKRDLDNWSIELRGLLENEEETALDSRRLFLYYLQQGRCAYSDEQIDIGTLYTNHYDIDHIYPRSLTKDDSIHNNLVLVKSELNRAKGDRPLVPQEYQEKARRLWTRLLHQGFMNREKYNRLSRTTPLSDSELAGFISRQLVETSQSIKIVTDILERVLGDQTRLVYVKSTHVRDFRYRDFKTIDNDPDSESLEFIKCREINDIHHAKDAYLNVVVGNVLDEKFTKDPKQYLANARVDRYGNRYNLARLYDFDLPYRKKGLGLAWKSGENGTIATVKKVMARNDVLYTEQAVIRTGELFDQQIIKASKVSSPEGKMPIKGSVQGRKSLCDNPYLNITRYGAYNKVSIAHYSLIEVNNGGKIERIIEPVPLFLHMQIRDDTDRGDAILEDYFKSALSANHVRIIIRKLAFNSVLEIDGYRCRIRGKTGDNYRYASHIQAYFSPEIERQIAQVINCTKITTLANYNSISDESRNRTDKLCEDRLTGVDLARLSKVVLNRLRKGPWRKSTQLYRLGEKLEDRMSIFDAQITFENCYAFAQLLSTMSCHAQLFDLRCFGLSKSEGTRNINKKLNRDRTYSLITQSPSGFYENTINLWE

SEQ ID NO: 9849 - protein, 1471 aa, unidentified
  REGION 1..1471: note = Description of Unknown: Cas Enzyme sequence
MAKILGLDLGTNSIGWALVDSEEKKILGMGSRIIPMTQDVLDTFSGGKPLETQTSARTTYRSTRRIRERHLLRRERLHRVLNILGFLPEHYASQIDFNKHLGQFIDESEPKLAYNNRNFIFKVAFEEMLNDFKQTQPQLFYSKANGKETKIPYDWTIYYLRKKALSKKIEKEELSWIILNFNQKRGYYQLRGEEEEETLNKLVEFYSLKIVDVSADEKSNNKGETWYSLKLENGWTYRRSSKTPLFDWKNKVRDFIVTTDLNEDGSVKTDKEGNEKRSFRAPSENDWTLLKKKTENDLEQHIREYKKTNKVDFSGTVGTYIYENLLQNPTQKIRGKLIRTIERKFYKEELISILKKQIELQPELFTDDLYSDCVRELYRNNDAQQVILSNRDFIHLFVEDIIFYQRPLRSQKSSIGNCSLEYRLYKDVENNYVKEYLKAVPKSNPFYQEFRIWQWLSNLRIYKKEDDTDVTKEFLKNTDDNVRLFEFLMTQKEVGHKDILKHLITPTLKEKHIDLKATSFNKLVDNEITKYRWNYVFDDSKEKEEDKSKKYPCNTTRFEIVRRLGKVKNVPKNFLTSEAEQHLWHIIYSVTDKKEYKTALEKFARKYSLDIDSFVSEFEKFPPFKSEYGAYSEKAIKKFLPLLRMGKYWQWDAIDIKTKSRIEKIITGEYDENIKNRVREKAINLANHDDFQGIPVWLANYIIYDCPPVDKWETVAELEQYIKDFKQHSLRNPIVEQIITETLRVVRDIWKQYGQGKKDFFNEIHIELGREMKNTAEDRKWISEQVSKNEETNMRIKALLVELKENSDGTLPVENVRPYSPMQQEAMRIYEEGVLSSETNLPEDIVKISNTSQPSKTELQRYKLWLEQKYRSPYTGQIIPLSRLFSEDYQIEHIIPKSRYFDDSFNNKVICESAVNQLKDKQLGFEFIKNCHGTKVECGMGKVVEIFSEQDYLSFVKEFYAKNKVKRQNLLLEDIPVKMIARQMNDTRYISKFISSLLSNIVRDNKKDEEINSKNLIHGNGKITAILKQDWGLNDIWNDLILPRFTRMNELTQTNNFTSINQEGHVIPAIPFELSKGFQKKRIDHRHHAMDALIIACMTRDHVNLLNNQSAKSETKRYDLQNKLRNKSKEVWFDKLTNTKKERDVFKEFKKPWSNFTIDAKNAIENIIVSFKHNLRVINKATNNYQKWIEKNGKKVKATIIQEGTNWAIRKPLHQDTVSGKVDLKWVKVPQGKILAATRKNIDTTFDRKKIESITDKGIQKILLAYLEKKDNNPEIAFSPEGLDEMNANIRQYNDGKFHHPIRKVRIFELGNKFQLGYKGNKKHKYVETAKGTNLYFVINETKEGKRSFNSIPLNIVIERLKQGLSPVELKGEKDFFLTPNDLVYVPTSDEKLNFSNIRQLELNKERKQNIYKVVSFSGSQIFFIRHEIATSIINKTEFSTLNKMERAIDGSMIKESCIKLKIDRLGNVFL

SEQ ID NO: 9850 - protein, 1375 aa, unidentified
  REGION 1..1375: note = Description of Unknown: Cas Enzyme sequence
MKKILGLDLGVASIGWALVNQAENEGEKSSIIKTGVRVVPLSANEANNFEAGRPCETNAERRKYRTMRRNLQRYKLRRSNLKEILKEAAWIDEKTILAEQSNASTFETYRLRAQAATGPVSLEEFARILLMINKKRGYKSNRKANNPEDGTATDGMEVAKELYASGLTPGEYGLKILKSGKKYIPEFFRSDLQAELDKIWEVQKAYYPEILTDDFKNIIAGRGKNDISKIFLARYGIYTADNKGKSKNLQEYQWRVDALANRLEKDVLAYVIAGLSGAIRNSSGYLGEISDRSKELFFSKKTVGQYLYEHIKADPHFSTKNIVFYRADYIDEFEKLWEEQSKHHPELTPELKKKIKEEIIFYQRRLKSQKGLISFCEFESKQVKVIIDGKEKSVLRGPRVAPRSSLIFQEFKKWQILNNLELTDKETGEQWELSIEEKKLLSDELNTRDKMTAADAIKFLYNKQSGGKTLNYKTLEGNTTYAAFLRKFMEIVNILESTEYDINKMRSEDALLLIRNIFEKNKFNTDILNFDPLLSKEELEQQALFKLWHLLYSFEGDDSRTGDESLVKHIQEICNMPKQFARMISTISFTDDYGSLSNKAMRNILPYLIEGNKYSVACSLAGYNHSKHSMTKEQIENKELVNRLEILPKGSLRNPVVEKILNQMINVINALGDEYGKPDEIHVEFARKLKMDQKSRENHTERINKNEKNNARIRQILTEKFGIQNVRSSDILRYKLWEELKDNGYKALYSNKYIPAEKIFSNETDIDHIIPQAVYFDDSFKNKTLEYKDINLKKGKSTARDFVESEFGQEGLEEYIGRVNSLFENDVNSRTKRKYLLMRSSEIPDDFLNRDLSNSQYIAKKATEILESYVKTVMPTTGSITARLREDWQLVNVMKEINLPKYREVGLTYKEDRGESGEVEKIEDWSKRDDHRHHAMDAITIAFTKLSHIQYLNNLNARSDKSSSVYGIEKNETILNANGKRIFTPPMPLNELRAEFRNQLNSALVSVKAKNKVVTRNVNKTKKKNGYNTAIELTPRGQIHKEQVYGVRNVYETFYVPVGGKLDKDAIAQVASKREREALNKRLTEFEGDPKKAFTGKNAPDKNPIWLDEAHSASIGAKVKCVRMKRVFSIRKDIDKNLSIEKVMDTRIKKILKERLEEFEGDASKAFANLDENPIWLNKEKGICIKKVTIQENFDLDAIREKHDMLGNPILDESGNPIASDYVNLRNNHHVAIYQKPNGDYEEDVVSFFEALERVTNDDPVVDKAYNKADGWEFLFSMKINEMFVFPNPQTGFDPKEIDLMDEKNYSTISPNLYRVQKLSSKYYVFRLHTDTGTQYPNELRDITWKRIQNLPDIAKAVKVRVNHTGKIVAVGEYD

SEQ ID NO: 9851 - protein, 1420 aa, unidentified
  REGION 1..1420: note = Description of Unknown: Cas Enzyme sequence
MTKILGLDLGTNSIGWAIRINDYYERKTYFEHFKNDNHNYHNKTINFGNEIVDNGVIIFKKGVGDGKSGEFSLAAERRNNRSKRRLYNAKRYRKWELLKVLIENEMCPLTKDELRLWSVGYWEKYEDKWKNKGRIYPVNNEDFQNWLALDPTIFGDKGTSINGKLVRKNPYDLRCELIKQEETNEYIKKLKIGRALYHLVQRRGFKSSRKSGKSTFATNEDIEQLKKENSNFQISFLAKERLDNGERFRASGVIQRKYFEDEFFAICNKQNLSSALIESLYKAIYFVRPLRSQKGLVGNCTLEKGRPRIPISHPKFEEFRALQFINNIKWREKDSKEFVEIPITLKKRIFEDLFFRKLVGGKNKGKISEDSYFNFEDIIKNYSENGTYEFNYKNLPNVSTCPTIAALMNVFNEEWDNKFIQDENNYGINWDGLVLNYTVKYGNKTGAKRDLKVDEIWHLLFDYIQTKDKIEDLEKFCKDVLEFDEDKIKAFCSIDIPQGYGSLSYKAINKILPFLQGGYIYSEAVLFANLKKVLGSEFENKKEDAKTIIAKTIKKTGIIKERYNIVNGLIQSYFAEAETNHAKGADEKIIETAKKETIDRLKKYYGENEWNKKPESEKELIQNEVFNLYIRFLNGEQAKEEKASAKDNHIPEIDYYKLPRLDESIKQNLRSSFNIAESNLKALYHPSDIEMYPVSRTELKDTNTKILESPQPPSKGWKNPMAMRTLHELRHLINYLLKIGKIDKETKIVIEMARELNDANKRWAIQTYQRYREDENKEFAKAIVGVVKQKYPNLNENDIDNINKVRLWWEQVENNEEVYKQIKSLKEDIEKYRLWKEQDCICIYTGKPINITNLFDGTQTQIMHTFPLSASFDSSLANLTVGDAYYNNEIQSNKIPTQLPNYSKDAIIKGKTYTAIEPRIEKWKEKVVHLKNLIEENKKRTKKTQDPGTKKKLIQNRHILQFDYDYWKKKVETFTLTEIPLQWKNSQLIDTQIISKYARAYLKTVFEKVDVQKGTNTDKFKKIYQVKGDEQKDRSKHSHHAQDAAILTLIPSSAKREAILESYYKAEEEKKKFHTKPYESFNSSHILDIEKNVIINHISHDKTLTETIKNIRKRGERTGKKAQGNSIRGQLHKETFFGAIKVLERNEQGFPIKENGKYKILKNKIGEDEIWIVSKKPIKDIKIDKDIIVDDLLKKHIQKQLDNGISLESVTDFNNKPIRHIRIRVKAGVGFLSKDKAMPIKTQTYTSRHTHKIEYLVQNEENYLFLLYEGLNDKNKTIRHYRILNLFDIAQLKIKDINTIKNEPEFKTIKKGKFELSLKVILKAGDKVIFYKESRDEITLENIKYRLYRLYKFNELGENTAYLYLQNHIEARPDNELDKGEKAFDPNKYQPRLEFTADKMNCLFENYDFIMKPDGEIFYF

SEQ ID NO: 9852 - protein, 1549 aa, unidentified
  REGION 1..1549: note = Description of Unknown: Cas Enzyme sequence
MKKILGLDLGTNSIGWALVNHNFENKQGEILGMGSRIIPMSADILGDFEKGNPVSATADRTHFRGVRRLIERDLLRRERLHRVLNIIGFLPQHYANDIDFEHRLGQFKKDKEPKIAYKKNSDGKHEFIFQESFKKMVDDFRKTQPQLFYTKPNGEESKIPYDWTIYYLRKKALKEKIEKEELAWILLNFNQKRGYYQLREEEEEIEDNKNQSFEILKVSKVVDSGDKIKNTDTILYDVFFSNGWKYDRQITKPEDWLGKTREFIVTISTLASGEKKLSFKAVDSEKDWIAIKQKTEQNISYSNKTVGEYIYDTLLKEPNQKIRGKLIRTIERKFYKDELRQILKEQKKHHSELQDEKLYNVCINELYEYNEAHKNNIAKKDFTYLFIDDIIFYQRPLKSKKSLISNCSLEFRTFKVDGVERHEGIKCISKSNPIYQEFRLLQWMKNLKIFKKDDRQDIDITDELLPNIAEREKLFEWLNDRSEIEQTDLLKYPPFKLEEKIKEQLGLEQFRIFKKDKQQGLQTYYRWNYVEDKKYPLNKTRGEILKRLKKLGIANDFLTKEVEKHLWHILYSVEDSNEVHSALNKFANKYNLPESFVETFKKYPRIKKEYGAYSEKAIKKLLTLMRFGKWWDFSAIDETTKDRIGKIQTGEFDEKIKNRVREKTINLTENSHFQDLPLWLASYIIYNRHSETSEITHWKTANDIKLLKQHSLRNPIVEQVINETLQTIRDIWNHYGDGKENFFDEIHVELGRDLKNHKDKRKKISKQVSENEKTNIRIKAILTELKNEGHDNVRPYSPTQQEILKLYEEGIYLNENSEEKLKEIDNIRKQTQPSSSEIKRYKLWLEQGYKSPYTGEIIPLSKLFTTAYQIEHIIPQSRFFDDSFNNKVICESEINELKDNQLAFEFIKNNKELTVELSHGKFVKLLHPEVYEENVKRYFAKNKTKMKNLLLEDIPDRYIERQLNDTRYISKVVKMILSNIVREENEEEGTAKNIIVSNGAITSRLKQDWGLNDVWNTLITPRFERLNKMAEEKKEEDKNKYGSWVNKEGKKVFQINSIEPELLKLDKKRIDHRHHAMDALIVACTSRNHVNYLNNVAAAKDKQSERFDLRAKLRQIESFTDKNGKKRTVAKEFLKPWDTFTQDAKNELKKTIISFKKNNRVINKTTNYYQKWKKQSDGSMKKEFVKQNKGDNWAVRKPLHKDTYYGLVNILNKKTVSFSTALDNVKNITNKSLRKKIESLQKQGLDKKKITEFFKNINYEWQGENISKVDIYYFTNDNDNTRLVASRVNLDDSFNKKRIESITDKGIQKILLAHLEKYKGQTEKADKENPPEKLAFSPEGIEALNNNLTELNGGKPHKPIYKVRTFESFGNKFNVGTEGNKNSKFVEAAKGTNLFFAIYVDNEGNRNYETIPLNIVIERQKQGLPSCPELNEKGHNLLFDLSPNDLVYVPSLEEQENPNSVDFNNLSEEQVKRIYKFVSCTDIVGYFVPNTNASEIIKNENGTNSKSERVQDFYDNKTILDNSGKPIQIKSVCWKLETNRLGQIIKVLR

SEQ ID NO: 9853 - protein, 996 aa, unidentified
  REGION 1..996: note = Description of Unknown: Cas Enzyme sequence
MYTLGLDIGSNSVGWAILDPDASKVIDAGVRIFQEGVDRDTKGAEVSKNANRRAARSARRNRNRRNYRKDKLLRLLIRNHLLPQNTQELQQVFTKDPYFLRAKGLDEQLEPYELGRVLYHLNQRRGFWSNRRSEKKKDEGVVTKSATALQQQVTQTGCRTLGEYFSQVNPHENPIRGCYTFRSMYEDEFERLWQVQSSYYQAILTEPLKKEIKDRTIFHQRPLKPSEDLIGECELEPGEKRCPKADWYARQFRILQTLNNLKIQNPDGTESVLTDEQRKVVLEELLNNKNVKFDALRNKLGLLETQTFNLEEGPRGKKKETLQGDEFNAHLRKVLGKKGFARLSQTDMIEINELLLDDSLSDGEAAEQLMKRYGFSEEEAESVLASPLPQKYMSFSRLAIQRLLPFLEEGRLTHEAIQAVYGDSQARKPLQELDRLPFSEDLRNPIVNRALWEVRKVVNALLRVYGKPRKIQIEMARGLKGSAREREEIQFQQRRNEEENKKAQEELVRMGILSPSRDDIIKYKLWQECGQVCPYTGRPISQSALFGPHPEFQVEHILPYSRTLDDSYMNKTLCAVDENRRKGDKTPYEFYHGTEQFEQILQRIAKLPYPKRRRFWQEEVELDTFIRRQLNDTRYISRKVAEYLKNLGCIVQGTRGQITAELRHQWGLNSILDDSGLAGKNRDDLRHHAIDAAVTAVTENIHLRELARSKYTPAGQAAVHFAPPWENFRQQLKEIVNQINVSHRVCRKVSGPLHEETSYGPTGLKDEKGQDIYVYRKPLEALTLAMVLKIADPVVRQIISERLAAFGLSPGGKGTIPKEVWKEPLYMKTKSGRPGPQIKSVRIRDVFNNLIPIKDKEGKPYRYVAPGSNHHIEIFEYTDRKGRLKQEGRVITMFEAVQRSRNKQPVICRDYGDGKRFVCSLAINESFMLEVEDGGLVLHRVQKLDQNGRIILRPHTFGGKLEDSDSPPLIQRKSPNTLRGYKVTVDPIGRIFPAKD

SEQ ID NO: 9854 - protein, 937 aa, unidentified
  REGION 1..937: note = Description of Unknown: Cas Enzyme sequence
DKEYGAYSEKAIKKLLTLMRFGKWWDFSAIDENTKDRIDKIQTGEYDEKIKNRVREKAINLTENNHFQDLPLWLASYIIYNRHSEASEIKYWRTADDIELLKQHSLRNPIVEQVINETLQTIRDIWNHYGEGKENFFDEIHVELGREMKNPADKRRKITERVTENENTNIRIKAILTELLNEGDNNVRPYSPMQQEILKIYEEGVYHNENRADELNEIDKIRKKSQPSSSDIKRYKLWLEQGYKSPYTGEIIPLSKLFTPAYEIEHIIPQSRFFDDSLSNKVICESEVNSLKDNQLAFEFIKNNKELTIELSHGKFVKLLHPDAYEENVKRYFAKNKPKMRKLLLEDIPDSFIERQMNDTRYISKVVKMLLSNIVREENEEEGTAKNVVVSNGGITNTLKQDWGLNDVWNTLITPRFERLNQMAGYEKYGSWENKEGKQVFQINTIEPELLKLNKKRIDHRHHAMDALIVACSSRNHINYLNNAAAAKNKQSERFDLRAKLRRIENFTDKDGKQRTAAKEFLKPWDTFTQDAKKELNHTVVSFKKNNRVINKTVNYYQKWEKQSDGSMKKVFVKQNKGDSWAIRKPLHKDTVSGLVNIRYKKSVSLSTALDNVENIVNKSLRRKIEHLQNQGFDKRKITKYFKDQNNEWQGESISKIDIYRFSNDNENTRLAASRVKLDDSFNEKRIESITDSGIQKILLAHLEKYQGQTDEKGKPIPPEKLAFSPEGIEDLNNNLTVLNGGKAHKPIYKVRTFETFGNKFNVGTVGNKSSKFVEAAKGTNLFFAIYIDDEGNRSYETIPLNIVIERQKQGLPSCPELNEKGHRLLFDLSPNDLVYVPTIEEQDNPNSVDFKNLSEEQVKRIYKFVSCTGGEGHFVPNSNASEIIKNENGTNSKSERVQDFYDGKTVLDISEKPIQVKSVCWKLDVNRLGQIKNVFR

SEQ ID NO: 9855 - protein, 1015 aa, unidentified
  REGION 1..1015: note = Description of Unknown: Cas Enzyme sequence
MSAVLGLDLGSDSIGWALVDRESEEIIASGVRLFRTGESGDETPNQTRRAKRLARRQRRYRLARYRTLTEFLIAGGLLPEFMPNESRHDFLNRLDKQIQIEMRTALALGEITLPAADALTCIQRLPYAACYFLRYFCCKFKCKPYWYGRAILHMARYRGFSYQVKTRDQVEAESKKSESDIKGEALKARLEQEGIILAQEFVQRCIEKKGIRKNRYTSRFSLRDEFGCLKQSLLESYSSLSKSFSSDQSVNVENLLFKQRGITVKRSTIGRCSIFPNSERASKLLPEAQEFKIRQALANIRLFGAVDGGVRQLTSMESESVYEFIQSNGKISKTDFFKLIGLKSKTKESFISSNFDEMKEHLTDSLVIIFRGIDEISSGNSPCSSWDLALRKEFACVLLRFNNKESAERHLMNKFCLSDKQASFAMNHRIPDGRMAYSSRALRHMNSELKNGRSPHLIREALGTRVLNQRLDNLIPVVKAFPTLRDPAVVRTLSQLRKVVNAVVGKYGKPESVRIELARSRKLSPREQAAITRLNKSLKNERDEIAQWLSGNHVEASDTNVLRFRLWRESSHQCLYCGSMLSFRQVFSTNDCQIDHIWPYSRTLDDRYINKLIVCSSCNQEKGNATPFERWGANTGRWKEIASRFDSWADKKVGNDDVFRDLSESLKNLAGGNRISAKRRRVLEQSSTLIEGFLARQLHTTGYASRLAREYLNLLYSDPNKVNVSSGFITGRYRFALRQTFAAQVRDSIPLLLDEDAQKTRNDHRHHAFDAVFIALSDDRARIALQREWSDGRKAAILAPWPTFGAALASSLQRINPVLHFPQRDAHRISGKIDKSGARHRGQLVPRGALHDEMAKSEDDRGSRSRAHPSQPAAYFNVKENAFVMIGQTSDGSWGWKAMSLWDWCDRVRTQGYTYPTSFTLNVRNKPVEYATNSILRLHEVFTLNGTSGLWRLVNASDSEFLFVPLHEARNPLFLRDNRIAIRITGRDKLMQYAPAKVQLSPLGDETNLSIGQKI

SEQ ID NO: 9856 - protein, 1825 aa, unidentified
  REGION 1..1825: note = Description of Unknown: Cas Enzyme sequence
MKKILGLDIGTTSIGWAIVEASSDKPAKYNEQFKDDSPETKTDTNNQRTGIHKGKDGLPAVGVRIIAQEGKMLTRFNEGKKLNEKKNETPTAQRRRIRGGRKLKSRYKLRRDKLCTVLEILAMLPDSSFKRNKNKNNKDVWIAIEDSNGKWYTKKREYEVDEIGKKKKKRKNEYGNITGIGEDLYKLRSDASTKPLDDKKDWGRILLHLNQWRGYSSDRYSSNDEDEQTDDGFYTSMVTEDVIEIERTFKDKLKKKIDKIHYQVIFENGDLGVDVVKVGENSFYSKFKKGEVSTYKRVIDETDKSIIYFTWQNLKKEAWAYRKWQINNNIENYLNNGYGTVGSYFYNNFFNEQFIKDIPEENRLKRIRHNVVNRNYYEDEFEIIWTTQFKKHKAFFTPEIIERCIDAAFTKDKSVKNELHKITDLEKRLKTLIKDKIIYYQRPWQQAKNKGECRFEKIPNIKKDKDGKVIPKKDGQDQYRGRTVIPRSHPLHQEYKIWQQINNVKIWFHPIDKKEVELLENEQLCIEHLKKTPQEIKELLYERLQEKKEPSWRTFVNETFNLNVKIKKDGEKKTPTEIAYYSVNYIKISKMGGEQDNLLKGNKTKIQINDILKKVNSWYSEIAKRSIDNHNPEKTNKDGIIISSLNYKTEEYLITNLQLLWDCIYDLTGFQAGKETANIEMIKLRLRKHFRSDIISDIQCDALAKIKFDDAGMGQLSAKAIRNLLPLMADGKYTSLYPITEKVTKKINTLIALNQIERNETNNDLKLYSLKEFITDKNARIKLSSKMSEIEFKGLNYWEAAAVVYGNHSKMGIANVPAEEIAERMKNLQTVLPGKMNNPIVEKIVNETIKLVQLIYQSYGFEEVRIELSRELKNSREDREAIWDAINNNNKRTDWAKKMLREMFNEEEAKEVDVSFSKSNIDKIKIIEDVVANRKGKEHEEVRKKVVSEPTKADILKYRLWLQQEFRCPYTDQMIPFSDVFSKIKKVEIEHIIPKQRYPDNSYSNKVITWVEVNIEKSLRGNRTAYEFIVSKRDINDFIEIKSSGKKLKLIAADNWENKVKEMFKGRKAKNLLRQSIPEDPINRELKDTQYINKKLREKIGEAIGMDKVWTTTGQITDMLRNVWHLNEEVMEKLVIDRYNKFQVNFGSGATPLVANIVFPNSIKNRKTGIDEIKSKLPNFSKRLDHRHHALDAIIVACTKQQHIQLLNTLNAQFELTDYYGDDEKEIAKKRKYKALQNLIYELVPDENSIGKKKKSYYTPWQADEFIPQVKEALRKIVIAHKNSNILTSPSKNKQIDKDSYTSISIRQGLHKETLIGKRKLFNKEQTPISKIIDTIFNEKVISHKSYNEIIVDIVFKEKFQKKLITLFEKFQNTIEIDELRSNILNEINNNRSNYFDGATTFDLTPIKRGTESINNVKVDKVIDFRTRRYLTYKNSLIDSLSLELNSKPINERKKELEIKKKQYLETPIYYNALYDVRLKGGLWQELFEFNMEMLDEIEYVKNNNGKSVPNNARIEQIKNELLNYKHEFTRENILINHPIIIGDKKIEIKKATVMNTAGNNKTKKKEYDEDGYEIKDDVLVEIRPKTFVVLESKFRAIITQDINGTERKVDFIEFKEALDYQKLASDFIQAEIKIPNKIIPKNHRLLFTLNKNDLVVIPDKKEDSIEWNDISSYSNKLYRVLDFDSTGVIRFIKHTTADSIKLKDKIDAEGLRIVLEEKNKKFNTEKQNYEEEKNRIEYLEIEHINWKAALSKEDLTLNKKTIRIKDIEIKSAQKALKEHLAEVENLEKEIKNLSKVIAFSSKTDKTGKVKEANPIEEPIARKSK

SEQ ID NO: 9857 - protein, 1448 aa, unidentified
  REGION 1..1448: note = Description of Unknown: Cas Enzyme sequence
MKKILGLDLGTNSIGWAVVDRYNEIIDVNGHREQKELYELKHKGVVIFSEGVKIEKGNESSKAAERTGFRSARRIKFRRKLRKYETLKVLVQHGLCPLQKDELQQWRVSEDEETGIQITFKKYPSSKAFRNWLLTDNEGDKEQRKEKKKNPYFLRNKALDSQLTNEELGRVMYHFAQRRGFLSNRLDSEDTSILEGLMPAIQKLIDGAADLAELNIDLQRLYDEYDLGEEENKDLKKLKVSFDGIIKNNANEILFKELKQRLTNRLNRKENLGAVKKGISELSDKIAAEECRTMGEYFYRCLLKGEKVRKQYTARDEHYLAEFNAICDVQKVSDELRQQLERAIFYQRPLKSQKGTVGKCSLEPSKARCPISHPDFEEFRMYAFLNNVKVRKVGEDEQLRFLNDAERAKVSDKFYRKVQNFKFEDIAKALTPKGERYAFYKSEDAKYAHLLFNFQMDATVSGCPISAALKDVLGEQWRIATIAYTAKDKKGNTVNRSVDYHDLWHVLFTFDSFERIHQFATEKLKLTDKQASSFARTRLKKDYAALSLKAIRNILPYLRGNLIYSHAVFMANLHTIIDPDKWKGNEEYLKKEILLLIENDREDNLHVGIVNELMHAFKVNYANHHGSYELDVTDRADVVKKVKEVYGEKAFSEKSEEWQQEIISNIEQRFANCLRSGQFLEKKRLDEKIVDLITDNYLCSDLSRLDRIYHPSDIDAFKEAGRSSDGNRYLKLPFTKSVRNPMAMRSLFQLRKLVNTLIKEEKIDDETVIHIELARELNDANKRKAIQAWQKRLEKEREDDAKEIVKLFQEATSQIIKPNEDDLLRFKLWKEQNGCCVYTGKQIRISDFIGSAPKFDFEHTLPRSISEDNSDMNLTLCEMKYNREVKRNRIPFELKEEHADILERIKHWKVRFEELGKQMEQVTKKVKGASTKEAKDSLIEKRHLIRLEYDYYKGKHDRFAMKEVKSGFKNSQKVDIGIISKLSRAYLNSVFPKVYSVKGTMVAEFRKAWGLQDYEKDEQGKLVLDEVHGLPIAKPKDRSNHTHHCIDAVTIACMSKQKYDLLAYAWGIEEKGEVKAAKKVLEKAKPWNTFTEDVKNIPNEVLVYHHSPDHVGKMAKKKWRKRGEVQHNKKGEVIYLQGGAARGSLHKDTFYGAILRESVDKKTGEVLTDTKGEPKQEVKYVVRKELASVDDANLKNIVDDRVRAIVIKARETEKELQKDIADLKKQRQKADEAEETQIDAQMLAIQHRIANELYMIPPKEGKSTYSPIRKVRLFQPTVTDPIHLKPHTHVSRHEHKANYHVMNDGNYMVVVYEGERKGKLVRDYEIITMLDAANGGNFQVTKDGLPIRNTLVKGNLVLFYENSRNELLQMPDAKRSTRLYQLVKFDKSGRLYFRPHTEARPATELKEQSTLNINEPAEQLVVTRNAWNFVVGGQEFSMSRSGAIIINY

SEQ ID NO: 9858 - protein, 1409 aa, unidentified
  REGION 1..1409: note = Description of Unknown: Cas Enzyme sequence
MKKILGLDLGTTSIGWAFIHEAENDSEKSSIKKIGVRVNPLSTDEITDFEKGKALTLNASRTQGRSARRNLFRYKLRREYLIKLLMANDIINEKSVLNEDGKNTTFSTYSLRSRAVTERIELDEFARVLLTINKKRGYKSSRKAKNQEEGQIIDSMDIAKRLYDNHLTPGELCYQLLTENKKRLPDFYRSDLNAEFDRIWEFQQQWHSDILTDEFKQKLTGKGLKASSAIFYKEYNFNTAQNKAKNRKLQGYEWRNDALRVQLDKEVLAFVLSEVNGNIANSSGYLGEISDRSKELYFNKLTVGQYLYAELLKNRHFKTKKKVFYRQDYLNEFNQIWDTQSQFHAELTDELKNEVRDVVIFYQRKLKSQKSLISFCEFESVEKELLVHGKLKTIRIGSKVVPKASPLFQEFKIWQVLNNVIVMNKKLRETFELNLYQKQLLFQELNVKGNLGKDKIFKILDLESKTHDLNFKVLEGNRTNSELVQTYLAILESENIDTTDLLGVSTNDDSIKLENVSTSSYDILEFIRNQFEALGINSSILDFESDLPNPEFEKQPAYQLWHLLYSYEEDNSATGNDKLENLLSSKFGFKPGHAKILSNVAFQDDYGSLSAKAIRKILPFLKEGHAFAKKSENPNELVSATALAGYNHSHSVNKEENANRVLKDRLKELNKNSLRNPVVEKIINQMINVVNAIIEHPELGRPDEIRIELARELKKNAAEREKMTKSIEANKRQNAEIVERLKSEFHISNPTKNDIVRYKLYEELEKNGFKTLYSQKYIAREMLFDKAIDIEHIIPKSRQFDDSFSNKTLEFREVNQKKGESTAIDFIESEYGEQGKKEYIEKIEKLAKEGALSTGKKLKLLMPAKNLGDGFIERDLRETQYIAKKAKEILLEISRHVVSTSGTITERLRSDWGLVNVMQELNLEKYKLLSQTEFIERKDGNKVERIKDWTKRNDHRHHALDAVTIAFTKHSYIQYLNHLNARKVEEHAQHKVILAIENKELTKVFEDEGNFQKKFNPPMADFRQEVKKQLEHVLISFKSKNKVVTPNRNKIKTKNPKSSAQIALTPRGQLHKETVYGSRKKAVYKDVAINAKLSEEIIQTIENKEHKNALLDRLTQNNCDPKAAFSGKNSIDKNPIYLSHNPIQTIPNTVTTKEYETEYTIRKAVNPDNFKDEKVIAKIVDEKIRKIVLARFHEFNGNPKEAFARLDENPIWLNQEKGIEIKSVKITGVSNVESMHYKKDHFGQPILNKSGKSIPVDFVSTGNNHHVAIYEDANGDYQEQVVSFFEAVGRKNSGLPVIDKNFNLENNWKFKFTLKQNEYFVLLDNGVDDLSDLDITDPKNHAIVSKWLYRVQKIATRNYVLRHHLETQLIDISNYKEKIYFLLSSCNRLKSFIKVRVNLLGEIVSVGEY

SEQ ID NO: 9859 - protein, 1392 aa, unidentified
  REGION 1..1392: note = Description of Unknown: Cas Enzyme sequence
MKKILGLDLGTNSIGWALVNEGEGENEQSSIIKIGVRVNPLTVDEQTNFEKGKSITTNADRTLKRAARRNLQRYKLRKENLIEILISNGWINAETILSENGNKSTFKTYRIRAKAATEEVSLEQFARILLMINSKRGYKSSRKAKSQDEGQLIDGMGVAKKLYEENLSPGEYVFQLLKSGKKFIPDFYRSDLYAEFDKVYNNQKLYYPELLTDELKEELRAKKRDAIWAICAKKFKNHGYELVGAKRNGNTNEQKIENYAWRAKGLNEKLELEEFVVVLQQINAQINNSSGYLGSISDRSKELFFNNQTVGQNLMSQLDKNPHTKLKNQVFYRQDYLDEFEQLWSIQSKNRPQLNNDLKEEIRDVIIFYQRKLKSQKGLVSICEFENRNIEVIVEGKNKTKTVGLKVCPKSSPLFQEFKIWQVLNNLLVIDKNGAKKPLNQEEKETLYKELNIKDKISKTEALKLLYINHKELDLNFKDIEGNRTHAALYNSFQKIIELSGHGEYDFSKLPAASTQEIVHTIFSALNYNTEILYFDSSLEGKAFENQASYQLWHLLYSFEGDDSISGNEKLIAKLSQLYGFEKEFATILANVNFQEDYGSLSSKAIRKILPHLKEGVEFSAACILAGYKHSKSSLTREELDNKVLKDKLEILPKNSLRNPVVEKILNQMINVVNASIDAYGKPDEIRIELARELKKSAKEREDATAAISKTTAEHEQFKTILKNEFGLTHVSRNDIIRYKLYRELEFRGYKTLYSNTYIPQEKLFSKEFDIEHIIPQSRLFDDSFSNKTLEVRSINIEKGNDTAVDFILKKYNNDGHSDYLSRIEEMYKAGKLSKTKYNKLKMKGVDIPSDFINRDLRDTQYIAKKAKNILEELVKEVISTTGSVTDRLREDWQLIDVMQELNWNKYDKLGLTEIIENREGHHIKRIKEWTKRNDHRHHAMDALTIAFTKRSHIQYLNNLNARSDKAGSIYGIESKELYRDDHGKLRFKMPIDNFRQEAKKHLENTLVSIKAKNKVATININVTKKQNGVTKKIQLTPRGQLHLETVYGSIKQYVTKEEKINASFTKDTIEKVAKKTYREALLQRLSEFDNDPKKAFTGKNSLEKNPIYLDETLSSKVPEKVKTVNTETVYTIRKNITPELKIDKVIDVNIRKILENRLTEFGGDGKKAFANLEENPIWLNQAKGIAIKRVTISGISNAVALHDKRDKEGKLILDEKGNKQAIDFVNTGNNHHVAIYRVPVIDKNGQIVFDDSNNQLFELQENVISFFEATTRVNQGFPIIDKEFRKSEGWQFMFSMKQNEYFVFPNEETGFNPTDVDLLDAENYSLISPNLFRVQKFTIKDYFFRHHLETNVLNNNSLKGTTWLRLGLNGIFKIIKVRINHIGQIVSVGEY

SEQ ID NO: 9860 - protein, 1042 aa, unidentified
  REGION 1..1042: note = Description of Unknown: Cas Enzyme sequence
MSATGKRDLIFSYDVGHSSIGWNVLKETANGPEEVALGAVIFEADGCLASKRRTYRRMRRTIRSRRQRVEAIERLFVQQGILSRSQIDAKHKAGGGNSAPWLLAAAVLSCKGIFNLKADELFDVIRWYAHNRGYDGNRRWATNAGDEEGDSKREEAARTLMDQHGTSTMAETVCAQLGLQPGGHKKAAMAAYKNKEIGAAFPRKTVVSEVRQILDAHVGKLKGITPEFIETLCGDLKNDWQIIPIPEFEKQKTYHGGLLFGQKVPRFDNRILSFCPVADTPTPLKAAKEFLEYRCAMFLSNVRVGAVGDSMMRPLTKSELADLWQKIHKTGYLTEKQFKDTVRGFTGVTQDNLDALMTIEDTEKNLVVDPPLKLISSNTVLKTPVALLSAEAIESLLSKFWKKTGVTLAEILANVPESAEKAAAIEAAFKKDKAAVKKYGTKERWLEGKTYHAEFDSGRAPYARVVMSKAVEEILAGRDPRAKGGCLYLTDEMLQRQENRSIDELTNNHLVRHRLLILQRLFKDMVDEFCDGDLKKVQTVVVEVNREVSEMSGKDAQERKAIESLKRRDHKNACKKLEEAIKESGENIQVSAGLIRKARIAQDLGWTCPYTGEKFGPMELIYGQVDLDHIIPRSERLSDSMAGLVVTFSEVNRWKGKRSAFQFITEEQGNPVQGKANLSVQPLSSYTDFVSGLKTFGGHASDEGRRKSRKAYLMLPSYQDKEFTPRDLTISSYVAKMAVQQLKKEFKQVTHPPQVISLPGRLTGEARKSWKLTGLLKAVNADIKDETTKDEIRGLTHLHHALDAAVMGLMAHCAGNLSDGTTWQLLLKRSLLPHEKNMLAANMRNIGFDGSRAHLMDVPNEIKEQLRKCLLERRVVQHVPASMEGMRVEDNTRGFVSFDQESGKVTLQQQGKITEEVPGKLIGYNVEASKLQRQKGVRVIDSNFGVALTEPEPQIITWHKVWPKLKEIEERTGKWPEVLRNGMLIHVKGGTYAGIWRIVSSKNNTSGMAFNIAFTDGVSAHKENAKLKGMLTEGLEVLNSRL

SEQ ID NO: 9861 - protein, 1020 aa, unidentified
  REGION 1..1020: note = Description of Unknown: Cas Enzyme sequence
MDIRDELTLGIDLGIGSCGWAIIKENASGSEIVDWGTRTFDVPETDKERTPTNQLRRQHRGLRKVLRRRRQRMNEIRRLLKEGGLLDSEGKSALKVTGLDPWRLRAEGLDRKLTGQEIAVALGHIAKHRGFKSNSKRKSNEPASDDSKMLKAVHDTADKLAAYRTVGEMFAKDETFAIRKRNRDGDYSRSVLRDDQRKEVALLLSQQRRMGNALATEELESDFISIAFYQRPLADSEDKVGWCPFEPDERRAAKRSPSFEKFRFLSRLTALRLQSFDGDRALTATEVADASTDFGNQKGMTFKRLRGILDLDSGIRFEGIPLDEEGKRDAVNRSSSNGCMQGTHALRRALGQAGWNIFSDAPGKLDRIAFVLTFREDKDSIRKGLEEIGLEPLILHALMKAVEDGEFSDFKGAGHISAKACRNVIPHLMRGLVYSEACKEAGYDHWRRPETKLDQINNPVARKALTEAIKQVRAIVREFGLPGHIHVELARDVGKSREEREEIRSGIEKRNKAKDRLVEEFREAVGAEPRGEDLLRFELWKEQRGRCLYCDQPIHPNAVASSDNAVQVDHILPWSRSGDDSFVNKTLCHAGCNQDKKGRTPFEWFGTDETRWAAFTAGIESVKEMKGRKKRNYLLKDAKILEEKFRPRNLGDTRYATRLLLDALARWYPEDGKVHVYARPGPLTDRLRRGWGIQDLKKLLEPDGEKRRADDRHHALDALIVAATSQSALAKLTLAFQEEEKRGGHRDFSRLDPPWPGFVEEVRDKFTRIFVSRAERRRARGEAHAATIRQIADRDGETLIFERKNVEALTERDLDRIKDPERNMKLIENIRSWIVAGKQKNTWPKSPKGDDVKKVSFRTNKKADVLIRDGAADRGEMVRVDVFRRKNNNGLYQFYLVPIYPHQVMNHAGWPDAPNKAVQAHVSESDWPEMTREYEFIFSISPLSFLEIEKSDGTLIDGYFRGMDRGSGNLEVSPHHSKDQRVRGIGARNLKSLNKLNVDRLGRKYPIERETRTWHGAVCT

SEQ ID NO: 9862 - protein, 1382 aa, unidentified
  REGION 1..1382: note = Description of Unknown: Cas Enzyme sequence
MKKILGLDLGTNSIGWALVNEAENESEKSSIVKLGVRVNPLTVDEQTNFEKGKSITTNADRTLKRSMRRNLQRFKLRKENLIEILKENYFISDETILSENGNNSTFETYRLREKAAKEEISLEQLARVLLMINKKRGYKSSRKAKSQDEGQLIDGMAIAKRLYEENLTPGQIVFQILKSGKKFIPDFYRSDLQNEFGKIWDFQKNYYSEILTDQFKKEIEGKGQRATSAIFWKIYNFNTAECKGTRDEKKLQAYEWRSKALNTQLTKEEVAFVLAEINNNLNSSSGYLGSISDRSKELYFNKQTVGQYLMAQLDLNPHTKLKNQVFYRQDYIDEFEKIWETQAKYHSELTTKLKEEIRDVVIFYQRKLKSQKGLISFCEFESRQIEVEIEGKKKLKTVGSKVCPRSSPLFQEFKIWQILNNIQVSDKSGNGKRILEREEKEILFKELNFKDKISKNECLRILFKNHKELDFNFKENIEGNRTYASLIRAIEQIIEISGHGEFDFSKMNTDEILNTIIPFFEGLGYNKNLLKFNSQLEGKAFEQQAFFQLWHLLYSYEDDNSNTGDEKLILNIKEKYGFENEYARVIANIPLQADYSSLSTKAIRKILPHLKEGNEFSIACEYAGYRHSKSSLTKEEIENKVLKDKLDILPKNSLRNPVVEKILNQMINVVNTAINNYGKPDEIRIELARELKKSAKEREEETKTINQTTLDHEKYREILQKEFGLTHVSRTDIIRYKLYKELETCGFKTLYSNTYIPQEKLFSKEFDIEHIIPQSRLFDDSFSNKTLEARDINIEKGNETAFDFVGAKYGEKGKEEYIYRIEDLFKSGSISKTKYNKLKMKGDEIPSDFIARDLRDTQYIAKKAKTLLEDLVRDVVSTSGSITDRLREDWQLIDVMQELNWDKYNLLGMTEIIENRDGHKIRRIKDWTKRNDHRHHAMDALTIAFTKRSFIQYLNNLNARSDKSGSIYGIETKELYRDDKGKLKFKPPIPLNDFRAEAKKHLENTLISIKAKNKVTTININETNKLHGTNKKKQLTPRGQLHLETVYGSQLQYVTNELKVNASFDEELIKKVANKKFREALLKRLVEFDNDPKKAFTGKNSLDKNPIFIDTLQTQKVPEKVKKVNFETVYTIRKDITPDLKNDKVIDKKTKLILEERLKSFDNDAKKAFSNLDEKPIWLNKEKGISIKRVTITGISNAVALHDKKDKDGNLILDKEGKKQAVDFVNTGNNHHVAIYKDENGNLQENVISFFEATQRINQGLPIIDKSFNNDNGWQFLFSMKQNEYFVFPNEKTCFNPSEIDLLNPDNYYLISPNLFRVQKISSKNYVFNHHLETNAVNNDTLKSKKQLIGITHYFIQSLPPLKDLIKVRINHIGQIVTVGEY

SEQ ID NO: 9863 - protein, 1510 aa, unidentified
  REGION 1..1510: note = Description of Unknown: Cas Enzyme sequence
MKKILGLDLGTNSIGWALVNEGEDETKEILGIGSRIIPMSQDILGKFDSGNSISQTSERTGYRGVRRLRERHLLRRERLHRVLHIMEFLPNHYENSIDFENKLGKFLSDTEPKLVWKENETGNFDFVFKTSFNEMVEEFKITQPQLFDENKLIPYDWTIYYLRKKALQHKIEKEELAWLLLNFNQKRGYYQLRGEEEEDNPNKLVEFHSLKVIEVTADEPQKGKPDIWYSIILENGWIYRRSSKTPLFDWKDKVRDFIVSTDMNNDGTIKVDKEGKEKRSFRAPSEDDWTLLKKKTESDIEKSNKTVGCYIFETLLQNPTQKINGKLVRTIERKFYKQELKAILEKQKEFHSELNDIELYHTCLNELYGNNEAHRNSNANRDFTYLFLNDIIFYQRPLKSKKSLISNCKYETRTFINKETGEKQIDSIKCIAKSHPLYQELRLWKFIQDLKIIEREKDINGKLNTDVDVTNEFLQTENDYVELFDWLNKTKEIKQDTLLSSYFKIKKKKGEDKLSHRWNYVEDKEYPCNETRAQFLNRLSKVINVPENFLNKETEIQLWHLLYSVEDKLEIEKALKSFAVKNYLGDDFVDVFKKFPPFKKEYGAYSEKAIKKFLPLMRMGKYWKLDNIDEKTKLRIEKIVSGECDESIQNRVREKAIKLLNILEFKGLPEWLVSYIIYDRHSESSDISKWNTPEDLEAYLRTFKQHSLRNPIVEQVITETLRTVKDIWKYYGDFSEIHIELGREMKNPADKRKTMTAQITENENSNLRIKHLLVELMNHNDVENVRPYSPSQQEILKIYEDGVLNSGIEIPEDISKIVKQSQPSKSELIRYKLWLEQKYRSPYTGEMIPLSKLFTSAYEIEHVIPQSRYFDDSFSNKVICEAVVNKEKDNALGYEFIKNNEGRIIELSYGKSVKIFTVSQYEDFVKQYYSKSRGKMKKLLMEDIPEAFVERQLNDTRYISKVVKGLLSNIVREEGELESTSKNVISCTGGVTTILKQDWGLNEVWNRIVTPRFERMNELTKSNNFGQWTNKDGKRVYQTEMPLELQKGFNKKRIDHRHHAMDALVIACATRSHINYLNNESAKPSAKTSRYDLKSKLCYKSKTDDKGNYKWQFYKPWDAFTQDAQVALENIVVSFKQNLRVINKTVNKYQVIENGKKVIKTQEKGDSWAIRKPLHKETVAGIVNLRFKKPVTLSAGIDQWEMLVDKGLKTKIKQLINEGLDKKKILKFFAEQENKWLGNEISKVELYYFSNDKEVLVASRVNLDSTFNAKKIESITDTGIQKILLNHLANYNDQPELAFSPEGIDDMNKNMDELNNGKLHQPIIKVRTYEPKGNKFIVGNSGNKKDKYVVAASGTNLYFAIYLDKDGKRSFETVPLNIVIERLKQGEKPIQQIKLDGNGNEYILYDFLNPYDLVYIPTEEQKTNSYVSVSELQKNRIYRFIDSSDTTANFVPVITASLLFNLNKKDQEKIGINYPIQNEYGLGSPQSKNQKAITGEMIKDICIKLKVDRL

SEQ ID NO: 9864 - protein, 1051 aa, unidentified
  REGION 1..1051: note = Description of Unknown: Cas Enzyme sequence
MRRFGFDLGTQSIGWCVIDVDEKKETYKLDNMGVRIFSDGRDPKTHEPLNGARRQARSLRRNIERRKRRRQAMYRLISKYGLSPSGEEGKQWRNFDPYKLRSEALQRDLTDLELGRILMNLATRRGFKSNRKTDKKDSEAKGQALRQENLQAKLGSRTLGQYLYSLKQADEKAKLRFRADSEFYPTRAMYEDEFTKIRTRQEKAHPKFDWDGACRIIFFQRPLKRPERAACTFYPDQYRGYKAQPSAQIFRILQDIADLNYLDSMGRPQDLCEEDKEWLFEELNKHEKLGFDKLHSKLNINGPFSLESNVRKELKGNSTSIQMRKVFGPSWDKMPLSEQDQIVEDLIIEDDDTKLREMLASKGLSDEMVELALTKDFPVGTASLSAKFMRDVSKIMREKWCRYDEAVAMLNLHHSDLPHKTLLDSLPYYGEVIKYAAVQSKPADKLSEEEKQDPEKLFGRIPNPTVHIALNQLRKLVNALIERYGKPDEIHLEFATELKNGQAALKKIQQRQEENKKKNDMARAELRALQGKGDAYLPSREDIRRYLLWQELGQDQAVRTCVYCGKPISARQLINGEAEIEHIIPFSQCLDNGMSNLTVAHKKCNDAKGNRTPFDAFGTSPRGFDWEGICERAKKFYPRKRAKFAARSLDELRPKDFVASQMTDNAYIAKAACDYLSCICPKNKITAIPGMLTAEFRHQWGFNTILSSGLGKNRSDHRHHAIDALVIALTDRSNLQAASIANSRDDRPGIKAPPCPVERDEVLEQTKDILVSFKPNHGKGGALLQQTAYGFSQKESTDETGKTTTEHYDYRIRKAIRALSWSDIKDNRIVDKDISEKLCEYMNTRQISDPKAIEEKRKYALALDDFAKKTGIEHVRIEPKNKDESAYLHLGPGKGNRKGFKAYQYSDILCADIWMIPGKAGKVAYQADYFTRMDVPEALDEPEPRRPDNRAKRLMRLFKNDTLCIRHDGRVTYARVAGFSATDNKLDLQPIYSSDNCEEWLKSTASTMTDFFWKPKKGQYYLSVNSLFQQSSKGDSISKVSIAIDGRIRRR

SEQ ID NO: 9865 - protein, 1562 aa, unidentified
  REGION 1..1562: note = Description of Unknown: Cas Enzyme sequence
MKKILGLDLGTNSIGWAVVNAEEVNRENETSFLKPASISAAGSRIIPMSADILGDFDKGNSVSQTAERTGYRGVRRLHERNLLRRERLLRVLKLMNFLPEHYANQIDRYGKFINHSEPKLAWTKDEIGKFRFIFENSFSEMLADFAKNQPQLVANGKKVPYDWTIYYLRKKALSQKLTKEELAWILLQFNQKRGYYQLRGEEEEEAPDKEVEFLAQKVVRVEATDEKKGKDTWYNVYLENGMVYHRPSSVPLDWEGKVKEFIVTTDLEKDGSPKIDKEGNIKRSFRAPKEDDWTLVKKKTEFDIDNSHKTVGCYIYDALLQNPNQKIVGKLVRTVERKYYKDELKQILDIQKALIPELQDDALYKACIEELYPNNEAHRNNIAKPDFANLFINDILFYQRPLKSKKSLISDCPYESHFDKDDIEYPIKCIAKSNPLFQEFRLWQFVQNLRIYQREKEVAGKLMTDVDVTNDILKSEDDYVALFDWLNDRATIKQDTLLNSYFKFKKEKGKDQYPYRWNYVEDKEYPCNETRAEILKGLGKCGVDVNFLTKEQEMQLWHILYSVEDKIEIGKALKKYAEKNSLPESFADVFAKIKPFKKEYGSYSEKAIKKLLPLMRMGKYWKADDIDANTKDRINKIINGEYDEKIRTRVREKAINLTDETHFRGLPIWLACYIVYDRHSEAKEIEKWEKPEDIDKYLKDFKQHSLRNPIVEQVVTETLRTVRDIWKQEGNIDEIHVELGREMKNPADKRKRMTETIQQNENTNLRIKAMLMEFKNPEMGIENVRPYSPSQQDILRIYEENALDNLTKDDKEFEFVSKISKTAQPSKSDIVRYKCWLEQKYRSPYTGEMIPLAKLFTSAYEIEHVIPQSRYFDDSFSNKVICEAEVNKLKDRQLGFEFIKSHKGEKVQLSQGKTVEILSVEVYEKFVKDHYSSNRTKMKKLLMEDIPDGFIERQLNDSRYISKLVKGLLSNIVREKLPNGDYEQEAVSKNLISCNGSITDRLKKDWGMNDVWNNIILPRFHRLNELTGKNVFTAISAEGHEIPAMPLELQKGFNKKRIDHRHHAMDAITIACATRDHVNLLNNEAAHSKHNANRYQLQRKLRRFEKTVIDGKEREVAKEFLKPWDSFSIDAKKALENIIVSFKQNLRVINKTVNMYESYKDEDGKLRIGKNGLPEKGLIRQKKGDSWAIRKSMHKDTVFGEVNLRFKKQVSLNEALKNPQCIVNAEFKNDVVKWLKLGMDVKAIKKLVEGQKDVWSDIDVKKIWVYYFTKETNDRYFATRKPLDTSFNEKKIKESVTDTGIQKILFAHLEANNGNVELAFSPDGIDEMNRNIVTLNNGKFHQPIQKVRVYEKADKFAVGQNGNKSAKFVEAAKGTNLFFAIFSSEKLNKETGEMESVRSYLTIPLNVMIDCQKKFGSKWQANIETYLKECKLVSDEVKLLFILSPNDLVYLPTKEELKDGIMAIDKTRIYKFVDASGITAKFVPYYIAQSIFSMTKEDQQKSFKEYRYSIQNEIGIGSRPSKSPNEFSKGNVSIKETCVPLKVDRLGNIVELNGQKTIGRTE

SEQ ID NO: 9866 - protein, 1210 aa, unidentified
  REGION 1..1210: note = Description of Unknown: Cas Enzyme sequence
MKKRILGIDTGTNSLGWAVVDKNDNGTYSLIRKGSLIFQEGVKVEKGVESSKAADRTAHRALRKQYFRRRLRKIEVLKVLVEFDWCPYLSPEELHLWHTKKAYPMEEAFISWQRTNDNFEENPYYYRHLCLHKQLDLSNKADRYMLGRAMYHLAQRRGFVSNRLEQGDDDETGKVRDAISSLTKSMSEAGCDYLGDYFYKIYKEKGNTERIRTHYTDREEHYKKEFYAICKQQNLSEEQISVLEKALYFQRPLKSQRHSVGKCTFEPKKPRVADSHPAFELFRMLSFVNIIKIKGPYDVELRPLSADEFEKARPMFYRKSKPQFDFEDIAKAIAGKGKYQYIKDEGAKEYKFNYRMTHSVTGCPTIANLMSVFGDDYSTAIAERYKLSDGKAPEQMVNDVWNVLYSFSDKNKVKQWGKEKLQLSDEEAEKFSKIKLTHSFASLSLSAVNKILPWLERGLIYSHAVLMAKVPDIVGKEVWEKRGESITKELLSFIANFNPKDDTMQGTLGFCIKDILKDLCDLDSGATEKLYHPSMIEAYPDAKKNAQGVYQLGSPKTNAVRNPMAMRSLHQLRKVINTLLRDGTIDSQTEVHIEYARELNDANKRKAIAQWNKDRETLRKKYVEDIHTLYKQECGKEIEPTDDDIVKFQLWEEQNHICLYTGESIGITEFVGPNPSYDIEHTIPRSVGGDSTLENMTLCSSKFNREVKKAKLPTQLTNHDDIMQRLEEWREKIEKLRKDVDHVKTHSGMDKAVKDRLIQKRHLLKLELEYWIGKYKRFQMEEVPEGFARWQGTGIGLVGKYAGLYLKSLFHKADDRTKSNVRVVKGATTAEYRKMWGIQDEYEKKSRDNHVHHCIDAITIACIEPGEYNATARYYQQLEEYERTKANKPTFPKPWPTFTEDIKAIAQEMLVVHSTPDNMPKRARKYVQTSKGKKLAMGDSARGSLHNDTYYGAIERDGEIKYVVRKELSSLKESDVENIVDEAVKEKIKQAIADKGFKEAMVGDIFMNEEKGIKIKKVRCFTPTVTNPLHIRTQRDLSKKEYKRQFHVTLDGNYCMAIYEGEVKGKMKRTYEIVNMIDAAAYFKKSADLTKLYPIAPESKNGLKFRCTVQTGTQIILLQSDDEEINLADKKDLSRRFYYVAVMRSDGRIVLRYNQDARDATTLKKERKSGAYKVGEQYRSEIMLSLSDFHALVEGVDFKINVLGEIVMLK

SEQ ID NO: 9867 - protein, 1087 aa, unidentified
  REGION 1..1087: note = Description of Unknown: Cas Enzyme sequence
MKNEKYYLGLDIGTDSVGYAVTDTTPNYKLIKFKGEPMWGVTLFDAANTKADRRAHRSARRRLDRRQQRVELVQEIFAKEIYKVDPGFYKRIKESALFRTDAGEPYCLFNDADFTDKEYHDKYPTIHHLISELMISDEAHDARLVYLACAWLVAHRGHFLSEISMENIDKVTDFEMVYNPLMEYFEQSSDNYVAPWKLDNIVNFANVLKKQEGVNNKFRSIVNVLFDGSKCPKGIQKYEEFRFSKESILKLLAGGTVKLKDLYGKEEYSDIEPASISLGMEDEKFDSVITALEDDSELIIKLKAIYDWSVLCNLLAGEKYISLSKVKEYEQHHDDLSFLKYLVKKYIPQEYNNIFRNIVKNNYVSYSGNIKSAKGDKSQFEKSSNYDEFGKYIKKSFEKVEIDPSDYEQYNGMVNRIDLGTFLPKQVTGNNRVIPYQLYYKELEILLSKSEKYLPFLNEVDEDGLSNKEKILSIMKFRVPYFIGPLNDHSEHAWITRKAEGRILPWNFEEKVDFDASEQAFINRMINKCTYLPGEDVLPKHSLLYEKFEVLNEINTLKVNGMRIDEKAKQGIYCDLFLQKRKVTINAIKDYLIKNNYCNTEDLESFSGVDTNIKSALSSHFAFKRLLSTKTLNDVAVEEIIEHATFSEDKSRYSKWIANEFSFLNDDDKRYVSSLKFKDFGNLSKKLLTGIEGTDIRNGETNTIIGFMWEHNVNFMELLADNYTFNQIIDNERQDYYSQHEQTLDQKLDSMYISNSVKRPIFRSFDIINDVVKAMKHPPEKIFIEMARGGDKNKKGKRTLSRKEQLQELYRKVEDEDVKMLSEQLEKMGDSADNKLQSEVLFLYYLQLGKCMYSGEPINIEKLADGTYNIDHIYPQSKVKDDSILNNKVLVLSTYNKDKDDVFPVPSAWRLKMHPFWSRLKEIGLITEEKYNRLTRKHGFTSDEEWGFINRQLVETRQSTKAIATLLNEKYPETEIVYVKAGLVSEFRDIYRMHKCRSINDLHHAKDAYLNVVCGNVYNEHFTKQWFLKAKDHNEKYNINLIKLLGDVEDDKKGNNGGNNKVKNVYNGDTIVWSSNESFSSVKSTMR

SEQ ID NO: 9868 - protein, 1562 aa, unidentified
  REGION 1..1562: note = Description of Unknown: Cas Enzyme sequence
MTKIVSLCFYIYLFILFKISSKNAKFVQNTPFFCPFDFKKDYFKTDKQEKKEYPMKKILGLDLGTNSIGWAVVNADEITRNDGSRYLKPNSISAAGSRIIPMSADVLGNFESGITVSQTKDRTDKRMARRLHERALLRRERLLRVLSLMDFLPKHFASKINRYGKFTDDSEPKLAWRKNTEGKYEFIFQDAFNEMLAEFKDKQPEIVEEGKKIPYDWTIYYLRKKALEKALSKEELSWLLLQFNQKRGYYQLRGEEEDIPQDKKIEYLAQKVVKVEATDQKKGDDIWYNVYLENGMIYRRTSKAPLDWEGKIKEFIVTTDLEKDGTPKKDKEGNIKRSFRAPQEDDWTLLKKKTEADIEKSGKTVGCYIYDSMLNNPKQKIIGKLVRTVERKFYKEELTQILKKQVELIPELRNDNLYKQCIEELYPINEAHRNTIAKTDFANLFINDILFYQRPLKSKKSQIDNCPYESHVYINPKTGETKTAPVKCIAKSNPLFQEFRLWQFTQNLRIYQREKEIDGKLLTDIDITSECLKSEEDYVRLFDWLNDRESIEQEELLKHLFNTKKSKNKENPYRWNYVEDKVYPCNETRATILKGLSKCGINASVLSPEMEMALWHILYSIEDKKEIEKALTRFAQKQGWNSEFTTVFSKLKPFKKDYGSYSEKAIKKLLSLMRMGKYWNQDNIDKNTLDRIDKIINGEYDEKISNRVRDNAINLKDISDFRGLPVWLACYIVYGETKDCTKWNTPEDIDAYLKEFKQHSLRNPIVEQVVTETLRTVRDIWKQEGQIDEIHLELGRDLKNPADKRKKMSENILKNENTNLRIKAMLMEFMNPAMGIENVRPYSPSQQDILRIYEENALDNLTKEDKDFDFISKISKQAQPSKSDIVRYKCWLEQKYRSPYTGKTISLSKLFTSAYEIEHIIPQSRYFDDSFSNKVICEAEVNKLKDRQLGYEFIAEHHGEKVQLSQGEVVEIFSVEAYEKFVKENYANNRVKMKKLLMENIPDDFIERQLNDSRYISKVVKGLLSNIVREKVDDENYEPEATSKNLVSCNGAITDRLKKDWGMNDVWNSIILPRFIRMNQITGKECFTTTNAEGHLIPQMPLELQKGFNKKRIDHRHHAMDAIVIACTTRDHVNLLNNEAAHSKYNTNRYQLQRKLRRFEKTVIDGKEREVAKEFLKPWDSFTMDSKNILENIIVSFKQNQRVINKTTNAFQHFDENGKKTFAKQGKGDSWAIRKPMHKDTVFGEINLRKVKSVSLNEAIKVPERILNKNIKEKILELKNNKIDAKNIKKYMEEYHIGGYGTDTSKIDVFYFTKETKERFFATRKNLDISFNRAKIEDSIADSGIQKILLAHLERKNGDAEQAFSPDGIDEMNKKIIELNNGKFHQPILKVRVYEKADKFAVGQKGNKKVKFVEAAKGTNLFFAVFEKDGKRSYLTIPLNVMIDCQKQYGKLWKQNIESYLKEKELVEKNVKLLFILSPNDLVYLPTEGSIDKKRIYKIVSFTNNRLYAIPYAIAKSIVDKNEFTQLNKVEFTDNKESIKDVCIPITTDRLGNIIEFDGKRL

SEQ ID NO: 9869 - protein, 1486 aa, unidentified
  REGION 1..1486: note = Description of Unknown: Cas Enzyme sequence
MKKILGLDLGTNSIGWAVVNEAENAEEKSSIVKLGVRTISYDNFVSTETGKESKEPVKDFCGGKGISCNAGRTMKRSARRNLQRYKLRRENLIEILKTNGFISDDTILSENGNRTTFETYRLRAKAATEEISLAEFARVLLQINKKRGYKSSRKAKNTEEGQLIDGMEVAKRLYDENLTPGQLSLELLTSGKKYLPDFYRSDLQAEFDKIYAFQRQFYPFLTDELKEELTGKNEKATWAICAPAKDKNAGNSQFVWHWKETEIKWNDKTATNETVEVEKTLVGEKRTGTTAEQKLENYVWRSKALTEKLPPEQLIVVFQKINGQINNASGYLGDISDRSKELYFNHQTVGQYQMAELDKNPNYSLKNQVFYRQDYLNEFETIWETQAKFHKELTPELKKEIRDVVIFYQRPLKSQKGLISFCEFESKQIEKEIDGKKKTITIGCRVCPKSSPLFQEFKIWQRLNDVEVSGMIIPNQQKDLFGFATEFNYGKRRLQQEEKELLFAELNYKEKMSKAEVLKLLFPKQKDVDLNFKELDGNHTQSELFKAYQNIAERSGHDVSDLVKKSSADAVDTITSIFSTLGIDTRVLTFDSSLEGKAFEQQPMYKLWHLLYSFEGDNSALGNEKLIEKLKNTFGFGKEYATILANIVFKDAGEYSSLSAKAIRKILPHLKDGVDYSVACEYAGYRHSKNSLTKDEIQNKTLKDKLDLLPRNSLRNPVVEKILNQMVNVVNGVVDAYGKPDEIRIELARELKKSAKEREELSKSINETTRLHEELVKKLQNEFGLSHVSRNDIIRYKLYMELENNGFKTLYTNTYIPHEKVFSKEFDIEHIIPQAKLFDDSFSNKTLEARQANLEKSNATAYDFVVTKYGEAYADGEYKNRIDNLWKDGKISKTKRDKLLMKEADIPSGFINRDLRDSQYIAKKAREILEGLVRFVVPTTGSITDRLREDWQLVDVMQELNWDKYDKLGMTEIIEGRDGQRIRRIKDWTKRNDHRHHAMDALTIAFTKRSFIQYLNNLNARVQKGADEWIDLDMVEISALDKEQRKSAVYAIEKKELYRDNHGKLRFNSPMPLDEFRAEAKRQLENILISNKAKNKVVTKNINTSKKKSGANKKVQLTPRGQLHLETVYGSSKRYVTKEEKVNASFDVAKIQNVASKLYREALLARLNQFGGDAKKAFTGKNALDKNPIWLDTQHSDKVPDKVKMVGFETIYTIRKEVSPDLKLDKVVDANIRKILEDRLNEFGGDAKKAFSNLAENPIWLNKEKGIAIKRVTITGISNAEALHDKRDKDGNLILNEKGIKQPVDFVNTGNNHHVAIYRKPKLDKDNQPVLDENGNIQYELDEKIVSFYEATSRAMQHLPIIDKTYKQEEGWQFLFTMKQNEYFVFPRYDADGNMIFNPKAYDEDWFKNPENYAAISPNLFRVQKIATKNYFFRHHLETTVAEPKELKGITYKPQLGLNGIGQNGNVSIVKVRVNHIGEIVSVGEY

SEQ ID NO: 9870 - protein, 1518 aa, unidentified
  REGION 1..1518: note = Description of Unknown: Cas Enzyme sequence
MKKILGLDLGTNSIGWAVVNAEEMTRDDGSRYLKPNGISAAGSRIIPMSADILGDFEKGNSISQTAERTRMRMARRLHERALLRRERLLRVLCLMGFLPKHFADKIDRYGKITDESEPKLAWRKNAESKYEFIFQNAFNEMLAEFKDKQPEIVAEGKKIPYDWTIYYLRKKALTQKITKEELSWLLLQFNQKRGYYQLRGEEEEIPQDKKIEYLAQKVVKVEATDQKKGEDVWYNVFLENGMIYRRTSKTPLDWEGKIKEFIVTTDLEKDGSPKKDKEGNIKRSFRAPQEDDWTLLKKKTEADIEKSTKTVGCYIYDSLLNNPKQKIIGKLVRTVERKFYKKELTQILKKQVELIPELRDDNLYKQCIEELYPINEAHRNTIAKTDFANLFINDILFYQRPLKSKKSQIDNCPYEERIFIDSKTGEKKKVPVKCIAKSNPLFQEFRLWQFIHYLRIYQREKEIDGKLLTDVDITSECLKSEEDYVRLFDWLNDRETIEQEDLLKHLFNTKKSKNKENPYRWNYVEDKVYPCNETRATILKGFSKCGINASVLSPELEMALWHILYSVEDKKEIETALTHFAQKQGWNDDFAKVFSKAKPFKKDYGSYSEKAIKKLLSLMRMGKYWNQDNIDKNTLDRIDKIINGEYDEKISNRVRDNAINLKDISDFRGLPVWLACYIVYDRHSEAKDCTKWNSPEEIDSYLKKFKQHSLHNPIVEQVVTETLRTVRDIWIQEEQIDEIHLELGRDLKNPADKRKKMSENIMKNENTNLRIKAMLMEFMNPSMGIENVRPYSPSQQDILRIYEENALDNLTKDDKDFDFISKISKQAQPSKTDIIRYKCWLEQKYRSPYTGKTISLSKLFTPAYEIEHVIPQSLYFDDSFSNKVICEAEVNKLKDRQLGYKFIAEHHGEKVQLSQGEVVEILSVDAYEKFVKENYANNRIKMKKLLMESIPDEFIERQLNDSRYISKVVKGLLSNIVREKIDDENYEPEAVSKNLISCNGAITDRLKKDWGMNDVWNSIILPRFIRMNQITGKDCFTTTNAEGHLIPQMPLELQKGFNKKRIDHRHHAMDAIVIACTTRDHVNLLNNEAAHSKFNATRYQLQRKLRRFEKAVIDGKEREVAKEFLKPWDLFSSDSKNILENIIVSFKQNQRVINKTTNAFQHFDENGKKTFIKQGKGDSWAIRKSMHKDTVFGEINLRKVRSVSLNEAIKVPERVLNKKIKEKILELKNNKIDAKNIKKYIEENHTGGYGIDSSKIDVFYFTKETKERFFATRKTLDTSFNQAKIEDSIADSGIQNILLAHLERKNGDAEQAFSPDGIDEMNKNIVKLNNGKFHQPILKVRVYEKADKFAVGQKGNKKVKFVEAAKGTNLFFAIFEKDGKRSYLTIPLNVMIDCQKKYGNQWKSNIESYLKEKELVEKDVKFLFILTPNCLVYLPTENELKNGINNPDKEQIYKFVSCTSNEAHFIPFFVSNPIVQTTELGSNNKAQRAWNNKMIKETCIPIKVDRLGNIMEFDGRRL

SEQ ID NO: 9871 - protein, 1567 aa, unidentified
  REGION 1..1567: note = Description of Unknown: Cas Enzyme sequence
MKKILGLDLGTNSIGWAVVNAEEITHENEISSLLPIGISGAGSRIIPMSADILGDFDKGNSISQTAERTRLRMVRRLRERNLLRRERMLRTLKTMEFLPEHFATQIDETGKFINDMEPKLAWRKTNTGKAEFLFQDSFEEMLADFAQHQPQLVANGRKVPYDWTIYYLRKKALTERISKEELAWILLQFNQKRGYYQLRGEEEEEDNTKRVEFLAQRVLRVEATNEKKGNDIWYNVYLENGMIYRRTSRFPLDWEGKIKEFIVTTDLEKDGTPKKDKDGNIKRSFRAPKEDDWTLLKKKTEVDIENSKKTVGCYIYDTLLQNPNQKIIGKLVRTVERKFYKDELIQILKVQQEFIPELKDAVLYKKCIEKLYPSNEAHRMMIAKPDFVNLFINDILFYQRPLKSKKSLIDDCPYEFHLDKDGNAYPVKCIAKSNPLFQEFRLWQFVQNLRIYQRERITNDGQMDLFNLTPTGKLQTDVDVTAELLKSEDDYVKLFEWLNDRNSIKQDTLLNSYFKIKKEKGKDKYPYRWNYVEDKEYPCNETRAAILAGLEKCSISKEFLTHENEMALWHILYSVEDKIEIGKAMRTFSEKNNLNDGFAEVFCKMKPFKKEYGSYSEKAIRKLLPLMRMGKYWKIENINDKTLDRIEKIITGEYDETIKNRVREKAIKLTETNQFKGLPVWLACYIVYDRHSEAKDIEKWEKPEDIDRYLYTFKQHSLHNPIVEQVITETLRTVRDIWKKEGKIDEIHVELGREMKNPADKRRQMTERIQQNENTNLRIKALLMEFMNPDMGIENVRPYSPSQQDILRIYEENALNNLTKEDEEYEFVSKISKLAQPSKSDIIRYKCWLEQKYRSPYTGKMIPLTKLFTPAYEIEHIIPQSRYFDDSFSNKVICEAEVNKLKDRQLGYEFIKNHAGQVVQLSQGECVEILSITNYEKLVKDHYANNRPKMKKLLMDDIPEGFIERQLNDSRYISKVVKGLLSNIVREKTESGEYEQEAVSKNLISCNGSITDRLKKDWGMNDVWNKIILPRFQRLNQITGKDCFTMLSREGHEIPSMPLDLQRGFNKKRIDHRHHAMDAIVIACATRDHINLLNNEASLPKHQEMKHALSRKLRRREEIVINGKKRSIYKEFLSPWPSFTTDALQTLQNIIVSFKQNLRVINKTTNYYLHYDESGKKTFSKQIKGESWAVRKSMHKDTIFGEVNLRKKKTVSLNEAVKKPNSIVNKDFKKKVIELLNERKDAKYIKKYVEENKDVWSDINTAKIEVYYFTKDEKKRNGEPKERYFATRKPLDSSFDKKKIKESVTDTGIQKILLAHLETKDNNPEQAFSPDGIDEMNRNIVTLNKGKFHQPILKVRVYEKADKFAVGQTGNKTKKFVEAAKGTNLFWAILGTEMENKNTGKKEIIRSYISIPFNIMLDCQKINGLRWKNNLEFYLKEKGFIDSNTSILFVLSPNDLVYLPFKEALSKNNIIIDRNRIYKFIDPGMNTGNFIPYFVAKTIFSIKYSDQKKMGLSIPIQDEYGLGSQGSKSPRSLTGEMIKETCIPIKVDRLGNVVELNGQKVNTTISL

SEQ ID NO: 9872 - protein, 1337 aa, unidentified
  REGION 1..1337: note = Description of Unknown: Cas Enzyme sequence
MKKNGNDLVAGNYYIGIDAGTDSVGWAVTDKSYNILKHKGNAMWGVRLFGGAQDASERRGCRTARRRAARTRRRIVILEMLFGEELAKADPSFLMRLHESGLWENDKSCAGKYSLFNDPVFTDKHYYKQYPTIYHLRHELASSCEPHDIRLVYLALHHIMKHRGHFLYDTGDAGEIKTLDDAFKELNEYLNSSYGVTFDPENREKFISELLRSELNITAKKKALRASYGRLKTDPEDGINLTAVSDMLSGCSIGMSTLFYDDTLKNVKFSLKDDLEEKLSTEETDLGDRAEVLFLLKTIFDLARLSQMLQGGRYQYVCDVKVDLYDKNHRDLRLLKEYVRNTVPDQYRHIFSEKKDKLDNYAAYSGYTVECGEYTCNQEQFCKFLKKTIPSPEESDTEMQRIYSEISDSVFLTKLRGTENGVIPYQLQKRELEDILEHASAYLPFLNSTGNEGITVKDKIIKTFEFRIPYYVGALGGEGGNHWAIRFEGQENTKVYPWNFGQVVDSHASAEAFIENLIGRCTYTGEKVLPKDSLLYSEYALLNEINLLRINGKPVSNEIKLKLIDDLFYNSAKKVTKEKIADYLKQRGLMTAGDELSGIDDNIKTVLRSYHDFKRILNRTKDTAMVESIIRAILVFSGDKKMLRSWLKRNTHDLNDKDISHICRLNYSGWGRLSETFLTGIVHIDDNGKSCTIMDMLRSTDKNLMQLLTDEYQFAKKAEDHRNELLGDDSSLTARLNELYIAPAVRRSIRQTMRIVDEIVDIQKSVPEKIFIEMARGSSEEIKNKRTESRKTKLIELYKKCGEESSELFKRLEREDDNSLRRDKLFLYYTQLGKCAYSGEGIDFGSLAGEELYDIDHIFPRSKIRDNSIDNRVLVKSTLNREKTDSYPISGEIRNRMESFWRMLKDYGLISDKKFNRLTRSYELTDTELSAFVARQLTETQQATKALAAILKEAYGNRTTIVYSKAGNVSDFRQKYGQDTKNSKGDYNFIKCREVNDLHHAKDAYLNIVVGNVYHTRFTERFFDNIRNENYSLNRVFEYNVDGAWDKNRTIVTVRKYMAKNNVLVTRRSYEKKGKLFNVNLEPAGKLPVQKKRGLCTEKYGGYNYINVAFFCVVEHKQGKKRIRSFEPVYIHNRNIYDADPAKYCSEILGLSDPLIIAKVPIDSLLKIEGKYLWLSGKYDESRILFKHSYQLILAPEMSRYVKKIEKYIERCKGKKELLPITVHDGITAHQNVELFNCFIEKCGSGVYSGLFDSLKDKLESAKSVFGGLTTYEQAEVLTQILHAFQCNAQYADLKKLQIMGKQVEIRKNKTISKLSEVYLINQSVTGLFEHKVDLLK

SEQ ID NO: 9873 - protein, 1210 aa, unidentified
  REGION 1..1210: note = Description of Unknown: Cas Enzyme sequence
MKKRILGIDTGTNSLGWAVVDKHEDGTYFLIRKGSLIFQEGVKVEKGIESSKAADRTSHRALRKQYFRRRLRKIEVLKVLVELGWCPYLSPEALHQWHVKKTYPMDEAFISWQRTNDNFEENPYYYRHLCLHEQLDLSKESDRYMLGRAMYHLAQRRGFLSNRLEQGNDDETGKVKEAISSLSKSMTDAGCEYLGDYFYKIYKEKGNTERIRTHYTDREEHYKKEFYAICQRQNLSEEQVSVLEKALYFQRPLKSQRQGVGKCTFEPKKPRVADSHPAFEMFRMLSFVNNIKIKGPHDVELRPLSNDEYEKAKPMFFRKSKPQFDFEDIAKAIAGKGKYQYIKEVGDKEYKFNYRMTQSVTGCPTIASLMSVFGDDYVSAIAERYTLSAGKTPSQMVNDVWNVLYSFSDKDKVKQWGKEKLQLDDEEAEKFSKIKLTHSFASLSLSAVNKILPWLEQGLIYSHAVLMAKVPDIVGEEVWKNRGESIAKELLSLIANFNPKDISMQGTLDLCIKDILKDMCELEPDAAEKLYHPSMIETYPDAKKNAQGVYQLGSPRTNAVRNPMAMRSLHQLRKVINTLLRDGTIDSQTEVHIEYARELNDANKRKAIAQWNKDRENLRKKYAEDIRTLYKQECGKNIEPTDDDIVKFLLWEEQNHICLYTGNSIGITEFIGPNPSYDIEHTIPRSVGGDSTLENMTLCSSKFNREVKKAKLPTQLSNYDSIMPRLEEWRTKIEKLRKDADHVKTHSGMDKAVKDRLIQKRHRIKLELDYWLGKYKRFQMEEVPEGFARRQGAGIGLVGKYAGLYLKSLFHKADDRNKSNVRVVKGATTAEYRKMWGIQEEYEKKSRDNHVHHCIDAITIACIEPGEYNATARYYQQLEEYERTNANKPSFPKPWPTFTEDMKAIAQEMLVVHSTPDNMPKRARRYVQTSNGKKLALGDSARGSLHNDTYYGAIERDGEIKYVIRKELSSIKETDIENIVDDVVKEKIKQAIAEKGFKKAMEEDVFMNEEKDIKIKKVRCYTPSVTNPLHIRTHRDKSRKDYKSQFHVTLDGNYCMAIYEGEVNGKMKRTYEIVNMIDAASYFKKSADLTKRYPIAPEIKNGLKYRCTVRTGTQIILLQSDDEYINLADKENIAKRFYFVAVMRSDGRIVLRYNQDARDATTLKKERKSGAYKDGEQYRSEIMLSLSDFHALVEGVDFKINVLGEIEMLK

SEQ ID NO: 9874 - protein, 1219 aa, unidentified
  REGION 1..1219: note = Description of Unknown: Cas Enzyme sequence
MENTIKQRILGIDTGTNSLGWAVVDRLPMGGYELVDKGVQIFQEGVNIEKGTQEKSRAAERTSHRSLRKQYWRRKIRKIALLKKLSEAGLCPPLSNEELHAWRVNGVYPLTNDAFMRWQRTDENKGLNPYAARCQCIEMMLNMDNPAERHILGRALYHIAQRRGFLSNRKSQTDDKDTGVVKDGIKDLTQKIQDAGCEYLCQYFFQLYQRGERIRSCYTDRKEHYEKEFEAICKKQHLKEDLVSELHKIIFVPRPLKSQRRGVAKCPFEPSKHCAPISHPLFEEFRMWSFIRNIKIQTPEDSELRILTEGEINKVLHLWFRKSKKNFSFEDIAKAIAGKGKYCYFKSTDDKPYRFNYHMDTSVAGCPVSAQLIEVFGEAILTKREEVDKIWQALDFYDDDQKLREWGIKHYDLSEEQANMLAEIHLPQGYAALSLKAMENIVPLMRDHKMIYPNATLIAKLRDLTKDYPFDKDFDDDVEAYLKADIEEYLFIPKDENGKPLQSREERREDLEYKWRIHYHLSDKDLKKLYHPSMIEEYRHVDHTTNGVYQLGSPRISALKNPMVMRSLFRLKAVVNQLLKDGTIDENTIIHIEFARELNDANRRTALRHYQTALRKEREEAVEAIKDYVPYPSDDDILKYLLWMDQGGKCVYTGKSISIASLGKCTYTGRDIDLSALYNGTDFDIEHTIPRSMGGETTRENLTICESRFNREIKRNQMPSQLPQQYREVVLSNIKPWKEKYEELDKQLRKMKNASSGLSTKDARDRVVAKKRLLEMQRDFWRNKYNAFIIEENDVKGFTRRQGTDISVISRYGRLYLQSLFGRVDVVKGSMTAAFRKIWGIQSAYEKKNRENHVHHCIDAITIACMGKREYDELSAYYHADEENKYHTSDILMPKPWKTFTEDIKDIEQEILVAHYTSHPMGKKTKKRLRDNKGHIICDADKQPLYAQGDTARGALHNDMIYGMITNSQDVDDKHPAGKQCAVKRISLKEVDEKQVVDPIVKQVIMDAIAKYGNISAAIEAEQENGDGSIWLNHEKGVKLKRVRCFQDFAINASPIRPLRDLSLKEYKRSHYSLTNGNYMAAIYEGIDDKGKTKRTFEIISLFEAAQAYSKNAPLVPQTKDGYPLIKTIRLGDLVLLYEKSPEEIYYASREDLVKRLYEIVGMSDSGGLQIKLKYQQEAKPAGELKQVNGAFTANAPIDSFRMLRHSQFNALVQGQDFD

SEQ ID NO: 9875 - protein, 1403 aa, unidentified
  REGION 1..1403: note = Description of Unknown: Cas Enzyme sequence
MAQKILGIDLGTNSIGLALRNPDSSNEQLEYYSSIVFPSGVGNGQSGEYSYAADRRKYRSARRLYQARKYRIWATLELLINHQCCPLTIDDLDRWRKYDKTKGLKRQYPIDAIPFEQWVRLDFNGDGIPDYSSPYQLREELILKPIDWDSQIDRYKFGRAMYHIAQRRGFKSSKGETLKDSKESEDYSNIEISTSMKKSEEKKSKCLKDYMESHNLKTVGCAFAQLEREGIRIRNSEFQAVQSQYLDEVREVCLFQHIDTLDHTLFTGLTSTKAKEGTIFYRRPLRSQKGTVGKCVLEPSLRRCPTSHPDYEEFRALSFINNIKFRYNNQEEWKSLSPSERVNLYNDCFTRTKPTFKFEEIRKWLEKNYPGNQFSYDNHTINYRDYTTVAGCPVICRLKKIMGEDWRTHIFATNRTRTNYHTGETHSIAYNYEDIWHLAYSSDDYEALAEFAQEAIGFDQKQADELTRLWSAIREGYTSLSLKAIRNILPFLREGMIYSKAVALAKIPDILGRECWEEHRDDIMARIDIIATENDYNRCVLGITNTLISNYKSRTIDNQQAYHNTAYKLDSSDKKDVRNCIIDTLSARRWNAMTHEEQDCLQHDVEDLYQQFFSSTKREYYTIPRQSDKLKESLSNLFPEIPSKKWDKLYHHSMIDIFPSQKCQNKNTGDIVMSIKQLGTPDIGSIKNPVALRTLHVLRKSINQLLLSGMIDDETRIVVESARDLNDANWRKAIERYQKERDRENSAITEIIKEFRPNYSEEDIEKGRLLFEQIETGTINKEGISSLTNSSHMGKVKATKFATDMQKYKLWSEQKFRCLYTGKYISLTSLFDDNQVDIEHTIPRSISFDNSLANRTVCDPHFNRYSKSNRIPTELPNYEDIKERIKPWEDKVTHIKSQIELWKGYAKTAPTVERKNECIQQRHMWELELNYWQAKLRTFTVQKDDLDRGFRNSQLVDTRIITKYAFHYLKSVFNRVDVQKGSVTADFRKILGIQSVDEKKDREKHSHHAVDAAVLTMIPVAAKRDRMIELFYKGQEAPDSEKGSYLHQLDEEIKTCNVGNISKLVDTIEKNILVNHISKDQTLSQAKKPRYSGRKRIQGQWLQGDSIRGSLHKETFYGVIHDNENNKRIVIRKPLIKLTEKDLDSIVDPTLRHAIKTQIEGAMSTQNLTFAKAIEEPMYMLDKNGIPITHDRYGSPLSPIRHVRCFAKAGRGELKYETVLRIKQQTYPSKHNDKNTYYVQNDDNYLCLFYEGTAKGKHQREFRLINYYDIAQLHIKEVSVLFSEPEFATLKKKDSKNPEIIADIKTMPLKAIIKKGTRVILYTHYPDEVKDYNTDKLSNNLYIVYKFNSTGTPNIYLRHHLIAQEEKDCKDSKSYLSLKASNFKALIEHVDFEVDPLGNITFK

SEQ ID NO: 9876 - protein, 1107 aa, unidentified
  REGION 1..1107: note = Description of Unknown: Cas Enzyme sequence
MKKHILGLDLGVGSIGWTLIETEDDQPKRIVGMGSRIVPISKDDSDQFSKGQAISKNADRTARRTTRKGYDRYQLRRALLTQVLRQNGMLPERMDENVIDLWKLRSDAATEGKQLTLPQIGRVLYHINQKRGYKHAKSDDNGDSKQTKYVEAVNQRYKEIQEAHQTIGQHFYLELLRSKVESGNGSYYTFRIKDKVFPRAAYIAEFDQIIKAQKAYYPEVLTDELIDTLRNRIIFYQRPLKSCKHLVSLCEFEMKPYKTKDGKVVYGGPKCAPRTSPLAQLCAMWETVNNITLTNRNNERYEFSLDERRQLVEHLCKHEVLKLTDLYKILGITKKDGWYGGKTIGKGIKGNATLNQLRKALNGKYSEWLEMPIERIDAVDDETAEVFWQVSPKVEETPLFKLWHAVYSIQDADELAKTLCNKFGIDDQEVIDALCKIDFVKPGYANKSHKFIRRLLPYLMEGMMYSEACARIGINHSNSMTVAERDARPLAERIELLQKNALRQPVIEKILNQMINLVNRLQQEYGPIDEARVELARELKQSREEREGAYRRNNQNERLNKEIAAKIEEMGIRPSRSRIQKYKMWEESNHRCMYCGKTVSLAEFLNGADVEIEHIIPRSILFDDSFSNKVCACRECNHEKGNMTALDYIETKPASEVEAYKQRVDEAFKEGRISKTKRDHLLWHRTDIPTDFIDRQLRQSQYIAVKAVEILQQGIRQVWTSGGSVTDFLRHQWGYDEILHMLNLPRYRQVEDLTEIVHYEHAGQEHDEERIKNWSKRIDHRHHAIDALTVALTRQAYIQRLNSLNAEFTREEMLKEVEEANTVYNEKKSLLEKWILEQPHFSVDDVTNSVDNILVSFRAGKRVTTPARRAIYNGGKRTIVQRGLQVPRGALTEETIYGKLGDKFVVKYPLDHPSMKPENIVDPTIRALVQKRVAERGKDAFKEPLYSADGMIIRSVRCYTSLSENGVVPVKQDEQGRNIGYAKKGNNHHVAIYQDKDGQYQEMVVSFWDAVERKKYGVPVVIMNPHAVWDSIMEKDLPQDFMEKLPKDDWMYILSMQENEMFVLGMEEDEYNDAIEAKDYAALNKHLYRVQKISHADYWFRYHTETT

SEQ ID NO: 9877 - protein, 1224 aa, unidentified
  REGION 1..1224: note = Description of Unknown: Cas Enzyme sequence
MKKVLGLDLGVGSIGWCLLEKDDKNVPIRIIRMGSRIVPISTDEETGFTKGNAISKNADRTAKRTARKCYDRYQLRRQALVNLLRRLGMEPSKNLMLEQTPMELWQKRADAASKEISLVELGRVLLHINQKRGYKHSRLSNSDSKETAYVQEVNSRYDDLKAEGLTVGQHFAAKLKENEQLSADGKKYYNYRIKEQVYPRCAYEEEAKKILEVQSQYHSDVLTADACKEMMDIIFYQRDLKSCKNLVSLCEFESYTITKNGKEITIGPKVAPRTSPLAQLSSILETANNITIRNKRNDELYISPEQRKAIADFLATHEVLKLTDLYKILNIGRKDGWWAGKAIGKGLKGNTTKCQIRKALSKLPKDLVDSLTAFQLEFEEYVDQETGEVRKRINNTLVEKQPLYRLWHLIYSIKDVDELSGALRHLGIEDEESIRNLCDLDFRTAGYANKSAKAIGRILPYLMEGVMYSEACERAGLDHSRRIDPNRTLLKHLPPIQKNELRQPVVEKILNQLVNIVNALLEKEGTIDEIRVELARELKQSKDERNETFKRNNQNERQNKEYAERIKEYSLTPTRNRIMKMKMWEESEHACMYCEEPVDPIEFLKGADVEREHIIPRGLLFDNSFTNQVCSCRRCNSKKGMRTAYDFIADDKGQEGLNAYIDRINDLFDKKKISRSKLNRLLVSHKAYISRKAQGKETEEDKELWENFIDRQLRQSQYIAKKSVEMLLQVCKNVYTTSGSVTDFVRHQWGYDELLHDLNFDRFKKAGLTAMVKQLHSGKEVEVERIKDWTKRLDNRHHAVDALTIACTTQGMIQRLNTLNASREDILEELNSKDQRLVDPERSMLEKWVFVQPHISYSEAKNEIDKIVISQRPNTRMTVPGKRYVTKNGKRTLAQTGIVVPRGALHAEFVYGRIMKQEPDGITMTPQYVRKYKLGIGTQGFLFNGKEFYKEELKKDSKTGLSKIVVTDKIKEVLDKIVDGGIRQRILDRLNRGFEEGADYRANVAQALTNLKNLDEDPIYSDDAKTRPIRTVRKYVSSSTMVAVRKDDKGKPVAFVEPDGNHHVAFYKDENGVISETIVTKWQAVQRKLNHIPIIIDNPSQTWSKVLGRNNVPEELLQSLPKDSSSFLLSLQIGEAFIMGMEEAELQKALEEKDMQKLAEHLYFVQNISSNNYRMRRHVESSFDTTDMNKEDQRFLNIKSIGSFFNSNPHKVKITILGDIIADV

SEQ ID NO: 9878 - protein, 1114 aa, unidentified
  REGION 1..1114: note = Description of Unknown: Cas Enzyme sequence
LSKSHPLFQAFRTWKFLQNLKIYRREDNVDGKLIIDNDVTAEYITDVAELYDKVSGMKEIKQNQLLKLFRLSDKQYRWNYVEDKTYPLNETRYEINSRLAKIGAGFFLSEESEETLWHILYSINNREELHAALRTFAVKLERTSLAKDFFGGKTDDEKVVFADSFADTFCKMKQFKSSYASYSRKAIRRMLSLMMSGSHWSEDDIDAKTKANIEKILNHDFTAPLDRLPEKVIAELGSKHCMADFQGLPEYLACYVIYGRHSEATDMSIFESVEDVDRYLKFEFRKTNLRNPVVQGVLEEATKVVRDIWAQYGKPDEIHIEMGRELKLPNDKRAAVTQRALDNEHTNLRIKKLLMEFAKPEYDIDSVRPYSPMQQDILKIYESTVLQEQAKTIPDDVKSVVDNLGNPSKKVTSSEIMRYKLWLEQKYRSPYTGEPIQLSRLFTPEYEIEHVIPRSRFFDDSFNNKVICEAAVNKEKSNMLGMEFINKCHGQLVRCGAKTVRIFSVDQYQTFVKEHYSGNKSKQEHLLADDIPDKFISRQLNDTRYISRYALELFSKFVREEGEEEATSKHVVSMVGSITDRLKKEWGINDVWNELVAPRFERMNRLLNTNAFGAWRSENGKQFFQTNIPVEYAQGFSKKRIDHRHHAMDAIVIACATHKHINYFNNENAKSKQFRHDLRNALCTKSAVDDKGNYVWTFNKPWDSFTQDVRNVLQGIIVSFKQNLRIINTTSNYYCHYVNGKKVMDRQEKGDNIAIRKSMHKATVFGKVFLRETKAVKLADALDNVSAITDKAKRKVILDVIASYHNHADKKTLVRYFKDREYKVNGMDFKKVEISFIPKESDKYAVRVRLSDSLFAKRSDIEKNLTDDSIKRILYRHLDKYMVDGEDNIKEALSPNGIEDMNRNIKELNGGKDHKPIYSVRKFEKSDAKFPIGFVGSKDKKFVEAEKGTNLFFAIYKDENGDRSFMTIALHEAIERQKQQLPIAKQEYDDAKHHYTLLFTLSPNDLVYVPQSVDEHVAIDNINGAGQIYKMVSSNKAECYFVSSTFASPILNKVEVSPLNKSEKPWHSVPLRNYGELRDGAIEIAASDMYNTAIKKTCYKLSVDRLGHIKNIIG

SEQ ID NO: 9879 - protein, 1201 aa, unidentified
  REGION 1..1201: note = Description of Unknown: Cas Enzyme sequence
MKFILGLDPGIASIGWALILEAENGDETSRIIDSNVVKVDFENFTYVNAKGKISDGNPIKMFQKGYTVSPNLVRRQKRGAHHNLQHFKLRRADLIELLRENGIIDKDALLCEDGKGTTYETHMLRSKAVSEEISLNELARVLLMINKKRGYKSSRKGDVSLDVEDMSAYLAAITGRSKLLTDYHQTVGQYLMSQLTLHPLQGIKHQTFYRKDYEDEFEQIWKTQTQYHPELTRKLKKEIKNRIIFYQRPIASKKGEVGLCELESKEIEIEKDGKKKIIKTGSKVCPVSSPLFQEFRLWQRLNDTILTNTTTLEQRYLTQEEKEKLAAELSIRNRLPKRDVIKLLVGKQARNFDMNFEELLGNETQSKLVNAYLKILELTGHDKMNLKKLMAQDVKNTIRQVFSGLGYHTEAIDGEIKQQSDIYLQPFYRLWHLLYSFPGDNSRSGNDKLVERVKEFFGFDNIEYAKTIADITFPDGYGSLSAKAIQKILPKMKEGHQYNTACELVGYRFSKRSLNKEENAERILQKYLNFIPHNSLRNPLVERILNQMISLVNSLVDEYGETYGTFDEIRIELARDLSKNAESRKRMTQDIESNKNEKDTCRKELINILNKRGYKVNYVSENDILKYRLYKELAPLGYKTLYSKTKVDIIDLIVHRKFDKEHIIPKAKSPSNAFSVLTIELSSINEEKGDMTALDYVRWKYGEEEARQYIARVNDLFKRKAISKAKKDNLLKTAADIPNEPLNRDLGLTQYINRKAYEILHTITRKVVPTTGSITSRLRDDWQLVDVLQELVWDKYNRLELINTYTDKDGKTVRKIKDEAWTKRNDHRNHAMDAITVAFTKPAFIIYLNSLNSQGEQRQQMLKMRQDNLQRDKQGNWRFNPPMPLGELRAEVKRQLENIIVYQKTASNAVTPNLNITKTKKKKEGNRQVQLTPRGKLHDDTYYGSIKKKKRGEGEVVIFTKRVEVNESLKVDDVVDKGVQDILRNRLLEYNNDSGKAFTNLDENPIWFNREKGICIKKVVVRVNKELRPIHKKRNHKGELLLDKDNNVQKSDYVLTNNNHHVAIYEDELQELHEVVVSFFDAVERGIHGEPVIDKTHNADKGWRFLFSLQQNDCFVFPDVDFDPLSIDLTAQGNYASISPHIFKVQSISKGDYRFRHHYDASKDFNSKLKNLTWKRIRTLNDLKGVVKIRITKTGRIEYAK

SEQ ID NO: 9880 - protein, 1154 aa, unidentified
  REGION 1..1154: note = Description of Unknown: Cas Enzyme sequence
MKYRLSLDLGVGSIGSAVVELDEQNKAKQIIDAGVRIFEVSEGALDRRGKRTARKNLLRTRKRLELLAKKLYENHLWVNENPEGTPNLIAKSPYKIRYDAIYQRLDNPNYVGRAILHLAKHRGAGFVSAAEDWQEEPLDEGEKSKNKNTPYDMILSHMKVTNSTTIGEYFYKRLQNKETRVIRQKDYALKSNIVDYAIPRWLVKEEFNKIWDKQTPYFRQMQKPGLKKEIYDILFYERPSAPYATGKCIYFQDEDRLAKAHPLSEMRRIYEEVNNIRISTNDMPQRRLTMEERDRVVEELLMNGKNAGKQAIKKLLGFSAQTKISLTDDKVIGAYLYSKSDFQEIECFRSLSSEQLEQIIDFISNPINPDDKNGRLYNEDDLVTKLMGILKVDNENQIGKLLTKLPKGRTMLGKTATNLILEELKKAVVSHREVTDKLKKNNPHFEAAEEIACQMQGKYEELPYYGKVLPTDVQPLPPLVIKNNGSNLNENEIKYGKIANPAVHMILNQIRLVVNEIIKIYGRPYDINIEVGRDVGLSTRRKSELENEQKRNAKYNEEAIKYLKEHNIFINNKNILKYKLAKEQGWRDAYNPTVEISRDFTGFEIEHIIPQAKHGSDTYSNLCLVSRNDNLNKSNDFAYDYFAKKYQNQPEMIREILKNAHERMPKKAWRFEPGAKEKFEDGGDEDETNRYLTDTRYVAKMAMRYLRVIVDDDSNKNRVLAVKGAQTAELRKRWNLQGLEYDLMGVDVPRYVDCKPYWVEQTTGIVVDGREKPDIDGNWKFYDKENNPQWFAKPRIDHRHHAMDAITIACISRSLVQKMANKLEISHNKTEMPLTSVESLGDFRRQVLQVLQNVKVSHKAEHSRAGQFHEETGKAVLCQNPDDKNSLITVYVRKILNVVKSFNDLNKILIPDSIKNEWHPSIAENKAKQAKLIEDFKLYCNTAEQILLAENEKAVTDGKKEIAITEARILSKAFKIIQDKGLWKGDKFLCYENSSALVYIPKHKIAYKSGNNHRIDFFEKDGKIGWEVIKQFDANQADFIPQWQKDGGKILWSLHKGDLIELDTPDEWKEYANKEKCLAKIKKFSVGKLTIDYIADARATTKKKEEPPYLIVDSLSEKGLSFYLGHKARKVELTPFGKMKKKHKALWDGKKTAA

SEQ ID NO: 9881 - protein, 1085 aa, unidentified
  REGION 1..1085: note = Description of Unknown: Cas Enzyme sequence
MKKYYLGLDIGTDSVGYAVTDEEYNILKFAGRPAWGVTVFDPVSENSERRYFRSARRRLDRRQQRVHFIQELFAKEIAKKDEGFFKRLEASALFREDAGERYSVFNDKDYTDLDYFRDYPTIHHLIVDLMNSDEPHDVRLVYLACAWLVAHRGHFLSNIDKNKLSEIKNFDSVYSNFIKFFKDSAWDDPWECNDLDSFSKIIKEKTGVTAKYKKLVELIYGTSKPSKEATETFPFSHEHILKLLSGGTCKLQDLFDNEEYADKGSVSLGMDDDKLGEIMSGIGDDYGLIENLRTIYDWSVLVDALGDASTISEAKVQVYEQHKEDLKLLKDTIRTYKKDKYNEVFRTIGKDNYPAYVYHTEEKKGELKKKNKEDFSKFVLSVLKDIQPDEKDAEFFGKMISRLEARDFMPKQKNTDNRVIPHQLYWYELKTILDKAAVYLPFLNDKDDSNLSVKEKIEKVFEFRIPYFVGPLNKNSDYSWLVRTDEKIYPWNFEKVVDLDASEQEFIKKLTNTCTYLPGEHVIPKDSLCYHKYMVLNEINNLKINGKKIDVELKQSIYKDLFMAQKKVTRKKLLDYLISNGHIAKGEEDALTGIDININSNLAPQLAFKRLMENGTLSESDVEKIIERASYAEDKQRLLKYLNKEFAGLSEEDKKYIAGIKIKDFGRLSRKFLTEFEGVYKETGEVMTVMYALWNTNDNLMEILSDRYTFRENVESYCKEYYSEHSMSLSDRLDEMYISNSVKRPIYRTLDVVGDVVKAFGKPEKIFIEVTRSASDEMKGKRTKSRKQQILDLYAQCKDEDVKILQKQLEDMGEYADNKLQSDKLFLYYTQFGKCMYTGEAISLEKLSSKEYDIDHIYPQAYVKDDSILNNKVLVLSSANGEKSDVYPIKENVRDKMGSFWDYLKKVGCITPEKYKRLTRRTPFTNEEKIGFINRQLVETSQATKAIATILGEKYPDTSIVYSKAGLVSDFRHEYDLLKSRLFNDLHHAVDAYLNIVVGNVYDLKFSKRWFDVNSKYSVKTKTIFSHPVIVGGKTIWEGEASLAKVKSTAVKNNAHFTKYSFFKTGGLFDQMPVSAAEGLVPRKK

SEQ ID NO: 9882 - protein, 1056 aa, unidentified
  REGION 1..1056: note = Description of Unknown: Cas Enzyme sequence
MKKILGLDLGTNSIGWAVVNADEVIRKDNTTYLKPNSISCAGSRIIPMSADILGDFDKGNSISQTAERTRLRMMRRLLERNHLRRERLLRVLKIMEFLPEHYDAMVSRYGKFIDDSEPKLPWYKDEGGKMAFLFQDSFQEMLSDFKQHQPQLLADGKKVPYDWTIYYLRKKALTQRITKEELAWILLQFNQKRGYYQLRGEEEEEKANETIEIISAKILSVEKKEKDKKYEKYWYEMCLDNGMIYRATFYNDVTSWEGETKDFVLKRTILKDGNTKDELSFLPTTEEIDRMDAQRKARMYSKIKLRTEKEIENSHKTVGSYIYDILLQNPNQKIIGKLVRTVERKFYKDELIRILEVQQELIPELKDEALYQRCIEELYAANEAHRKSLSKPDYINLFVNDILFYQRPLKSKKSLIDDCPYEYHVSKDGKQHPIKCIAKSNPFFQEFRLWQFVQNLRIYQRERTITEGQLDLFTNTTVGKLQTDVDVTSEILRTEDDYVKLFNWLNDRSTIKQDTLFSSYFKVKKEKGKDKYPYRWNYVEDKEYPCNETRAAILSGLTKCNISADFLTRENEMSLWHILYSIEDKAELNKALKKFAQKHQLEESFVEVLSKTKPFKKDYGSYSEKAIKKLLPLMRMGNYWDEKCIDAQTRERIEKVINGEYDENIKNRVREKTISLTDIQHFKGLPVWLACYIVYDRHSEAKDIDKWENPEDIDLYLRNFKQHSLRNPIVEQVITETLRTVRDIWKQEGQIDEIHVELGREMKNPADKRRQMTERIQANENTNLRIKAMLMEFMNPDMGIENVRPHSPSQQDILRIYEENALDNLSKEDKDYDFVSKISKTAQPSKSDIIRYKCWLEQKYQSPYTGKMIPLSKLFTPAYEIEHVIPQSRYFDDSFSNKVICEAEVNKLKDRQLGFEFIKNHAGEIVQLSQGGTVEIMSVEAYEKFVKDYYSGNRTKMKKLLMDDIPDGFIERQMNDSRYISKVVKGLLSNIVREKQENGEYEQEAVSKNVISCTGSITDRLKKDWGMNDVWNHIILPRFRRLNEVTGRNCFTTYNR

SEQ ID NO: 9883 - protein, 932 aa, unidentified
  REGION 1..932: note = Description of Unknown: Cas Enzyme sequence
TTKEKMSKREVLKLLFDNPQHLDLNYKEVEGNRTVAAFFKAYQEIISFTGNGDYDFSKMSTDEILSLTSEIFQGLGYRTDFLTFNPLIEGKAFEKQPLYRLWHLLYSYTGDNSPTGNEALIKKIGEICGFEKEYANILANIILPLDYGNLSAKVIRKILPHMMDGYEYSKACEMSGYRHSARSLTKQELEAKTYKSHLDLLKRNSLRNPVVEKILNQMINVVNEIVDTYGKPDEIRIELARELKKSQEERALLDEAIRKTTAESEKYRKELETEFGILHVTKNDILRYRLYLELKQNGFKTLYSGTYIPREELFSKRFDIEHIIPKARLFDDSFSNKTLEVRDINIEKANQTAFDYVASKYDEQGVAEYESRVEELYAQKAISRTKRNKLLMKEGDIPADFLERDLRDSQYIAKNAREILEEMVPFVVTTTGAVTSRLREDWQLVDLMQELNWEKYDALGLTETFTDKNGKRVKRIKDWTKRNDHRHHAMDALTIAFTKRSIVQYLSNLNARSNRGSSIYGIEQKELHRDEKDHKLVFNAPMPIGELRAEARKHLMSILVSIKAKNKVVTKNINRAKKKGGHQEKIQLTPRRALHNETVYGRIKSFEAEYRKVDGKFTEETILRVCNQKYREALLKRLAAFDDDPKKAFTGKNSLEKNPIWLNQDHSHCVPTKVKLYRIVDVFTIKKAVDKDLKVDKVIDKKIREILQARLDEFGGDASKAFANLDENPIWLNKEKGIAIKRVKIRGKVSAETSVPLHVKKNILGIIIKSKEGKPIPTDYVNTANNHHVAIFIDADGVWHEHVVSFYEATACALLGLPIVDKEYHSEDGWKFLFSMKQNEYFVFPNEKTGFIPSEIDLQNPDNYHLISPNLYRMQKFSSSFYVFRHHLETNVEEHNLLRDTTWKRITSIKNLEGIVKVRVNHIGNIVAVGEY

SEQ ID NO: 9884 - protein, 935 aa, unidentified
  REGION 1..935: note = Description of Unknown: Cas Enzyme sequence
KKTKENIKREEKKKKINHTRFAYNEYDNKGNLNKDALYPSRAMYEDEFELIWSKQAEFYDILKNKDLKNDFHNAIFYQRPLKSQTRGFCEFEDGEFRIYKAHPLFQRFRALQTINQMAVDDIPLTQEQKQILKEVLLEKFTYSKDDSENALFNSGSTKEIAVNKDGMLSFNKIKELLGFNKSAKFNIEDEEKRKEIHADKTSYLLSRPERFGEKWFKIPFEDQCSIVEMLIGDAEDEVVKQFLQENYDLDDANCNEIMQAPLEVGTGSLSQKAIEKILPYLEEGLLYSDACKKAGYHHSWFDGDIEMLPELPYYGEVLKKSCVQDKNGQYRITNISVHIALNQLRLVANELIKKYGNPDFVAVEIARDLKMGTKELSKLNSNQAKNKKENDRIVKEIKEQTEIEPSREDIQKYKLWKMLAKDEIKRCCVYTGKSISIHDLFSSEVQIEHILPYSRTFDDSIFNKTLSYREANAYKGNRTPYEAFGDSKDGYNWNEIMERVKNLPKQTQWRFNKNAMQKVEEYLEKFGLKDIIARQLNDTKYMSRLAVQYLKHICKAEYYIDEKGKEHRKNNCYGLPGSQTALFREQWSLNDWKDKENDEKYRASHIHHGIDAFVIACMTRGQLQTIANNADKIEKSRNYENQKTERKALFENCKTPFAGFDRAKFNEICDKMSISFKPKLKNPKQENSTVGALHEDTAYALLEFEKINKDINKLDLKDLMNIIDEELKKIINEYGKTEQALNKCKEYCNNNKIKKVLLKGTDLNGVFVKREELSQFDEKKKKQKENNEDEVVEDNEQKNEGEKKKDNKKKKIDFIKSVIDTKAQKFIKDYGETEEAFNKFKKYCEKNGIKKIRCKSFADVSTYIPVFKTKEDRDEYHKAYENWFVFEGRSPENETKEQKQQRQDKEQELLKIVQQKALKAYKWFVGGNNFCADVI

SEQ ID NO: 9885 - protein, 1095 aa, unidentified
  REGION 1..1095: note = Description of Unknown: Cas Enzyme sequence
MAYAIGLDCGITSVGYAVLELDSNEEPCRIIRLGSRIFTAAENPKDGSSLAKPRREARSARRRLRRHRFRLELIKDLITQKGLLSREELDSLFEGRLTDIYQLRTEALDRALTNEELARVMIHLAQRRGFKSNRKADTADKEAGKLLAAVTENDNLMKEKGYRTVGEMYYKDPVYSEVKRNKGEKYLNTVSRAHVEAEARLIFEKQEQFGQAFATQENSEEYLGILLFQRSFDEGPGGNSPYGGAQIEKMIGKCTFFPDEKRAVKASYSFQLFSLLQAINHIRIVCNGETRVLTEDERKLIADLAIESPDINYLRIRKKLALPDEAMFTGVRYEKGKEEENEKKKKFNFLKPYHEVRKALATAGLDIKDYDKDRLNIIGYIFTVYKNEDKLRAALAENGFNEKEIEALLNLPSFTKTGHISVKACDLIIPHLQEGMTYDKACAEAGLDFRGAENPEKLKTLPARTEDMDDIKNPVVLRAISQTVKVINAIIREQDESPVFINIELAREMAKTLDERREAESSMKDNMAYNERIKEEIKNHFGTINPTGMDIVKLKLFKEQDGCCPYSLKSLDYERLFEVGYVDIDHIVPYSISFDDSYKNKVLVLSEENRQKGNRLPMEYLEGQRKEDFIVWVNGSVKNFRKRQFLLKAKVTDEDLENFKVRNLQDTQHLSSFLMNYIRKNLDFAPSVTGKKKRVTAVNGAVTSYMRKRWGIQKIREDGDLHHAVDAVVVGCVTDGIIRRVSEYSKRRESYAYTGENNEIAVDKRTGEVKARFPAPWPHFRQELDIRLSNNPARLLNEKMLPNYMDVEIENIKPCFVSRMPNRKVTGAAHKDTVRSPKALSEGMVISKKAISELKLDKDGEIEGYYNPSSDRLLYAAVKERVELLEALKKDGSKAGKERYKTALSEPLYKPKADGSPGPLVKKVKIVEKTSLMVEVNFGKGVAAHDTMVRVDIFFVEGEGYYFVPIYVADTVKDELPNRASVAYKPYDEWKLMDDKDFIFSLYPDDLIRVTAKKDYKMALVNKDSTLPKEKLCNGEMLYYRGAGISVASIQVVNHDNTYIINNMGIKTLVNIEKYQTDVLGNYHRVKNEKRQRFG

SEQ ID NO: 9886 - protein, 939 aa, unidentified
  REGION 1..939: note = Description of Unknown: Cas Enzyme sequence
MKTILGLDLGAASIGWALINEQKNKISIVDLGCRIIPYEGTEGKDFTKGAGESKNALRTKYRTARRGYDRYQLRRKYLVNALVKSNMYPDETLKNLPKDELWELRNKAVYSQITLKELGRLLLWFNQKRGYKSSRSDANVSKKDTEYVSLVKSRYEKIKELNLTIGQYFYKELSKNPFFRVKENVFPREAYIEEFDTICNTQKAFYPDILSEDFISKLRDEIIYYQRPLKSQKGLVSVCEFEGFWKVGKDGKEYFVGPKVAPKSSPIYQLSKMWENINNIKIGTRNGQNIELTIEQKQAIFQHLDNNEKLTVTDLLKILHIDKKDCFINKQIEKGILGNITKHAIQQCFDKSKEYNHLLSLNLNTIETEKQGYLIDKKTGEILNEKPIRYIDSNIEKEPLYQLWHTIYSIQDTQECSNALQARFNIDPDIADKLAKIDFNKHGFGNKSAKVIRKILPYLMEGDKYSEAMSYAGYEHSDSLTKDENLKRKLLNLLKPIEKNSLRQPVVEKILNQMVNVVNAIIEKYSEKDENGKIIKYFKFDEIRVELARELKQSKEERNETDKAMSKRQRENEIIAKRLAEYGLRATRNNIIKWRLYEEIDNKEKKLNAICIYCGQPISLTEAIKGNNIDVEHIIPKSKLFDDSQSNKTLAHRHCNATKNDRTSYDFMKSKPAEVFDAYVERVNSLYSNFIINKAKRDKLLMPEEKIPNNFIDRQLRESQYIARKSREILQTICHNVWATSGPVTAELRHLWGWDDVTMNLQFEKYKELGLTEIVEWESEHGKNKHQKEVISGWSKRDDHRHHAVDALTIACTKQGYIQRFNTLSAEKTKEDMKNVIEERSVVFNEKRSLLEKYIISEQPVTVSEVEDAISNILVSYKPGKKVASAGKRKTGKRGNKKVVQTGIIIPRGALHEEGIYGSIQQYNKDAYTNEVNFKSHIV

SEQ ID NO: 9887 - protein, 1090 aa, unidentified
  REGION 1..1090: note = Description of Unknown: Cas Enzyme sequence
MAIRFGFDMGTNSIGYSVIELDSHGNTTELIDLGVRIFSDGRNPKDKQPLAVGRRIARGMRRRRDRLLQRKRLLVNQLIRDALFPTTQEEREQLKILDPYVLRKEALDRMLEPYELGRALFHIGTRRGFKSNRISDSKDTEVSSQTDRMEELSKNIFESNSRTLGEYLYLRQVQNQGTRFKGGEFNAYPSREHYHQEFLAIKGRQATYYTFVDWDKIEHIIFDQRPLKQQEKGKCQFYIEEDRAYQALPSAHHFRMAQEINNLRFNDLYGNTYTLDDKEKDVLFSMLDNCKTLSFAKIRTVFNHIEGKFNLEDERREKLLGNETAFTMRNKKYFGNIWDTLTLEAQDTLIEKLLEMENDDTILQSLDCFKLNSEQKTALLSWKGSRKVGKLSTRFMRECFEIMMREHIRYDEAVRKMSLHHSNNPIVELQPELPYYGKVLPDLVMGSNPEAPEEEPEKKYGKIANPTVHIALNQLRKVTNSLIAEYGLPDQIVMELSRDISDSAETRSKHFSEQAKRGRENDFIRTELKETFNIPFPKAWDIKKYKLWIELGTDSNVRCCPYCGKPIPAYKVFTQEIEIEHILPYSRTMLDSMSNLTVAHRRCNQMKKEQTPYEAFSHNPGEYNWNKIMERAEKLPNHKGDKFLKTAIDDFEQKSTFIARQLNDNRYLSTAAKKYLSSICPSNQVWSIRGQNTSFLRARWGLNTLLSNSDDPFFKNRSDHRHHAVDALVIGLTDRSLIQQMAHLNINKDATNHEVPPFPFKRSEVEAQIRNTLVSHKIDHGHQGRMYKETATGRKLIKTLVPVNSLSEEQVPLLVDESWRMNFIKAKEKGISFRTRRNQIMKKFLEEKQNNNPMVQVYKEVWVTRVPIVDLDATDIKAHRILNKRLDAQISEKTIDVLNDKKLLRERLLELSKEWNIKRVRYIPKGQLFSQIKSVPNKWYEDDGVCYTRIWRVPEKATKFNGEFISYKQAYDEAQGKMLLRPKELHPASKRIMTLYKGDIIKITPKEGQSYLAKVAGYSTTQNKIDIQPIYASGSLGEWKTTMNPYITPNADFWSKVTTTGQNYISINVLFNSNQIELVKINPIGRIVHK

SEQ ID NO: 9888 - protein, 1089 aa, unidentified
  REGION 1..1089: note = Description of Unknown: Cas Enzyme sequence
MKKILGLDLGTNSIGWSLVSTNEENQPKKIEGIGSRIIPMSQDVLGKFDSGTSISQTAERTGYRGMRRLRERNLLRRERLHRVLNILDFLPEHYKKSIGWDKDNYKTFGKFIDNTEPKIPWKKNGSGEYEFLFQSSFNEMLNEFSLHHPAIITNNKKVPYDWAIYFLRKKALSDKITKEELAWIILNFNQKRGYYQLRGEDEENGNKKESVVQLLVNEVIEREVDKKNPKRKWCDIKLENGWTYSSTFFMEPDWVGLTKEFLVTEEIDENNEVAKTKDGTPKRKLSILPTFDEIDLMSQADKDKIYKKIKAKTEATISNSGKTVGCYIYDSLLANPSQKIRGKLIRTIERKFYKDELKAILEKQKEFHPELKNSKLYSDCLNELYPSNKAYLNTITSRNFTYLFVDDIIFYQRPLKSKKSLISNCPYEERVYLDKEGNTQKSTLKCIAKSHPLFQEFRLWQFIGNLRIYEKEKNINGILKNDVDVTVEFLKDEDDYVALFDWLNDKKEIKQDALLKYPVFGLKKDAVKYRWNYVEDKPYPCNETRYLIISRLEKLSIALGFLTKEIELMLWHILYSVEDKHETEKALRTFSKKNGLDEGFVALFKRFPNFKKEYGAYSAKAIKKLLPLMRKGKYWDEQAIDEKTKIRINRIIDGEFDEKISNRVRDNAISLTDINSFRGLPVWLSCYIVYNRHSEVKDIAKWEKPEDIDNYLKLFKQHSLRNPIVEQVITETLRVVRDIWVKFETIDEIHIELGREMKNPAEKRKRMTQQMSENENSNLRIKRLLMEFINPEFEIENVRPYSPSQQEILRIYEDGVFNSVSEIPSDVDAIIKKFKESEAKKQPTRSEILRYKLWLEQKYRSPYTGEMIPLSKLFTAAYEIEHIIPQSRYFDNSFSNKVICEAVVNANPYKDRELGYEFIKNNENRIVSELSTPTKTVRIFTAQEYEQFVKENYSKNPAKKRKLLMDDIPDDFIQRQLNDTRYISKVIKGLLSNIVREKVDGEYEQEAISKNVITCTGGVTDRLKRDWGLNDVWNNIVYHRFERLNELTKSNQFGEWDNKDGKRVFQTTVPIEFQKGFSKKRIDHRHHTL

SEQ ID NO: 9889 - protein, 1347 aa, unidentified
  REGION 1..1347: note = Description of Unknown: Cas Enzyme sequence
MTKILGLDLGTNSIGWAVVEKDNEKFKLVDKGVRIFQEGVKIEKGIESSKAAERTNYRAARRLKYRRRLRKIATLQTLCEYGYCPELSRNELNDWRYKKLYPLNKDFINWWRTDDKSQKNPYYFRFIAATKKLDNNDENDRFIIGRAFYHIAQRRGFLSNRLEGTQESDGAVKKNIQQISAEKGEQTLGQYFYDKYLNGEKIRDQYTHREDHYLEEFDKICEIQNLPIELVQKLKNAIFYQRPLKSQKGLIGKCVFESKKQRCSVSHPLFEEYRMLCLVNNMKIKTPYDEKMRFLNRSERIKVIERFFLKREHFSFEDLAKTLAPKNQYKYYKSHGINDEDYLFNYKMNTTISGNPVSARFKDFFYNEFLNDDYCFQINENGELNKIVQDAWHALLTFDSEEKLGKFAEIKLGFSAEIAKEYCKINLKKDYASLSINAIKKILPYLREGMIYSHAVILANMINSVPKEIWQYPENQKEISDEIVRIIQTQNEDKSIIEIVNGLIKTCRDSGEVWSEEAEDYYKENLKESIINYFGKNRFESKPEIERNKILNDANRLFKKQMQKGNDRGEFIKVKTIDERVKTFLTERYKLDEKQLGRIYHPSAIEVYNEAKRAEDGRRYLGSPMISSVRNPMAMRALHQLRKVVNELLREDIIDENTKINIEMSRGLLNANERKALQNWQRDRETLRKQYADKITEHYKNHGYSTEPSNDDVLKYQLWEEQNHKCIYTGNEIGLSEFLGANPKYDIEHTIPRSLSYDNSQVNKTLCDNRYNRQTKRNKIPFELGNYNEIKQRAENFWADKIEDIEKQIQFAVKQSKGAPDKDAKDRAIVKRHKLRFERDYYRDKLTRFLMEDVPQGFKNSQIVDIGIITKYSRLYLQTIFNKVYTVKGNTVSDFRKMWDIQKAYEKKERVNHIHHCVDAIVIACMTKENYEELAKYYHECEDAFINENSVRPYVQKPWKSFTEDILKIEEDILVSHHTPDVLPKQSKKVLRKRGKIVRDSAGKPIYQQGDTVRGSLHQQTFYGAIERELPNKKGEIEKQIKYVVRKPLDGLEDSNIKHIVDDKVREIIENARIKEKELKKEIEYIEKKLKNAEEEDEPALKDEINRIKGLIKNLYSLPNKNGEPVPIKKVRIYTPSVTNPIHLKKQRDKSQKTSKLYKEHYHVANDGNYLMAIYEATDDKGKVKRDFEIRTNLEAGEFFKLSVQKNLKAQGIKGYEGLVPLSKINGNLELPLKAILKIGTMVLLYENSPDEIWELEDADIKKRLYKVIGLSNQRIVRPSGKIDEYATIVLRNNQEARQASDLKTLDGVFTSDEEYKPQRKLNHNQFNALIEGIDFNLTTLGKLTKL

SEQ ID NO: 9890 - protein, 1329 aa, unidentified
  REGION 1..1329: note = Description of Unknown: Cas Enzyme sequence
MAKEKSTYQIGLDLGVGSIGWAVVDENNKLVRRRGQNLWGVRLFDEAKAAKERRLFRRQRRTINKRTWRLNLLKNELRSYVLKEDSKFFERLAKSQTKPEQYFLFDSKYNDTTYMREFPTISHLRVALQDEKKCQDYLNRGIYYRLLYLACHDILKTRGNFLSSSTLSGSSSNSIESINASIRSLIESLKEIDELFDLDYSFVQQALSNHLSGKEKINARKSDKATTFLKAILGYKFDLNKILEFSDEKLDYDFNSETWEESLTGDEVIDGILLNLFEIYRSIRLNVLIGEHKSLSYAKVAIYETHKRDLVNLKKDIKKIDETLKTNYFEELFLIDDTKKISYTNYVGKLLKDGTKKSANKKTSRDDLIKKLESIKKEYEDKTSDTKLLQFISNDGFLVKPTNKDNRLIPYQLHFSELENILEVFQKLTNTEASKEQATHIKQLLKFKVPYFAGPLSNHTGDESSNYWLVKHHKFKDVKVTPYNFNEVVNKRETNKAFIGRMLRSCTYIPEEICVQQETILYQTYVFYNTINKVKINDTFLNKEQKQVLFDNLKTGKTLTKSRIISILGLPKNTDFTGFSKTDEEKPLQISLSAIKKFEKIFPEHKNNPFYQSFYDDVVNNITLIDSDEIEVRKDQINEIVKTYQTVNISSEQIDELARVKSTKWGNLSFKFLNVILFDDGEGELRTMIETLKDTNLNMMEILYKGENQTTIDKLSNKEYDLSDSNSLHEYLKTRYISPQARRTIIQANLIIDEIIKIMDGEKPTRISIEFTRENDAKKEETKSRMQQLSEIYKTLKLEHSQAELELEHLRTNKEEDKLKSKKVYLYFLQLGKDLYTGKPIDFDLLMSNSKAYDIDHIFPQSRIKDDSFDNLVLTSSVINGEKNNIYPLPKEVQDQNKDLWDYLVNKNLISRKKYERLTRITPLTDFELEDFVNRQKTTLDWINLEIANIFDIKYNDNKDSNFIIYSKSRHISSFRNEFKLLKFRELNDFHHAHDAYLNIVVGKLIQKNLYINSEGKFRTYNYERIIEKMMDKNIEYIKKIFKHHDILVTKKTTINSQGAYWDQNIVAPKDNGKNEGYAPIKNSLSVDEHGGYNGVKTAFFAALKINNKIVLEAIPTVDCGYFYDDKTFNIDKFRIYINNNFPKAEIVEPIIPIGQKVLLDGVPLRIAGKSNNNILFHNTSQLIFDSDTQKYLKKIFSIQKKYKGKKIEECVWKQAGFNKEKNVFVFEKFQNKLNKSYKNKRLFPNNTVSKINGKGNEKDIFNDYSLTDQIETLGVIITKLLKPNSSNQGKLFNVSYTDLQKNKVLKDKIRIIRESVTGFYTKTIDINV

SEQ ID NO: 9891 - protein, 1171 aa, unidentified
  REGION 1..1171: note = Description of Unknown: Cas Enzyme sequence
MAKKVAKRYDEQASEIKQRLGGRPYSIGLDLGVGSIGLAVAAYDRETAAPTDLVFATSRIFNPSTGATERRQKRGQRNSLRHRANRLRFLWKLLAEEGLMLPYSKKEVEDPARLRFSDEIIRTDPYEIRLRGLSAELTLAELGYALYHIANHRGSSSVRTFLDEERSADDKKLEEQERATSALAQSKGLGTFIEVLADFNANGHIGFRNVDALKDKNVPIPTRDIIIQELDTLLETQRTFKPEILTTQYCDRIRSAVLYENEKIVPEPDTCPYFPDEKKLPRCHTLNEERRIWEAINNARVEVPTQASVSSYVRYVSAPFSDEERATLFSIARSGKTLTPPLIKTTFPSMRQSTIILQGKEKSAQKIMGFRFSTLEEKPFWARFTEEQQDAFFYAWTNVPDDERLKAYLIESLHLSREEADDALRTIQLVGDYGPIGKTATKLLMKHIEDGLTYTEALAKALESGELVDHSVIETQATLPYYGKVLTGSTQALAGKYWHSAFKERREQSGFTKPNTNADEELFGKIANPVVHQSLNELRKLLNEVMDILGSKPEEIVVELAREIKVGAEERDRISREQGALEREATRIFVEYCVPNNLTRKYIERFRLYEDQGHICPYCLKAISVTEIVNNNTDIDHIFPKEDTGDNSYGNKVLAHVHCNREKGKRTPYAAFSASPLWPQIMHYLSETPAMRIKRRKFEVTDEQYAKYLENRGFASRFISDNSYIAKATLEYLRCLYDTDTAVRSLNGRETSILRKAWNLQGIAEQLGNKHIDKKDTSPTARKNRDDNRHHALDATVALYCTRSLIKFINTQSNKGILAEEIEQNLPIPNHQRHPNLTRDEYQEIFRKEILTFMELNAFVSYKSDHALNGQLVKDTMYSVIGANPKGDDLVFVVNKRVKDIPVKHGNLEEVRSAIQGRFTANLPKWYSPALKERIGALQSKNEIIIEHYTSMLGKAEDALAASNAELAAAGKKQLVINEKAISKKALEMTGGTYSLLSNNSRVKTFVAKEPTDTQTGVAFDTGSHLCLDFYHDKHGKLKGEIIRKVQAMDTTYQPSYRREGYELYVRLYQGDVCEVRAGDPTPAEGESNTAKTTRTKLPNAKQGRTFIVINTFTETKSGFQIFYSNLAKAKRGQDGSFSLGSVQSLDARKVQLSPAGLVQYVSPLLKDKEV

SEQ ID NO: 9892 - protein, 1398 aa, unidentified
  REGION 1..1398: note = Description of Unknown: Cas Enzyme sequence
MNTAVSKDSNQSEYYLGLDIGTASVGWAVTNTEYELVKKHRKHLWGVRLFDTADTAAERRLHRAARRRHQRRLQRQRLLKEIFQDKIDEVDPHFFERLKESSYHTEDRSGNFLSTLFNDESFKDTDYFAKFPTIFHLRSHLIHHPEEKPDIRILYLAIHSILKHRGHFLFPGESLESVSSFNLLLDALLKNVEDSLQCDLHVSCSPESVGSILKKKRRTDKKNELLKVLALTRTTEEEIEETPKKLIAELIKALSGTPFLLSLLFENESYKESELDKIEFDKEGFEDKKESIEVLLEPEEYALIETLEGIYNWTLLSDILNGEKFISDAKVSSYEEHKNDLKQLKLLVKKYAGNAYYKAFKDPSIQNNYAHYIGTGNKAGKKVQVVHKGKCLQEDVNKYLYNLLKPYQNDEDSILGSMLEKLEQKSALPKQRIRDNRVIPHQLHLKELQVILDNAQHYFPFLAIPDADGYTPHQKIVSMLTFRIPYYVGPLNTSHMEKGGNEGFCWMVRQQGKEDVPIFPWNWDEVVDKNASAEKFITRMTNSCTYLFNEEVLPKYSLLYNRYMVLNELNNLKINGEPISVDLKQRIYNELFLKSGKKTITLKMLQKFLMTNNIINKGDTSTIEGIDNGFANSLKSYIDFAPYLEARILSEDEIEKIIEWKAYYVDDATILKEKIAQELHEKLTSEQIDDITKLVRNYKGWGRLSRAFLEDIYHVDRATGEGYSIIHMMWETNENLMELLSSKYDYLDEIQRINNETLINTKFSYESLVKPLSVSPPVKRQIWQTLLVVHELKKVMGKAPKRVFVEIAREEREKKRTTSRKESLRILYDRCKNDITFNNALLESLETKTDAELRNDRLYFYYTQMGRCPYCGGKIELDQMNNTQLYDIDHIYPQSLIKDDSLNNRVLAHKTCNGEKGNSYPISSQWQNTMIGFWNVLLDRSLISKEKYARLTRTTPLNEEELFAFINRQLVETRQSTKVVASILKNLFQDEKTEIVYVKARNVSSFRADFEIKKSRLVNDHHHAHDAYLNIVVGNAFHTKFTADARNFIKELRRGDQFYNASNIFSRSIQRNGKSAWIADERYDVNRGKPKSEKQETGTIVTVRRTLENHQVLVTRQALEVSGKLFDLQPVRKKGLIPLKSSNPILNDTNKYGGYDSPSTAYFALVQYEKKDQLFRKLIRVPILFKKQLETDSEALKEYCEINLHLLNPKILVPKILKNELIIIKGYRMSLSGFTEQRVIANSAVQLIINEKQYDYIAQIEKYLSLLKKVNKEEVPGNAEILAESLHICKQDNLQLYEQLLAKERDSIYKQRPANQAKFLEEKISTFESLELWKQCEVLMQIIKLFDCKSRKIDFKALRGGGSVGEIKFDSVIKDTDARLVHQSPTGIFTKTRRIYEL

SEQ ID NO: 9893 - protein, 990 aa, unidentified
  REGION 1..990: note = Description of Unknown: Cas Enzyme sequence
MKERILGLDITKNSIGWGLIENDPEDDSNNKIIDCGIFQFKAGEIAKTGESPNTPRANARTARNTLKKAKKRKRVVFNLFVEHGLFPKVKIEQIFNTNKLSNAWELRSKALYEKLEPIDFGKTLYHIVKRRGYQFSRAEELDAKDGESGKLKEGGRALMLALEESPYLTIGEYLYHQERKTNHPQPNKKNELESVYDRTPHRSLLKKEIEIIFGKQRHFGNSFATQELQDKFMAIFSFVPEPQSTERLIGTCTLIPNERRAVRASYSADLHVVLTRFINCVIVNSVTNSETKLTEFIDLDKLLDLAHTQEEITHTYMRKLLGLSDTQLFKGLKYDTKVKKASKAKSNKDLFDEAKEEEVIDFSKSEKKILVEMKAYHEMKKAFGVDFTLVRDNIDVLNSIAHILTVERGDNARKERLSVVLKPLCEAKTDTIIEALLNTTPKVFKDTHNLSIKALDVIIPQMKQGLRYDQAIEIFGQKSQIRSEFLPVLSKTEIYVNNPLVKRTVSKLVTLVNEIIRYHGAFHKVHIETGKELLTKAEKEAIFYGNKEKEQAKKSAEKKIVEFFGENVKPSRKNIDKFRLWESQNEHCLYTGERIPLERLYEDGYVDIDYILPRSRSFDDSFGNMIVCHKQAKILKADKTPFEWFGNNEEKWEAFKARVAIPSLYGKMGKGKINRLFKENFNEQSASEYASRRLENSRSYACKVIQELFRDYLIMPKSPNGGKIQVQTRNAWLTAELRRQWTGYQSLDLYQDRMTAINAIVVAFSTQRMVQKLSQHFKWKESPFEKEKPEFEMPYKAFYADMHSMVQYDRSHKDKNGIMRNRLFIARSPIKNVTGQAHEVGLTPIHKAKDMLGVVVRNGQALAPHKTIARVDIFEKDDKTLMLPLYVADMKKPLGYKALRGGQFIEPISNDDFKFSIHPNDLLAISDNDSFSLGYYSSCDRSSSVVKIDIFEDKLMRLGIGKRKVTKYQVTPLGYYYPIKSEKRLSTLVK

SEQ ID NO: 9894 - protein, 1091 aa, unidentified
  REGION 1..1091: note = Description of Unknown: Cas Enzyme sequence
VSISNQPIATPCNGENIGIHLDVGHDSIGWAVSSRDRAGSIIFPGCGTVIFQADDCLASHRRQFRRQRRHIRSTRQRIERMGKYLVSQSLLTPEEIQQNTCAWPWKLAAGVLVGTQTLSWPQMWSVLRWYAHNRGYDGNALWSAHARSEADEADIKKNQASHELMAKYNTNSMAGTICAVLKVDPSSNKKSSSEIWYKGENISFDRFLVIREVSEILDAHLGVLEGLTQGIIDTLVANPLDNPNHLREHNIQNISVPRRFLGGLLFGQLAPRFDNRIIGICPISGDKLPLKASIEFLDFRWAMAVKNIRVGAESRMLTKAEIAKLNNCVGVVGGFTKGELRKAVSEITGTNENNLEGMLTSPEAERSFTRYPGLYVLKKEGLSTLIPENVCGKIAHALMRGKNLSFGKIAEEVSEKNQLTLESLVSQKMGKGKKRAKTEAEILDKILAIKREEGRAPYSREVMKKAVATIFEGKDPTEIGGMLYRDATKADVLPSEKIDTKTNNHLVRHRIKIVVELVKDIVEDYAENNPCRVSSVTIELARDLKDMSGKTNKEIEKEMGQRTAHHKKIAQVVEDELGIPPSASLIRKGRIADDLDYTCPYTGMKYDIRQVVSKAVDLDHILPRSQRPTDSLDSLALTFKSVNTLKSNRTALEFIQQCGGQAISVPEHGTLKNVEILTENAYLDLLKKFNSKAYRVTHKDDLRRMKRRVEKLKKLNVKDEVMTDGMLTRTSYITSLASQALRGYFQPFGRIPPILSIPGRITAAVRMQWNILGILAQVDSRLLDTNKELRLKSEIRSITHMHHAVDAITLGLTSLLIPANGTVWALMAKRRLNDAERALMHSTGAFNISAEGRAELKPLKELSTGTPASIKAALTEQRVVVHIPARKDGIRIEQNVWGITEVDSEAKTIKIRQRARDPKTNRIKIKTAEIPESKAFGFMPKGGEGKLSQINGIQQFSTNYALALDPEPAVIRHLKVWEQIGIIKARNGGKMPRLIRRSDLISIPKGKDAGVWRILSIKDAKAGFLVDMVRPQAIKAANKTDYSVINRHVNTLVQNGVKILKPKYTGVAQCPIMSSTSPRPKVSSPARGDNS

SEQ ID NO: 9895 - protein, 1000 aa, unidentified
  REGION 1..1000: note = Description of Unknown: Cas Enzyme sequence
LQNKGNIMKERILGLDITKNSIGWGLIENDPEDDFNNKIIDCGIYQFKAGEIPKTGESPNTPRANARTARNTLKKAKKRKRVIFNLFVENGLFPKVKIEQIFNTKALSNPWELRKRALYEKLSPIDFGKALYHLIKRRGYQFRRAEEMDAKDGESGKLKEGGRALMLALEQSPFLTIGEYLFHQERKTNHPQPNKKNELESVYDRTPHRSLLKQELELIFDKQRYFGNTLATQELQDKFMAIFSFVPEPQSTERLIGLCTFIPNEKRAVRASYSADVHVALTRFINCVIVNNATNSEIKLTELISLDELINLAHAQEVITHSDMRKLLKLSDSQLFKGLKYDTKIKKASKAKANKSLFVENQDEEVIDFTKSEKKVLVEMKAYHEMKRAFGEYFTMISDNDKSTLLNEVAHILTVERGDNARKERLSKTIQPLFKDKTDVIMECLLNTSPKAFKDTHNLSIKALDIIIPQMKEGKRYDESVEIFGKKTQVKSALLPILEKTEIYVNNPIVKRTVSKLVTLVNEIIRYHGPFHKVHIETGKELVTKAEKELIFYGNKEKEQAKKQAEKKIIEFFGESVKPSRKNIDKFRLWESQNEYCLYTGERIPLERLFEDGYTDVDYILPRSRSFDDGFGNMVVCLKQAKILKADKTPFEWFGHDSEKWEAFKSRVSVPSLYGKMGKGKINRLLKENFNEQSAAEYASRRLENSRSYACKVIQELFREYLDMPKSPNGGKIQVQTRNAWLTAELRRQWVGYGKKLEIYNGRYPALNAIIIAFSSQKMIQKLAQHFKWKESPWEKEKPEFDMPYKSFNGDLERLLQYDRTHKDKNGITRNRLLIARAPIKNVTGQAHEVGLIPIRKFKDGIGVAVRKGQAIAPHKSIARVDIFEKDGKTLMLPLYVADMKKPLANKAYKKGVPSDLIDTNDFKFSLFNSDLISIADDEKMLLGYCKTFCKFNLQITIDDFTGKMPHPAITNRNVVKYQATPLGYYYPIKSEKRLPTLVR

SEQ ID NO: 9896 - protein, 1118 aa, unidentified
  REGION 1..1118: note = Description of Unknown: Cas Enzyme sequence
MNYRIGLDLGIASIGWAIIEHDEKEEAKRIVNLGVRVFDKAEMPKNGDSLAGERRAKRSLRRVIRRKAHRVERTKFLLLNTLIKKEDLEDIYNLKTNVYDLRFKALQEKIDNLEFSKILIHFVKHRGFKSNRKSEESTAEGGKLIKAVKKNKEIMEKYGYRTIGEMIYKCPDFFTFDDNKNKVYLTRNKEDDYSKTFYRVEIEEEIKTIFKTQRELGNIHASENLERVYLKIFNSQRSFDMGPGGNSPYKIDGFEVGKCTFEKKEYRASKNTYTFEYFDALCRINNLKIKSSTGLRELILEEKKEIIKYIKENKELTFKKLRDLIKLGEEKQFSYLKYDENKLAKDIEKKKFIDMSTSYAIRKILFGEVKTSQINDLLIDIIDKIATIWSLYKEDEKRKEVLLKQIEKNKVNITISNEKIEKLLELNPKKFGNLSLKAMKKVTPYLEQGLTYDKACKLAGYEHNIILLEGNKEIKLKGEVLKEILKEVNVPVVRRAVSQALKVLNAIINKYGSPQLIHVEVAREVSKSFNERRDIEKQNEDNQARNERIKNIIKTEFGILDPSGTDIIKYRLREEQQGKCAYSQKEISANILFSNATQIDHIIPFSRSLDDSYNNKVLVLAKENQDKGNKIPYEYIGQNEARWNEFVKFVTVTIKSSRKKMNLLKEKFTEEDEKEWKEKNLNDTKYISRYILNVLQQKLKFAESEKYFKKPVVAVSGKITSYLRKVWGLSKIRENGDLHHSLDATVIAMATDSSIQKITNFLKYKNNAYKNQKAEDELYAFSNGQIIDKITGEVKKFIPKPYEHFDKELQYRIEFSDNNSENDLMKQELYKYGYTNEHLDDIKPIFVSRMPKRGMKGSIHDDTIRSAKFINNNKTVVKTALSNLKLSEDKQDIKGYPEQFKKDDRLLYTALVKRLKEFDGNAKEAFKNPFKKPKRDGSDGPIVKKVKLEETNNSYVSLKKMSGVANKGSMIRIDIFTKNNKNYIVPVYTSDYYNGVTPNKAIVANKKQEDWLEMTNEYKFKFSLYPNDLIYVKNFNKDISLTSSHKENKETLIRKEFMLYYVGCDINTNRIDVINSDNSFSGRISPLSFESFEKYSVDVMGNYYKVKEEKRQMLEKYN

SEQ ID NO: 9897 - protein, 972 aa, unidentified
  REGION 1..972: note = Description of Unknown: Cas Enzyme sequence
TVSRFAGFWPQKFLNELHTCFSLAYLALKPIMNGSTRQLEQKIFRLIFGDHPHAPYATGYCTLIPGQRRLPRMHRLAEQRRIYEQLANVRYVTAKGEYPLPRAVRDQLAQLAFDEGINLSSTAIKKHIAQDTGQTVVRVNLGEDAKTIRGFCQIQAFAHIPAWQALPQQDRDDMADFIANPAVKPEEENSVLLPEDEVIAALCKRLGLSGPEGEKFVSIALARLTPDRSKLGLEATRRILEKLIEGQQVEAIDPHTGEVTASWQPHTHRTAADACGFEAEEEALRKKRGTFAQLPYYGEVLRQDVTPIHPWHIKQAAPEEAAHGRIPNPVVHTALNQLRKVINEIVALYGKPQRIHIELARELGMSAAKREELQRDMQKREKENARIDAELVKLGLYPSRTNRTKFRLWEEQGKRSLFSYAEIKQSDIAACEIEHLIPQSHGGSDSYMNLALVYGNENFAKGNAFPYEFIQKNSPEAWQHISKAIAEKSFPKAKAWRFAPDASSRFAEQGDEDATDSRLSNTSYMAKIAARYLSMLCADVVAVKGGTTARLRHLWGLDGIEYELLGLPIRKHEYDPSTGEILLNNFGYPVRNPLWVAKPRIDHRHHAVDALVAACTTRSMVSRMVRDEKANKRSPDFPSPLGGDAGWFRQQLLEALRKVVVSPKKEHGKAGQLHDATKYLILQQDTRRNSGKTLIRYSKPVDTLKDKKNVSGILPGATIPQDLPAARVASAQCRAIRDAIELRYIIAADTIEARRQEARTNGGTVRELTEKAREEAIVAEAIALARKDWAIGATYPIIEYKTLVAVNDALQFGFEPKNNYCVEFYEDQNGAVGWECITRIDANNPAFVSELKGKGGRFIWRLCIDDVIEVELTPELKAKLKVPCPVGKCCMVVQKMSSGRLQCNLLNDARPLNGRTSTVKSGTVAFEEYKRWTSGELGLGMWCQLKARKVDISPFGKILHKHKKLWHGKKAT

SEQ ID NO: 9898 - protein, 922 aa, unidentified
  REGION 1..922: note = Description of Unknown: Cas Enzyme sequence
RIPYYVGPLNTAHKIGDGEEGFAWMVRHAGKEGEDIYPWNFDTVVDTEASAEKFIKRMTNKCTYLLDEDVVPKNSLLYNRYMVLNELNNLRINSEPVSVALKQQLYNGLFLTSKTRITAKRLKSFLVTNNIVDKNEELVFTGIDNGFTNTLGTWIDFGRYLDEGTLTETDVENIIEWKAIFGEDSEILVTKIREELGGKLNESQISQIVKLIRPYSGWGRLSRKLLEGIEHEDYATGELHSIISLMWDTNNNLMELLSSTYQFAEEIERINAEINTQHSFRYETLVEPLQLSPAVKRPIWQTLLIVNEIKKIMKSAPKKIFIEMAREKTEGGRTKSRKQNLQDLYASCKSDLAFDSVLKALGSGSQAVEASIEGRPDEAYRNDRLYLYYIQMGKCFYSGQSIELNDLYNTNLYDIDHIYPQSLIKDDSLNNRVLVKANYNSEKSNTYPIKAEWQDRMEPFWKMLADKEFISKEKYYRLTRRTQLTDEELASFINRQLVETRQGSLQVARLLENMFDKDDTRIVYVKAPNVSAFRSDFDIQKSRLVNDFHHAHDAYLNIVVGNVYHTKFTSDATNFFKKNWERTYNIRKLFYYDVVRQGQQAWEADAFIERHDRQKKCDRLSETGTIRTIRETLRNNQVLVTTKPVTGKGELFDLQPVKRGKDLLPLKASNPVLTDTEKYGGYLTKRSGYFFIAEHTLKGKRVKQILTVPIMQMGVIKDSESALIAYCQNDLALVDPIIIVPSIHIFEHLNMDGFEVCLRGITGNAIIAHGAHQLILPEVHYDYFVQLEKFNNILAKKKTDAMDANVLMLAERFSISKEKNLELYALFLDKEKNSIYSKRPANQSKLLSEKTECFKELDILQQTKALLGIVDLFTCNANRADLSLLGGGSRVGAVQFSSIIKGKVSLIRKSPTGVFVQEVPIS

SEQ ID NO: 9899 - protein, 964 aa, unidentified
  REGION 1..964: note = Description of Unknown: Cas Enzyme sequence
YIKNKVNNMTFLPKQRISSNGVIPYQLHYFELSQILNNALNHYDFLGETDNTGINTIEKITKLMEFRIPYYIGPLNPAHKNDKSKFTWIERLEKGKVLPWNFEQKIDIDNTAEGFIKKMTRKCSYLKGKDVLPKNSLLYSEYSVLNELNNLHVNGQPLDKNLKQKIFKQLFKKKKKVTQKNIKDFLISESIFKKGDQIDLSGIDGDFKNSLSSFISFSRIFQDIDNDYELQKEIEKIIFILTIFENRDMAIKRISKEYSNITKDQLKEIKKLNFIGWGKLSREFLEDLVYNVDSTGQPITIMYLMRNENKNLQEALYDVRYNLIKKVNEVNKGFLSEDNNYEGLMKDVYVSPGIKRSLWQALKIVDEVKKIIKQPIDRFFVEVARGGGKKGDRKLSRKLQISSLYKNAKVDKKEIEEMAKKLNLETDNNLRSDKLFYYYMQLGKCMYTNNPIDIDKLNTNAYDIDHIIPRAYLKDDSLNNRVLVERNANALKGDRYPISSDVQDKMKDFWKKLLSVKLITNEKYQRLTRSNDLTDEEKGEFINRQLVFTNQAVKALNEILIKDNPESKIIYSKASNVSIFRQDFGLLKSREINDFHHAHDAYLNIVVGNTYYTKFGTNAIYFFKNQKDKESFVNTNKLFYRNTPSAWNSDGSSKKTVLKMLDLKDILVTKMVTEKKFDFYDETIYPKKDGDKLFPLKTKDTRYLDTNKYGGYKSLKIAYFMIVKHDKGKKSIITIEGMPVIHDYKIKNNELSIQEVLVDYLGLVNPIVLVSKIKAGTLIKLDKAYANLAGKAKNDIITHNANQLYLSQDLTQYFRLIEKYIATQYKKEEIESYALDTYEVSVSKKESEPNPTIDKIKNLKLYDELLYKFQCGLYDGLTMQKLKEELADVRASFKEINVLQQAYSLYELIKIMHCNASTGNLSMFMEKASNKGSNTISKNITDKNITIYDESITGFYRRVRWQNQ

SEQ ID NO: 9900 - protein, 959 aa, unidentified
  REGION 1..959: note = Description of Unknown: Cas Enzyme sequence
MALLRRYRLALDVGSASIGWAVLRLASDTNTPTAIMKAGVRIFPDGRNPKDGTSLAVTRREARSARRRRDRLLKRKNRMLRQLIDLGFFPEAVEDRKELEKLNPYELRAIGLDSALTPAEFARALFHINQRRGFKSNRKTDKNENESGALKTAIKQVKEKIENNEARTIGEYLYKRMQNGETVRARLRQTRMAQDNGRDKIEKNYDLYIDRSMIEDEFEQLWQAQAQWNPVLFNESNKTLLKNTLLFQRNLRPVKPGRCTLLPELERAPAALPSTQLFRIYQEVNNLRYLDEKFDLVPLSKQQRDSIVEELNKNQKRTFEQIRKKLGFSGSIRFNIEDDKRQDLNGNKTASILAKKNFFGSNWFTFPENKQDEIVQKLLAEEDEANLIEWLINNTGVDEATAESLSSVALPDGYGSLSSEAIGRILPHLKEEVITYDKAVLAAGFEHHSMLDASRDGEVHDELPYYGIPLERHVGFGSGEPEDSLEKRYGRIANPTVHIGLNQIRLVVNALIKKYGHPTEVVVEVARDLKQSKEQKDRERKQQAENQKNNIRRREQIAGILGISEERVSRSDIQKMILWEELAYDPVDRKCPYSGVQISASMLFTPEVEIEHILPYSRTLDDGMNNKTLCMRQANRYKANKTPYEAFGAQEIAGFNYDEIVLRSKGMKKEKAYRFLPDGYGLWLKTDKDFLARALNDTRYLSKLTREYIKLICPNTWVIPGQMTARLRSQFGLNDVLGLHGEKNRNDHRHHAVDACVIGITDRGLLQQFSRANQQAREKGLERLVENMIPPWATYREHVARAVSNIWVSHKPDHSHEGGMHNDTAYALLEDGHVAYHKNNNGQKELIKEKLAVIRMTSHKARERHGVLPDGSLRPYKGYKGDSNYCLEIVTNEKGKWDGEIVSTFAAYQIVRKEGVDVLRNSEKSISGKPLVMRLMKGDMVRCIHNGQILTLRVAGISS

SEQ ID NO: 9901 - protein, 902 aa, unidentified
  REGION 1..902: note = Description of Unknown: Cas Enzyme sequence
KISQFEAHASDLKLLKSVLRRFSDPQTYKEVFKSEEKECNYSAYSGNHKSTSAVKSCNQEDFCKYIKGILKESFKDPLFESGEYYDMKCRLDEGTFMPKQTSKENSLIPNQLHKRELESILHNASKHYPFLCEADESGLTVMDKIMSLCTFRIPYYVGPLGQGSKNNWAVRREEGRVTPWNFEDKIDLDESAVKFIDRLINMCSYLPGEKVIPKSSILYSRFELFNELNTMRINGERISVELKKDIVRDLFENPQNNRKVTKKSIIGYLMRRGLSDGETEISGVDDTIKSSLRSESDMRRILGEGFDRRLADDVIRAIVVFGDDRSRLRKKLETDYSDRLTRDQLDSLSRLQYKDWGRLSERFLTGVRSNIQGVEMNILTALEQTNLNLNEILSDRYGFKKEVDRIRDEQSDSYDGRITYGLVEDLYVSPPVRRGIWRSLRIIEDILKITGHPPAKVFIETTRESGEKTRTVSRKDSLQKLFKSCKEEEWLKRLEGETDGRLRSKKYYSYYTQHGRCMYCGSGIDLNSLGDSNACDMDHIHPRSKKTDDSIHNNMVLVCRECNQRKGDAYPLPQEWQDRMRPFWKHLFENGFITKEKYGRLTRNHGFTEDELSGFIARQIVETSQTVKEVAGVLKKVFGDGTEIVYVKGNAISEFRRNNGFVKCRIVNDYHHAKDAYLNIVIGNAYNVKFTHDPRTFVRSGKDYTLNQERMLRYDIERGGERAWTAGEDGTISVVRKHMRRNNIRFTRFAFEEKGQLFDVNPVKAPKGQHPLKKGLDIDRYGGYNKISGSYFALVEHGKVNERIRTLQPVPVLLMNKKENGEAISEYLSKECNLEEPRVLIPRILTKSVFEIDGFRLHITGRTGNNITYTCAEQLILDYDSYDYCKNIYNHTTKSKESRKTL

SEQ ID NO: 9902 - protein, 1524 aa, unidentified
  REGION 1..1524: note = Description of Unknown: Cas Enzyme sequence
MKKILGLDLGTNSIGWAVVNEAERGREKSSIVKLGVRTISYDNFVNTATKTESMEPVKDFCGGKSISPNAGRTQKRGARRNLQRYKLRRNFLRKLLKDNHFIDEETILAEKGSGTTFETYRLRAKAATRKISLSEFARVLLMINKKRGYKSNRKTGIKDGGQPIDGMDIAKTLYEKGITPGQYVLNEILDKGKNYAPVFYASDLKAEFDRIWNFQKTFYPKMTDAIKIELEGKPSKNTWAICRDRFGLVGMKRTTKGLDLKKEDYKWRVDALSKKVGLEEMAIVLQNINDQLNNVTSGYLSAIGDRSKELYFGRQTVGQYQMAELKKNPNYSLKNQIFYRQDYLDEFEKLWETQAKFHQELTPELKKEIRDAVIFYQRPLKSQKGLVSFCEFEHKTIKVTIDGKEKEKTIGLKVCPRSSPLFQEFRIWQNINNLEVNGRQIELEDKKILFNELSIKEKISDRDALKLLFENDKELELNFKAIEGNRTQAKLFSAYQRIISLSGHGEYEFDKMPTNDVMEIVEKVFTGLGYNTKILHFDSGLPDPAFEEQPAYKLWHLLYSFEGDSSKTGNEKLVAKISELCGFEKEYAAILAGLTFEPEYGSLSAKAIRKILPYLKQGFVYSEACEKAGYNHSKRSLTNEQLENKVYKDHLELLPKNSLRNPVVEKILNQMVNVVNAVVDAYGKPDEIRIELARELKKSKKEREKMAEANSKSTKESEEYKKILQGKEFGLINVSRNDITRYRLYRELEGNGYKTLYSNTYIPREKLFSKEFDIEHIIPKAKLFDDLFSNKTLEKRQVNIDKSNSTAYDFVSERYGEKELENYVSRVEKLFKDGAISKTKHDKLLMKEADIPNGFIERDLRDTQYIAKKAREMLEDMVKFVVPTTGSITDRLREDWKLTNAMRELNWDKYEKLGLTEITKGKDGRKIRRIKDWTKRNDHRHHAMDALTIAFTKRSFIQYLNNLHARSDKSSSIYGIEQKELYRDKDNHGKLRFKPPMPLNEFRASAKQELENILISIKAKNKVVTRNINVTQGKDSRGKKLLNRTLQLTPRGQLHNETIYGSIRQPVVKEEKIGSNFTKEHIAAVTSPKYKDALLTRLAQFENNPKKAFTGKNSLDKNPIFLNSLHTDQVPEKVKVASFETVYTIRKEISPDLNVDKVIDKHIQKILKERLAEFDNNPKKAFSNKNENPIWINKEKGISIRRVTITGVKNATALHEKHDLNGNVILDKNGQPIPDDFVSLNNNHHVAVYRDASGKLQEKVVSFFEATGRANKGLPVVNKEFKKDEGWQFLFTMKQNEYFVFPNKKTGFDPAKIDLTDPKNYAKISPNLFRVQKIGSKAYWFRHHLETVVTRDIKDITYKRANLGAIKDIVKVRLNHLGQIVSVGEYVSLDGKVMNTKGFVHELPKKSTDEDKEDRVPKKHFKANDFENVQLILGTLDFVSKDKSMAKAFNTIFSDLTGYDLIKLMKKQGASKFSEGSKVLFKTYYDKLNRCSSTKKAIMQLRNELSLTNSDMQEIASYASKYQK

SEQ ID NO: 9903 - protein, 1119 aa, unidentified
  REGION 1..1119: note = Description of Unknown: Cas Enzyme sequence
MKKILSLDLGVTSVGYSVLENIDSNRYKLLDYGVSMFDKPTDKDGNSKKLLHSASVSQTKLYNLRKLRKQNLAKLFEEFGFGNQFTLLKSQRENQIINKWELRGKAVFERKLNINELFAVLYLIAKYRGYKSLDSGDLLEELCEDLDLECSNPKDKEKKDDEKGKIKQALKTVEYFKQNNSSKTVAQIIYELEIKKATPVFRNHDNYNYMIRREYINEEIESIIESQKNLGFFASTFNIGLFIKRLKETIDDQKESTTDLSLFGQCEFYKDFKVAHQYSLLTDIFKMYQSVANIIFNQNIKITKEQIKLIGEDFFLKIKEGKNIPDIKYKDIRKILNLKDEIKIFNKDDERIEKGKKVHNTIIKFHFVNNLSKFGDVFNEILDNPNKYEILKEIFDTLKLEKSPKNIYEKLNNILEAKTIIELIKNKSGSSINISHEAMIQFIPYFEDGFTLDDIKQKLDLSNEEDYSKFPKGIKYLHISQFELDNNLSINNHPVKSTVSAVLRLVKHLHVTYGVFDEIKVESTRELSQNDETRKEIEKVNRDNESKFQAIIENQEYQAIANLYGKNIKKYARKILMWQEQEFLDIYSGAVISVNDIFTNVVDIDHIVPQSLGGLSVKHNLVLAHRDTNLRKSNILPLDFISNKQSFINRVEKLFTEHKINFKKRKNLLASNLDEVYKDTFESKSLRATSYIEALTAQILKRYYPFQKSFKNVNNVSHIQGRATSNVRKVLQVKTKTRDTNIHHAIDAVLIGLIDKSWLQKLSNTFKENFGKIDNEARENIKKTIPLIEGIEPKELVDMIENKYNEFEENSVFYKDIFGKTKVVNFWISKKPMSSKMHNDTIYAKKDSGYFTVRKAIIPVFVSLDIKITTTPQKFEEVFKKEILDKLYLYHTNPKDVICQIIINRANEIKSLLQTFQTLDMKDKETISEAKIKLEELIHSPLVDQNKNMVRKVQFAQTNLTGFEIRGGIATKEKTFIGFSVKLLKNKLEYERIDISNYSKIKAQNDNSFKVYKNEIVFFVGKNGEYKGGKIVSFLEDSVIASFQNPKFPSAIKLQPEAFCTMKKGKDGKPEKGSTKQHYLATATGIIKLNLDILGNIISYKSIGIVDSELLEFIKSIKG

SEQ ID NO: 9904 - protein, 1376 aa, unidentified
  REGION 1..1376: note = Description of Unknown: Cas Enzyme sequence
MENRNVGKYFIGLDIGTNSVGWAATNDNYSLLRLKGKDAWGSSLFQEGSTAAERRMFRASKRRVERRKYRLKLLQEIFKDEMQKKDSSFFIRLNESMLHLEDRPSEMTYKSTLFLDNFKEKEYYKQYPTIWHLRKALIDGNSKAYSDIRYLYLAIHHIIKYRGNFLKEGQAFNDSFDEKTIENINKFFIDREDTEEDVLDVKDKKKLEKILLDEKTNKKEKIKKIKEIIFVNDKDIQNIISSLIVGGTCNFKKIINSEEDIKINFSENSDEKLLQLYSEIGDYSDLVSELKEIYDASVLQKLLKDYKYISESMISIYENHKKQLKDLKEKIIKTDKKLSLDGNSRYYYKIFKDKSSESNYCCFTHNGSNKKRCKIDEFNKFMIEQITEIKKVVNDINWENILNECEENKYMSIIALNSTSIIPYQLHEMELKKIIENAKNFYPNIDYSKIHKLLLFRVPYYVGPLNDKSNHAWLVRNSNEKITPWDFERIVDIKKTRVNFINNLTNKCLYLIGEDVLPKSSLLYQKYMVLDKINCIKINGEKISQENKELIYDLCKKTKKVTKKKIIECLKENNRIEIDEKVIIEGIDDELTSGLDSYIDFLKVGFIIEKPENGKIDVKNNQIKVIEEIIKLSTIYTDNKDSIKEIILEKYPSLDENKLKKALQIKVGGYGAFSYAFLNKIFCFDENGEAKTIIKLLEDTTENLQQILFNPKYNFKQIILDYNKGKSLSDNEIIEEKKMALSPMSRKSVNQGLKIIDEIIKIKKTVPEKIFIETMRHEGKKERTKSKKNAIKAFINSILSDKKILDNDFKESVEECKKELEKESITNERLNGKALYLYFIQMGYDLYTSKKINIEDVIDSTKYDVDHLIPQSKIKDDSMDNLILTCRTINQKDKGDIYPLSLVIKEETYKKCERIWGMLYKYKLISSKKYANLTRKTELTEEELNDFVNRQLVSVNYSNKVLKDILEIKYKNSKIIFSKASFVSDFRKDNNIYKIRELNDLHHAVDAYLNIVVGNVIWREYTSNIRKRVKEMVDNPSSNYSLNFMRVFSRNTQNLWNEEIKEKVLKIAKSNSQLLVYKPENDKYNLYKQTLYSANSSSNLLPIHTSSKDERLVKMSDVSKYGGYNSLSFSHLCVIKGCKGGKEIKYLYPVSLVDSIRAESTGESLAKIIEEKEGLTDVVITKGMERILFYSEFRIGKSNFLITGRSNNTLLQCKFNPLIIKQKSIEIMKTNQRFKKMVINIDAKIDSISFNVNKDGGIKELSKSNNLNVFDEIVSKSNSPIYFAYQNILSTLSNVKDRRGFFEEQSIYNQIVILEKLLILLSNTSAKSDLTLLNKEGEHTMKGFSGGISLDINISNIDIYWVQKSVTGLFGKEVKL

SEQ ID NO: 9905 - protein, 1088 aa, unidentified
  REGION 1..1088: note = Description of Unknown: Cas Enzyme sequence
MDNELVFAFDVGTGSLGLAARRGMEMIEAHTLLLDEEYGKRDELRKIIRAYRTRKAHQARHEYLDNLCRDVGIPVLEGRKGGQKGDPRLEREFPRKGDPTQYNSYLLRIMLLRGEKLEPWQVYKALHSAIQRRGFDPQVPWKNRASQKKEDDEDSQTAKKTVDYENRLRQAVGDNQKHHYPCYYAALQMGLWDPVTDKIKNRIDHMAKGVRNEVIPRALVARELSALIEAAARQFPALKGRALSLIYGPSGEAYASYFPENRQKLGIKEGSEEDWKSLLGQKIPRFDNRSPANCALIPRFHVARSADIAVYEATFLMKLKNMRFYRTDEAGLILRESSLSPKEIGALLKNAREEADEIRKEAGPKDAIENIAKAYSLTKTDWKNWLKNCADKLPATAPLPETLFQPALSNFEGKEKTPKKASVGKEENRPLPSNPLVEAPSVSGRSRYSRPAARLIRALVLSGESGEDFYKKNSGLCGQPGTLFEKLRIEDLDFLKLIKGPWENIYIPTMPLSGDWNSTTVRAEELDEKIEKLIGAQRNVLVAHRIGLFNEQLRRMIKTHGKPDQIAIEFIRDDFMGEEAKKKLNKIQNDNRSAWEHTRQQAAENNIQGGGNIRKLRLLREQDFKQDFKCPYTGETLSLSEIDELEIEHIVPRARGGSDNRCNTVVTRSATNREKGDRTPYEWLSQNGTFKEYCERVDGMKGLSKKKKMLLTAEDPLKLDEKWDSLAETAYIARLARDVAALRCGWQPGEAGERKLVQVINGALTARVRAINNLNSLLADREDQLDPEKMMKKVRKNKRHHALDAMVLSFIPEWARNPKLKKNYNLPPGIDREYFNKCVEQVVPYKCILTKSALQETFYGTRLLPDESGKIQEIVVTRLKISELGVSQNKFDQKNAKKEAKNILDPVLRAPIAEALENQSFDKEGWAAWCNNFRHPKSGAQILKVRARAQKGDKSEYVNVAKEGEAKGFRGQYKTAKQHQGYFIYLKKDKKGIEKPAVWPVYAWQSFKKEEEKLKAKNCHVVDFFQAGCLIEILCDYEHGEIIVQPGKYILRNIKKSGWFKLDRVQGVLPLSKIENIRENFRRVRKYP

SEQ ID NO: 9906 - protein, 1221 aa, unidentified
  REGION 1..1221: note = Description of Unknown: Cas Enzyme sequence
MQIKNIDFSRAAIINSWKNDPFYGEEAVVLGLDIGIEGIGIAVRKGKELVYCKSLMVSLPGPKPLAGRRTNRGARRARKNRRLRMRRLKILFEEHGLPWVNDDVMSRSDPFPMRYRAAYKGGLASKEALSICIRSLVAHRGYDFYALSSGEGGYPWGEEPTLKDACKWLSSSFVDDEAAEELYSYTEELMGSKGPLNDDERKVWEKAIDDQKIWSEKNSMEKMLKEYASNKSDHRRGRGINFPRSQVEAHLRDIIQRHASLVSSTDEFMAKLFLPCTTPDQKAASIFHYNRKTPDECREHFEKKIGKCPFALHWGLEENQCALRSTPDVRKWNLLDFLSNRRFILLEGKQQVSRTLPENCVKTLIDYLVAHTTSKTKPSWDKAKKALETVLKAENLKIAPQEKVKKISPWDKLKERIAPGRSSKQSSPEDLRDFLSHQNFPLEENGQITEKNLSENCVKTLIEYLAAHPIPDATPSWKEAKEALKKVLKAEKLKIASKGKTQKNNVWDQLKDLIAPSRSLKNRAKLSSEAARQLFNDATRDGTSFDPKKISARKKEIGYYEVMANTLMDYGVYTQVQTLLGVLRKPKEGKAISSPFGVKGFLHQLFEKELKDKLGGKSVPDYCIIECIKDPPRNEEEKKKRADASSDSRAFVESLAKMYGFPEVPGRSVLTRLKLYRQQGGMAKDGIVTQEAICPFTGRSLGPKPLAADLQLAHLFPDSRGGLAIEDNLVLTRSKTNSDMDNLTPREAADRNSSLGWLSWEKMLAQSKAFKWSDKKRELFSFVPTKELPVPDFENLTRTAQLARQLRRMVCVWMGLTEDSGEIRKRIGNPSGLHTSAARKGWKVGKKDRNDVTHHRVDAAILSFIPPGAGVNDIHCGGIFENKKEVRQIGGKCIDVYVIRAVEGLKPDLSSLDGEVQRECPVVSLRSRSKSKPLGDGTFWSVDPEGNVWQRVSLLPSKQDDLKKFTVENLKEKLFAGGISENRIPSDNTLEAWLENPQKALHLKNGKPVRFFKKKSGKGTFKSPLGWSGIIHPDGRVAQLRKLKEANDRLELWLGWNSKGKRWDYYKRIIPTNDAMRGLRRLGIPWRSRKNLPKYMVDLLNAENAVNLRQSHCGKLPPFAHKVGEFKKGDVFLIPPKKGEKAKEGVDTTHFTSEESILPQSKWCKVSAIKTEGCIELKPLLSKEEPKPRKNRFELAAFLGLGLPEELARKLKLRSPSVEKP

SEQ ID NO: 9907 - protein, 1344 aa, unidentified
  REGION 1..1344: note = Description of Unknown: Cas Enzyme sequence
MKKQFGDYYMGLDIGTDSVGWAVTDLQYKLMKLNGKALWGIRLFENAQTAESRRLFRTARRRLARRKERLNILQEFFSEAIAEKDPAFFQRMKESKYWLEDKELDQPDTLFCDPKYKDKDFHKAYPTIYHLRKALIEGGNEFDVRLVYLAIHNILKHRGHFLFAGQSLSHISNFETVFCSMEEYLREYMNVDYEGIESERIGNILKDKSLGINKKKNELSKALPVENAQQKEIVAVLSGGKGKLALLFDDDSYKDAEVNSISFSSENWDEEWDTLQDILGDNRIVVESMKAVYDWGVLAEILNGHKYLSHSKVEVYEQHKEDLKILKKVIRDVAPEKYKEIFSATTKGLTNYTAYVGATKTNNRKQRSEASRCSQEDLCKYLEKILKDKMSTSPEFQVVMSRIAERSLLPKQIIKDNGVIPYQLHKVELEKILDNAATYCSFLNEADSSGLSVKEKIVKLLEFRIPYFVGPLNPAHKESGFAWVERKAPGKVYPWNFEEKVDVQKSAEKFILKMTNKCTYLIQADVLPRNSLLYSKFTVLNELNNLRINGEPISLELKQGIYRDLFEKKKKVTLKQLVAYLKTENILNQESDAEISGIDGDFKSSLASLIDLKAIIGDKVNNVDMAEEIIRNIVLFGEDKKMLIYSIKSKFENILNDEEIKALGKLKFSGWGRLSKEFLLEITAPDKQTGEYKSILTAMWENESNPNLMQLLSGQYGYLKAVEEYNQSSVTDSGKLTYDKVDELYISPSVKRMLWQTLTIVTELRKVMGHDPRKVFIEMARGPEEKKRTISRKESLIALYKACQIEEKDWIKELEGKDEKEFRRDRLYLYYTQLGRCLYSGEAIDISNIYDNKYYDVDHIYPQSSTKDDSLDNRVLVKKEYNAEKSDSYPIKAEWRNKQRAFWQFLLGKDFISRKKFDRLIRNTPLSEDELAGFINRQIVETRQTTKAAAQLLGDILDSEIVYVKAGSVSSFRQTYDLLKVRSVNDLHHAKDAFLNIVVGNVYDTKFTKNAANFIKTNRQNYNLNRMYEFDVKRGDTIAWRAGDGGTIGQIKKTMLKNNVLFTRYAFEKKGGFYDQMLKSKGKGQIPIKGGNPRFLDISKYGGYNKASGAYFSLVESVQKKDKVLSIEAVPVYLAAEIEENQTALEVYFESQGLLNPRVIIPKIKINALFEVDGFRMHLSGRTGDRLQCKHAIQLHLPKDKELYIKKLEKYAEFCIARNKKIGELAIDEYDAISIEQNNQLFDGFINKLQTADYKKRYKTQLDTLIEKKEEFTKLTVEKQSALLLQITTLFQCNPVVPDLSLIGGPSSAGNLRLSKIISKDAPVFLVHQSSTGIFEEKIKLEAI

SEQ ID NO: 9908 - protein, 1085 aa, unidentified
  REGION 1..1085: note = Description of Unknown: Cas Enzyme sequence
MRNIIGLDLGTNSIGWAVIGEDAEKDKHKIKDIGSRIIPMDATQMGDFEKGKSIQTETAQRTIYRSIRRLTERRKLRRERLLRVLHLLNFLPTHYDQAIGWDSSDPKTYGKFKDETEPKLAWQPQEAHKHTFLFHSSFEEMVSLFKEKHPDINTIPLDWTLYYLRKKALQAPISKEELAWILLQFNQKRGYNQARGEEVETKNKLEEYFKLKILQVEETERRTGKKVWYIVHLDNGWSFSYASENKPEWERLTKDYIVTTSLDKEGKPQLDKEGKIKRSFRAPKEEDWTLKKKKTESDIQHSGKMVGTYIFDQLLANPKQKIIGEYVGVIDRTYYKKEIEAILDKQKEYHSELRNAELLETCIKELYKKNTNHQNSLRQQDFKYLLVEDILFYQRPLKSKKSLIADCPYEYHHKCIAKSHPLYQQFRLWQTLSNLRFIEKEHWTNGVLIKATDVTSSFLPNLQARADLFKWLNDKEKIKENTLLKYSGFNLTKNDLSRYSWNYGEEKELPCNETRSAMLKKLEKAGISSTFLTAQNEHALWHILYAVTDKKELTKALTHFTEKHPELQEQGTDFVAQFLTIKPYSSDYGAYSAKVTRRLLHVMNCGDLWDIKDFDAYSVKRIHALLDGEVIENIPQSIYERIQKYKEERGLTTIEKFQGLPTWLACYILYGRHSEEGDTKCWKQPTDIDTYLKKFKQHSLHNPIVEQIITETLRTVRDIWQKHEHIDEIHIELGRDIKNNSAKRKNIADRNNDNENTNMRIKALLLELKKDPHISDIRPHSPSQQTLLRLYEEGALSEMTSTDKDFDFVQKIRKSNTATPSELQRYKLWLDQKYCSPYTGQPIPLSHLFTTDYEIEHVIPKARFFDDSFTNKVICEREINKLKSNLLGLEFITKYQGRNVPLDSGKEVTILSVQTYTNLVEELYVNARTKRKKLLMDEVPDSFIERQMNDSRYISKFVMHLLGKIVREEEEQESTPKNLIPCTGTITTVLKHKWGLNDCWNTLVYPRFERMNRITNSNHFGYWDLKNGHRVFQTDLPLEAQRGFNKKRIDHRHHAMDALTIACANRTHINYFSYQNAKDKKSKDY

SEQ ID NO: 9909 - protein, 1383 aa, unidentified
  REGION 1..1383: note = Description of Unknown: Cas Enzyme sequence
MKKILGLDLGTNSIGWALVKEAENENEKSSIIKLGVRVIQYDNFVSTETGKDSMDPIKDFLGGKGVSANAGRTKKRSARRNLQRYKLRRENLIEILKDNNIINDNTILAETSNFSTFETYKLRAKAANDKISLEELARVLLMINKKRGYKSSRKLKGQDEGELVDGMDIAKELYNNDMTPGEYMLGVLSRGKKSKPEFYTSDLKQELQRIWETQKQYYPEILTDEFKNQIIGKSKTNTSKIFLAKYGIYTAENKGKDKKVEAYQWRVEALSKKVEKDVLAFVISDLNGIINNTSGYLGAISDRSKELYFNKLTIGQYLMNGFNDNPHFSVKNKVFYRQDYLDEFEKIWETQKTYHKELTNELKKEIRDIIIFYQRRLKSQKGLINYCEFENEKIEIEVEGKKKNITIGSKVCPKSSPLFQEFKIWQILNNLIVKDDKKNERGLEQEEKEILFKELNLKNKLSKSEVLKLLFENHNKLDLNYKEIEGNRTFNGLFNAFAQIVEMSGHGEYDFKKMNTDQILDIVKTVFTSLSIRVDILNFNTDLEGDEFEKQSIMKLWHLLYSFEGDNSKTGIDKLLNILYKEYGFEKDYGKVIANISFQDDYGSLSSKAIKKILPHLKEGNGFDVACLLAGYRHSKSSLTKEDLENKELKDKLELLPKNSLRNPVVEKILNQMINVVNQVIDTYGKPAEIRIELARDLKNNAEERKNMTEAISRSTKEHEEYRDIIKKEFGFLSVSKNDLIRYKLYLELKENGFKTLYSNTYIPREKIFDKNFDIEHIIPKAKLFDDSFSNKTLELRTANIEKSEMTAYDYVKNKYSEEGLKDYLNRIDLLYKSKAISGTKYKKLKMQASEIPSDFIDRDLRDSQYIAKKARQILLEISKEVVSTSGQITDRLRKDWQLVDIMKELNWDKYDKLGMTEIVENKDSERIYRIKDWTKRNDHRHHAMDALTIAFTKHNYINYLNNLNARADKSSNAYAIEQKELYRDSHGNLKFIPPMPLNDFRVQAKQQLEDILVSIKAKNKVVTRNINTTKQKGGTNKKIQLTPRGQLHLETIYGELKQYVTKEEKIGSSFNEEKINMVAKKSYREALLRRLRENDNDAKKAFTGKNSLDKNPLFIDALQTFKVPEKVKLVEFETGYTIRKEISPDLKIDKVIDVGIRRKLEERLKQYDNNPKKAFSNLEEDPIWLNEEKGIKIKSVKIRELINPIPLRSKKDNKGELIIDKDRNTQKVDFVNTGNNHHVAIYKDEKGNLRENVISFFEATARANAGIPIIDKSYNHDKGWQFLFTMKQNEYFVFPNEETGFNPKEIDLLNPINYSLISPNLFRVQKMSSKNYMFRHHLETQLVDSKELKNVTYKNIRSLPIFEHVVKVRVNHIGQIVGVGEY

SEQ ID NO: 9910 - protein, 1218 aa, unidentified
  REGION 1..1218: note = Description of Unknown: Cas Enzyme sequence
KKTEADITNSHKTVGTYIYDTLLQNPKQRINGRLVRTIERDYYKAELKAILEKQKEFHRQLNDSEILAACIQELYSNNEAHQKSLLSSDFTKLFVDDIIFYQRPLKSKKSLISNCKYEYRTYKDADGVIQKEPIKCVPKSHPLYQELRLWKLVKDLKIYEREKTIDGKLYTDYNVTNEFIKSEDELVNLFDWLNERKEIKQDTLLSSFFKIKKKRGEEKLAFRWNYVEDKEYPCNETHAQILSRLSKLKDIPANFLTTSKELELWHILYSVTDKLEIAKALKTFASKNDLPIEFVDVFKKFPPFKSEYGSYSEKALKKLLPLMRMGKYWNFESINDKTKIRIDKIITGEVDETIQAQVREKAIPLTQIDGFRGLPEWLASYVVYGRLSETKWKTYHDLENYLKEFKQHSLRNPIVEQVITETLRVVRDIWKKYGDISEIHVELGREMKNPADKRAEITKRVSENENTNLRIKALLAELANSHEVENVRPYSPSQQEILKIYEDGVLKSGIELPDDISKISKLSQLTKSELIRYKLWLEQKYRSPYTDKMIPLGKLFTSAYEVEHIIPQSRFFDDSLSNKVICESEVNKLKDNALGFEFISNFHGQKVELNFGCTVQILTVEAYETFVKEHYANNLVKKKKLLMEDIPEVFIERQMNDTRYISKVVKGLLSNIVREEGEEEPTSKNVIPTNGNITDTLKKDWGLNDVWNRIITPRFQRMNELTKSNLFGQWENKDGKQVFQTQVPLELQKGFNKKRIDHRHHAMDALIIACATRSHVNYLNNESARKKDESTRFELRNKLRRIEEIEVERIVDGIKTRKKIKVAKEFLKPWDTFTVDAQSALENIVVSFKQNLRVINKSVNYYQHIVDGEKVIDKQVKGDNWAIRKPLHKDTVAGQVNLRFKKQVTLFAAIDQWEMLVDKSLKTKIKQLINEGLEKKKIQKFFADRENKWQGKDISNPELYYFSNNNNILVASRTTLNDSFNSKTIDSITDTGIQKILKNHLVKYNEEKDGETIEHPELAFSAEGIEDMNKNIHELNDGKPHQSITKVRTYEPKGNKFNVGENGNKKHKFVEAAKGTNLFFAIYMGENGGRNYETIPLNIVIERLKQGLSEVPETNAKGDKLLDYFSPNDLVYVPTEEEKVTSSLIDFKNINKEQKQRIYKMVSSSGTQAFFIKYEVATSIVNKIEYSPLNKMEKTIDGVMIKESCIKLKIDRLGNISL

SEQ ID NO: 9911 - protein, 1165 aa, unidentified
  REGION 1..1165: note = Description of Unknown: Cas Enzyme sequence
MSRTYIIHNPGGRRHSTIMNTPYRIGLDVGIGSTGWAVISGKKEKSLIQDFGVRIYDSGEINGGKNRKSQERRGFRGTRRVLRRRYYRKERLKAHLNNIGLISSKEIEDFDIYEIKNIFAVKVKALEEKIDIKELWACLLHICNHRGYLDFYENKDETVKLLTVDDAAEKEEQVNKTAAKTFDNLLKDSNCKSVSELICTKFVDKKTGLPTFRNIESREDHLLIRREHIRNEMLLILDVQKKHYPQLTQNSIDLIDKIIFSQRAFEDGPGNANEAFRRYAGFLDSIGHCPFYKDKLRGFRCTVIGDIYAMVNTLSQYKYFSIENSEYDLPHQIAKQLVTYALTNAEIKMTDVKNILKENRIEMQKSDNCDDKALGKSFRFLKLAKHSIEKAGKSWEDFIAEEQFDIIAPSKLHLIAETLAKNITPSRRKTKLESLPFMTKELIKTFSALKVSGTANVSDHFMCDAIQAFMNGEIYGNFQARVNKEAEQKNENMTGSRTIKLPPSILDDEDIKDNPVVFRAVNETRKVLNAIIGTYGSPEYINIEIASDLNRSFMDREKLHKKQKKNEEERDKIKDQIAELVGSGAINENNVDKFKLYKEQNGKCLYSGKELDDIKTILLDKGDIYEIDHIIPQSLILDNTLQNKALVFSSENQIKKQRTPLMYLKGEKSANFIARVNHMYSRKENPISKKKYSYLMLPDLYSEEAQSMLQDWKSRNINDTRYITKYIVNLLAKNLVFSGNSKMPVYGIKGAITSKFRRIWLNGDTWGAEEKDRTTYLNHAADAVVIANLTPSYVEIASDSIRLYQLSRRSGKNSSEYSIYLDSCISKMKNYYGFPEEYTKKILTQNKRIPSFVANLREEVDIRFNDHDPSLFNKKTQEFYGDCADFIIKPHMPLVSIKQEKKFRGTIADSNPIKLREINGSTNKISRKKISELSVKDLDKLYTKDTDLINTLKRIFNEKEDKYKISEYMEETKSTKFYTDKGQPVYRVSLVEGKVSSYYKKEIGEGNYSILGMPKYYCIEIYKNNKNQTKTYGIRYVDIIKKNKKLFIKQETLPKDYKDHICYLFKNDYVEIYDGKGEIKFSGYYNSVKTIGRNLFYCKPINLTEDQQVSITQNDLIKKYSIDILGRKGGEIKCSAPLSLIQENVSRLETTGLWSWQKTKNNGSL

SEQ ID NO: 9912 - protein, 967 aa, unidentified
  REGION 1..967: note = Description of Unknown: Cas Enzyme sequence
FPDRDEVEIVRTAKEISDYFTLVKLLGKESYLSDAMVKRYNDHKEDLDKLKKYIHIKDPSGELFNEVFRKYDPKLNNYVLYIGSTISNNQRIRCEHCTQDVFYKYLKKVLGIDKVKKPEEIEDRYLSYVYSKMQDHIYLTRQNSPENGIFPYQLNEMELRKIISNQSPYYPFLNDKDNDGYVTSDKILSILKFKIPYYVGPLMSPKEDSKRADFSWIERTKDIIYPWNFDKVVNKAQSANNFITRMLNKGTYLKNEYCLAKNSLVFSEYALLSELNKLYINGMSITYEQKQTLIKDLFKKQKVTKKSLLNYFIGIYGQDVKITTTSGKSLDQLKTNLNSYLDFTRIYCDEEIEENFEMIEKIIRDITIFEDKTILKQRLINEYKIDEKSVKTILGFNYKGYGRISRKLLIGLKTKVIDKETGEILNYTILDIMEKTNYNLMEILNDKKYKFQELIEKENNKDSDQKLELNDFVDELYISPEVKRPLIQSMKIIDELEHIINHPIDEYYIECARSNKQEKTATLTRKDKILEMYKNSMDFVRKNIKDKNKQKQRISEINELEAKAKTVDSGKFRSDKYFLYFLQLGKCMYSGEPISLEELNNDSLYDIDHIMPKAIIKDDSIENRVLVKQAYNKNKTDEFPIPQNLIFNGNHNAAYAFYKKLYESKLIGFKKYHNLTRVEPLSDNERVGFINRQLVSTNQAVKGIIDTIKYYKTQDNKEPLIVFSKAENVSDFRREFNVLKARDANNLHHAHDAYLNIVVGRTVNTYFDYKMNAKRIEFLKNKKKTFNTIKLFQQNKQYIKQPIVDSDGYIAWNYEETLKKVRKNVYNRTDIMVTTRQYIKHGKLFKATVHKATDDKGGNLIALKTINNSSNTVKDKALMKLQDTSKYGGYSDLQFSCFCLVESLDKKGSKQFTIEKLPLIFVGTDRDEIKKRKEEVINYLEEQGMREPKIVDECFPLNINTIIKRGA

SEQ ID NO: 9913 - protein, 911 aa, unidentified
  REGION 1..911: note = Description of Unknown: Cas Enzyme sequence
QSRSLIDKKHNRIQKIRDLFIQFNLPFKDQKYYDIWYLRANKSFNERLSNDELFALFRFFAKHRGYKSLKIEDLIAELEAKEKIGDCESGEIIPPKDLEKFSETLAYLDALKCQHKDKTASQIIWELEASSSNPTFRNHNNYRYMIRREDVAKEIDMIIRAQQTLGLFADLSTAEIFINLTKEIILDQAPVRLNDALIGNCTIYKDQKCAPIYSLSYDLFNAYKLINDLKINGASATAEQKENLVNFVNSKITERKNFIGLSVKEFKTILGYHDEAIKINNNGEYRTVKGKKELNYLVKFTFVSKMSKFDIEILSALWEHSNRSYIFDEIATIIQHNIDPTDMLKAFKNLFDSSGFTFDDTSVQEFALSIFKEKKAGTGNYSFKALNDLNALLLEGKNESEAKEIFGISKAENYAKFSKGIKYLHLDQYEKDESIISNHIVKSIASWAIRVIKDLHEKHGPFDQFNIESTRELSQPDDVKRQIKSSNDANEKEWQELISKYTKHAEQKGINLKQNSSYVLKLKLWEQQKFFGIYSHLPLSLDDVLSEKTEIEHIVPRACGGSNAEYNKALDVKNENMQKGNRLPLDYLHDNKRQVFIDFVQRLKNDGAINFKKFKNLMAESLDDSYKEAKDTISLHATSYAEKLLGEVIKRYYPFHDKTKAQNGIGVMHISGRATSYLRRILSIDNKSRDTNFHHAEDAILLSVMSRSYLQNISTNFTENYAKTVQEAKDNFKKIVPLIDGANPNEIFSHLRDSYNKEIETNPFYTAMDGSLRVPSYWVSKKPIGTKAHNETIQSKKNLAYYVPIANLLGKIKPNHKMHIDDFREKFNSEVYEKIQVVHDNPNDFTAKAFLKRRDEVISLLNRANFITSKDEQSEIDKELRRVYNAPILDFLGKTIRRVKRVGEDASIEVR

SEQ ID NO: 9914 - protein, 1450 aa, unidentified
  REGION 1..1450: note = Description of Unknown: Cas Enzyme sequence
MSKKTILGLDLGTNSIGWTLIKQDFESKQGEILGMGSRIIPMDAGTLGKFAEGSSISQTAERTGYRGVRRLRERHLLRRERLHRVLNILGFLPEHYAQQIDFEKRLGQFKAETEPKLAWKKNDNEKFEFLFQDSFTEMVADFKAKGQDTRIPYDWTIYYLRKKALSQKISSQELAWIILNFNQKRGYYQLRGEEEEENPNKKVEFHSLRIVDVAADEQPNKKGETWYSLHLENGWIYRRLSKTPLDDWKDKTRDFIVTTDINEDGSEKLDKEGVVKRSFRAPKEDDWTLIKKKTEQEIDSSNKTVGAYIYDTLLNNPTQKIRGKLVRTIERKFYKAELKQILKKQIELQPGLFSNELYNDCVRELYRNNEAHQFQLSSRDFLHLFINDIIFYQRPLRSQKSTISNCSLEYRNIKDKDGNEQIVYLKAIPKSNPYYQEFRVWQWLYNLKIYTKEDDKDVTDQFINKVEDLEALFEFLMNQKEVNHTDILTYFVEPLVKEKYPNAKGKAFKDALKKEIGKYRWNYVYDSEKDESKLYPMNETGFEIRKRLAKVENIPANFLTREIEQHLWHIIYSVTDKIEFEKALNSFATKYNLDEESFSENFKRFKPFDSDYGSYSEKAIKKLLPLLRVGKYWNWDLIDDKTKIRIDNIINGVDDEKIRLLIREKAEKLKLETETDFQGLQLWLAQYIVYDRHSEANIAGKWNSVADLQQYLTDFKQHSLRNPIVEQVVTETLRVVKDIWTKYGKGAKDYFDEIHIELGREMKNTADERKRLTSVISDNESTNLRIKAILQELMNDESIENVRPYSPMQQEALKIYEDGVLNSGITIPDEMEKISKKSEPTKSEIQRYKLWLEQKFHSPYTGRPIPLSKLFTSAYEIEHIIPQSRYFDDSFSNKIICEAEVNSLKDKQLGLEFIKNNFGRRVSTVFGEVEILSETAYIDFVKSHYEKNRSKRNKLLLEEIPEKMIERQLNDTRYISKFISNVLSNIVRSDKDDEGINSKNLIPGNGKITNRLKQDWGLNDVWNDLILPRFERMNELTKSNDFTSWNEKHQKYLPTVPIELSKGFQKKRIDHRHHALDALIIACATRDHVNLLNNKHAKSKNERYDLQHKLRHTEKWPGKDGNLKDRFTEFKKPWDNFTIDAKNELNKIVISFKQNLRVINKATNYYEKIVDGKKVKVKQEGVNWAIRKPLHKETVSGLVNLPRVKVSKGKILTATRKSLDTSFNEKSILSITDTGIQKILLNYLKVKGSPELAFSPEGIEEMNKNIAQFNGGKQHQPILKVRVFEQGSKFPLGETGNKTSKFVEAAKGTNLFFGVYEDKNGKRSYDTIPLNVVIERQKQGLNSVPETNEKSHRLLFSLSPNDLVYIPEEGEIFDKNNINVNKIYKIVSFTGNRLYVIPQTVSTVIVNKIEYSQLNKIELTKEKELIEKIKFDRLGYLISKSDLIEKIFNK

SEQ ID NO: 9915 - protein, 1448 aa, unidentified
  REGION 1..1448: note = Description of Unknown: Cas Enzyme sequence
VVLIKTTKMKKHILGLDLGTNSIGWALVQQSFENREGKILGMGSRIIPMDAGVLGKFAEGSSISQTAERTGYRGVRRLRERHLLRRERLHRVLNILSFLPEHYAQQIDFEKRLGQFKAETEPKLAWKKNDNEKFEFLFQQSFAEMVEDFKAKGQDTRIPYDWTIYYLRKKALSREISSQELAWIILNFNQKRGYYQLRGEEEEENPNKKVEFHSLRIIDVVADEQPNKKGETWYSLHLENGWIYRRSSKMPLDDWKDKTRDFIVTTDINEDGSEKLDKEGAVKRSFRAPKEDDWTLVKKKTEQEIYSSNKTVGAYIYENLLNNPKQKIRGKLVRTIERKFYKAELKQILKKQIELQPELFSKELYNNCVRELYRSNEAHQFQLSSRDFLHLFIDDIIFYQRPLRSQKSTISNCSLEYRNTKDKDGNDQMVYLKAIPKSNPYYQEFRVWQWLYNLKISTKEDDKDVTDQFINKVEDLEALFEFLMSQKEVNHTDILTYFVEPLVKEKYPNAKAKAFKDALKKEIGKYRWNYVYDSEKDESKLYPMNETGFEIRKRLTKVENISTNFLTREIEQHLWHIIYSVTDKIQFEKALKSFANRYNLDEKSFVDNFKRFKPFDSDYGSYSEKAIKKLLPFLRVGKYWNWNAIDDKTKNRIDNIINAVDDEKIRLLVREKAEKLKLEKETDFQGLQLWLAQYIVYDRHSEANIAGKWNSVADLEQYLTDFKQHSLRNPIVEQVVTETLRVVKDIWIQYGKGVKDYFDEIHIELGREMKNTSDERKRLTSVISENETTNLRIKAILQELMNDDSVENVRPYSPMQQEALKIYEDGVLNSGITIPDEMEKISKKSEPTKAEIQRYKLWLEQKYHSPYTGRPIPLSKLFTSAYEIEHIIPQSRYFDDSFSNKIICEAEVNSLKDKQLGLEFIKNNYGRRVSTVFGEVEILSETAYIDFVKSHYEKNRSKRNKLLLEEIPEKMIERQLNDTRYISKFISNVLSNIVRSDKDDEGINSKNLIPGNGKITNRLKQDWGLNDVWNDLILPRFERMNELTKSNDFTSWNEKHQKYLPTVPIELSKGFQKKRIDHRHHALDALVIACATRDHVNLLNNKHAKSKNERYDLQHKLRHTEKWLDKDGKPRDKFTEFKKPWDNFTIDAKNELNKMVISFKQNLRVINRATNYYEKIVDGKKVKVQQKGVNWAIRKPLHKETVSGLVNLPRIKVAKGKILTATRKSLDPSFNEKTIGSITDTGIQKILLNYLKVKGGNPELAFSPEGIEEMNQNIALYNDGKQHQPILKVRVFEQGSKFALGETGNKKDKYVEAAKGTNLFFGVYTDKEGKRSYATIPLNIVIERQKQGLSSVPETNEKGHRLLFSLSPNDLVYVPTEDEAEINVENIYKVVSFSKNQLFLVRQEIANSIVNKVEFSSLNKMERSIDGTMIKEVCIKLKVDRLGNISKS

SEQ ID NO: 9916 - protein, 1395 aa, unidentified
  REGION 1..1395: note = Description of Unknown: Cas Enzyme sequence
MSHQKREVSDYYLGLDIGTNSVGWAVTDTDYELLKANKKELWGARLFDAAETAADRRLHRSARRRHQRKLQRLQLLKTIFEQKINETDPQFFTRMKESAYHKEDKSHDSIATLFNDPTYGDAHLHKDFPTFFHLRSHLLYEKETSSDVRLVYLAIHHILKNRGHFLFPGETLNTSDSLDSALEDVKNYLFDLMNYHMSFNNVSNEEIGKILKEKKQTVKRRGLSEILTLSYAGEEEIETSPNTLKSEIIKALTGSPFTLSVLFENESYKESDYNKIELRKDNYEEHKDNVEALLDPEEFQLIEAFEAIYNWTLLSDILKGKNYISDAKISSYDEHKEDLRTLKQLVKTYIPSSYNEAFKDPSKTHNYAHYVGSGTQHGIKVDVKHKSKCSQEEVNKYFENLLKHVVNDDDSSLSNMKERLSLKEALPKQRIRDNRTIPTQLHKTELKTILDNANQHHPFLSIPDEDGYTPTEKILSMMSFRVPYYVGPLNTYHMEEEGMEGFAWMVRQKGEENTRILPWNWERVVDQHASAENFINRMTNSCTYLYSESVLPKNSLLYTKYMVLNELNNVKIHGELIPVDLKKQIYQELFLDSGRKTITLAMLKNYLVVNNIINKTDKEHVTGVDITFTSSLKSHIDFYEPFLKPGILTEKEVEDIIEWKAFYVDDAKILEEKISAELGNKLTAQQIKEILKIVRSYKGWGRLSKALLTEIYDEDPTTGEAKSIIKAMWDSNNNLMELLSDRFTYLSQIQEINRESISDKAFSYESLVKPLPVSPPVKRQIWQTLLVVKELRKIQGKAPKRIFIEMAREEGIKKRTTSRKESLQKLYESCKNDLDFNKGLIASLEEKSPAQLRRDELYFYYTQLGKCPYCGESINLQRMGDYDIDHIYPQSLIKDDSLDNRVLVHKTCNGKKGDQYPLPYELRAKMGGFWGVLVSKGLISKEKYYRLTRSTELNEEELAAFINRQIVETRQSSKHIANILKQIFGDDQLITYVKARNVVEFRNDFELKKSRLVNDHHHAHDAYLNIVVGNTYHTQYTESPLNFVRQWRGKNFRFNPSKLFENTVERNGLVAWVKDDNYSNNKGKSKQDKRESGTILTVRKTLKNPRVLVTRQVVEKTGELFNLQPIRAKNGLIPLKGSPANFHDTAKYGGYEAPSTAYFSIVEYTKKNKRLKRIVAIPIMYAEKFTTDHNALIRYCVESFNLLDPRIVMPKILVFEAIRTKGYEIRLSGMTEPQVFGRNNIQLILDESDYDYIVQTEKFVSFIQKQRQSSSNTNQDFREIAESFSVSLDKNIEMYEVLLAKERDTIFRRRPANQAGFLESKREEFAELDLTEQGAVILQLINLFSCSSVTANLKLLGGGASVGSIKYASVLDENTFLIHYSPTGVFSKTIKVDDL

SEQ ID NO: 9917 - protein, 1031 aa, unidentified
  REGION 1..1031: note = Description of Unknown: Cas Enzyme sequence
MGKKVSKRYHEQVQEIQQLLAGRPYSIGLDLGVGSIGLAVAAYDKQTNAPTDLVFATSRIFSPSAGAADRRQQRGQRNALRHKANRLRYLWKLLASKNLMLPYSKQDVPDPARLRFSEDIIRKDPYELRYTGLTEQLTLPELGYALYHIANHRGASSIRTFLDDEKSSDDKKLEEQERETEKLAKEKGLSTFIEVLVAFNTTEHIGFRNKDSLKDKKIPVPTRDIITREIEVLLTTQKEFYPDVLTSEFCDQIQAAILYENLKIVPEPGNCPYFSDEKKLPRCHFLNEERRLWEAINNARIESPVDVGSFIRRERGPFSMEQRKQLFAVAREGKNITVPLVRSLFSGMEHHTIILQGKDKATQKIDGFRFKELERKPFWSRLTEDQQDDFFFAWTNMPDDEQLASFLSQTVGLQEEEIDDALKTIKLVGDYGPIGKTATKLLMKYIEDGLTFNEAVEEAVQIGELERPVVLSDQANLPYYGKVLTETTQELAGKYWHSAFKERRNSPGFKKPNTASDEERFGRIANPVVHQTLNELRKLLNEVIEVLGTKPVEVVVELGRELKVGAVERERIAKDQSDREKQANQIYDKFCKPNGLGRRYIEHFRLLEDQKFSCPYCLKTINVTDVGSGRVEVDHILPREDTGDNSYANKVVAHRHCNQQKGKRTPYAAFSSLEIWSQIMHYLDDTPPMRLKRRKFEITDDQYKKYLENRGFASRFSTDNSYIAKATLEYLRCLYNAEEQLTAVRSLNGRETSILRKSWNLQGITEEMGRLHFDKKESPNDVTRKNRNDNRHHALDAIVALYCSRSLINDINTKSARGMSAAEIEDTLPLPNHQRFSNLTYDEYREHLRSQIHRFLSLQTFVSLKSDHSVNGPLLKDTIYSILGANPDGNELVFVVKKKVKDINPGNGSFEVVKSAVQGRFTANLPKWYPSSLKKRIAELQEHNEKILERYEEQLLSAAADLEAKNMQLKEAGRRLIDINERTVSKRALEMVGGIYYLISNNSRIKTHVVKEPTDSATGFGFDTGSNLCLD

SEQ ID NO: 9918 - protein, 1429 aa, unidentified
  REGION 1..1429: note = Description of Unknown: Cas Enzyme sequence
MDNEITKTSTTAPYFIGLDMGTNSLGFAVTDPQYNVIRKSGRHLWGFRRFNQAKTAADTRAFRTARRRLRREKERVRFLQSIFKKALEEKDRDFLQRLQDSFFYPDDKKIEQKYSLFADPEFSDIDYHKHYPTIYHLRDRLMKNPEPADVRLVYLALLHIMKNRGHFLFAGNSYDSTSQYSESFEMLSETSRSILGWDPFPIVHDDLKFVLCHQGISRTKRSDLIKGLLLNHLESGNKRQITAFVKLLAGLKVNLATLFDDESLKEAERKDCNLAEDYEAIRPTLEEVLGSERLELIDAAYNLFSWARLTGILGDFQYLSEAKIATYEKHREDLRRLKSHVKMCDKQRQALKLSENNNSQRNLYDEIFNISDKKLNNYVAYTGHLQKRGKKQSILHRNRDQGEFLKFLKTRLSSFSELPNMKELLAEIDEGLFLPILVGTDNGTIPRQVVSTELKLILRNASKYLDFLDEDACNKLLQMFEFRIPYYVGPLNPAHRFDKEGGKYAWVVRKESGHVYPWNFHEKVDEERSAEIFIERMTRGCSYLKGEKALPKQSPLYAEFMLRNIVNAININGRRLDNELRGELIEDLFLNNQGNVRVTRKRVRDWLSSRGAISQHDELGGFDLDIPIRMTAWHDFQQLTKSNINLHDMEEIVRIITIFPDDKRMIQKRLENQFRDKLHSDDIKLILTKRYRDWGNLSRRFLSEMKGEGEADHGKSIIDMMRENPVNLMELMSDKYSFASQVSSINRSSDKTLTKLEYGILDDYMISPPVKRMIWQTLLVYRDIEKIMGGPPRKIFVEVARGGDETNKERTKSRKIQLIELYNNCIKDADQWGRELYGRLQNENEKALFSKKLFLYYLQQGRCAYSAEPIILEDLESQLYDIDHIYPRSLTKDDSPYNNLVLVKASLNRQKGDQYPLPETYQKNAANLWYSLHNQGFMKQEKYARLTRTVPLTIDELSNFINRQLVETNQAVKTVTDVFERVLGDESSVIYVKARHVSDFRYYDARELTKTKDNEGIPFVKCREINDIHHAKDAYLNVVVGNVLDEKFTKNPHVFLEKARPSSGERYSYNLAKIYQSDVPYRKGDYGLAWQAGPGGTIQTIKKVMGRNDVLYTEQTSYRTDGFFDQQIKGKMNISSTMGKVPIKGGKKSLRNALDVIGEPTSTKSPYTKIERYGAYDKELISYYALVDSLCNNKWHRSIEPIPLTVATLSSRLPHKAQSLLKQYFLDELGASDVRILLERIPFNSVFEINGYRCRIRGKTGNSYRYLSHIQPFYSLKREIELTQVHRCLNNIAKTEYERADAELRELMNQQSLEMLSDVDLDELLAYLLDRLYSGPWKNAQQINRISIEITSKMEHIRRKSVIEKCICIIQLVKIMGTTEQYFDLTCFDMSKTAGARDYSKKMDRKNNYVLVTQSPSGFFENKIDLWKL

SEQ ID NO: 9919 - protein, 1013 aa, unidentified
  REGION 1..1013: note = Description of Unknown: Cas Enzyme sequence
MKVKIIGFDIGITSIGWSFIEIGDKKSENKIIDAGVRIFNKAENPKTGESLAKPRRDNRLLRRRLKRRCKRISLVKKLCIKNKLITEEEIDNLFLLKNTDVDVWDLRRKALYEKLTKEEITRIFVHIIKNRGFNLKTRDDGDSETGKLKTAIANQIKILKSENFQTYGEMISIKFPLGIARRNKLGNYNKCVSRQVLEQELITIINKQNKFGYIQFNESFKKEILDIFNWQKESLSEEDLKKMVGKCLFEKEEFRAPKNSYSAEIFRALQTLNNLKILTKDGLEIRFNKEQIKHIMDISHTIQKINLNKIKKELFGDVEVEIKGLNSKKDNPEVVHLKSYHGIRKAFQSQEQLKEFEKIVLAKNLDNIIYILTYNKNNEEAFIKLKSLLGNLVKDETINELLKIYNSKFLHLSLKALNKLIPEMIEGLNYSEACAKLQYDFNLNLKNQKKVCKMPPIDIEIGSPVVKRALSEFRKVINALIKKHGIVHQINIEFARDINRNFEDRKKIEKNNSENHKKNEMAKNQCLEYGLNANGKNILKLRLYKEQDCKCLYSGKIIDIKRLDENGYAEIDHIIPYSRSMDDSYNNKVLCLNSENQKKSGKTPYEYFGQDKEKWENFICLVNYNKNMSRRKKHLLAKKIFDKRAEKDFKERNLNDTRYISRLVKSYCENFMLFEDSYIKNKVQVRNGQLTAALRRYWGVNSLKDRSNHYHHAIDSIVVAFATQDMVKEFATTYGIIENHKKIKYRAPLDNFREDIKKVIYNIFVSKSPRRKVTGAAHAETIKGWDSNKNVSLKRVSLENVKLETLEKLHNKKYSQNLYDVLKTRLEENSNEPKKAFSEPIFMKCNDEGKQGPEIKKITIEENTNSFVKVMGGIADNGEMIRIDVFKKSSKFFCVPIYVADILSKELPNLAVKVKNLKKNWDIIDNTYQFCFSLFKGDLIKVKQKNKTELIGYFNGMDISSAKILFTQDFEASGVKIGVGSKTLEIFEKHQVDILGNYFKVNKEKRMPFKKGM

SEQ ID NO: 9920 - protein, 1096 aa, unidentified
  REGION 1..1096: note = Description of Unknown: Cas Enzyme sequence
MKRKLILGIDVGIASVGWGIIDENDNIIKAGVRLFEEGKTKSNTDRRGFRGGRRVKSRRRNRINDMKDLLIENKIIPSRDYISPINPYKARKKGLTSKLTNDELASALLHLSKRRGSSLETAGADEGKVLSLLAKHDKELKDKYVVELQLERLSQGKIRDNENIYRTSDYLRELEKILSNQDLNTKFKETVIDIVTRRRHFSEGPGSLTSPTPYGRWRVVNHDLRNTIIKGFSSEERTRFGKESFTVEVDSIEYKVHKNGIITNKKPYNLIDLMRGKCSVYPDEFRAPKKAFSAMLQNLLNDLNNIRVINEENRRLTKEEKLKAIEVIKTNGRFSPNGPKGLLKLFNLELEDVTGLRIDNNDKELITEFKEYRDLLLLFQEFNTSLPDKLADDIAEILTKTQVITEREDDLRNRIKNEKLIAKIALLTGYNGYHSFSFKALYALNDEMIEQSLNQQEILTSTLSRETTTLSKLEFDETLILSTVARQAHREAIKVVNELIKEFGHFDRIVIETAREKNSEDARARIRRRNKHFEDQKKDALKLLTDAGYSDDNFYSNQTLLKLRLYNEQNCKCAYSGITIDLHKLITDPFAYDIDHILPRSITQDNSLNNKVLVLNEVNKSKKNRTPFAYFHSGDVKSSYPINSYEAYKESILGNVNYQKNAKKRANLLFEEDITKFDILDQFTNRNLVDTSYAARSLMTTLKNYFTSNNIETSVFTIRGKQTDLFRNIARTLWFQAHKDLDASINPFNKNRDIYYHHAVDALIIAGLSNQRTLAYLWNMQKHRKFDRVFNVDTAEVFNVDPTEDAQLIKFLQDLGNLKSNDFRYSWKIDTKLNRSFSDQTIYSTRVIDNEVRLIKVYRNIYEMKQDYLEKILYEPKNYESLLIYQHDNKSFQKIRQAYDQYKHEKFPLKIYMEAHGMIKKSPKGPIIKNLKYVESKLGSHVDISENYNSKNKVVLLQISPYRTDIYQNDKGSYKFVTIRYADFSKDRKGYYVNKALYNEKLLEKEIDKNYEFKFSLHRNEIVSITQIDKGKLYYRFIATSNDITNVCEVKSIDKKDEKTRVFVTVGRKTTRIEKFAVSPAGRISKVTKEVLQLVR

SEQ ID NO: 9921 - protein, 902 aa, unidentified
  REGION 1..902: note = Description of Unknown: Cas Enzyme sequence
MEKVENVAKILIPTNKSEKPYYLGLDIGTNSVGWAVSHKDYRIVSKNGKSLWGVRLFSSASTAAERRTFRSARRRRKREVQRIKWLQEFFAEAINKKDPLFFQRLQESFFYPEDKTMRQSNTLFNDTNYTDQNYHQQYPTIYHLRKDLIESSEPHDVRLVYLACHHIIKKRGHFLFPGEEISIEKQTDEIAEAFQSSIMDHLYIDISLNVIETIIQILGQTDINRTVKSELILQLLPNNDRVEKELAKLISGRKINFYTLFEDDGLKQAEVSSVEFTGDYDSKRDEIEMVLEDRIDLLDTAYDLYNLARLRTVIGEHKTISQAKIKIYDDHAKHLKRLKNTLREIDEENKNIGKETRLYFEMFNLSKSKLNNYVAYSGHNYYSGKKRGLQHKCNYGDFIKHVKNILEPHKHNVKVSQILEECTNETFLPKITSTDNAIVPHQLNAAELKTILATASGYLPFLTTDVQSKIVSIINYRIPYYVGPLNDSSEFAWVERRSNVKVTPWNFDSIIDKDRSAERFIERLTNKCTYMYGEDVLPKNSLLYSEYLVRNAINMLKVSGTKLPQEIRDLMYEQLFLHPRIKGKVTRKRVVAFLRNNGILENDEQLSGMDLDIQAKLQSHHDFDNICSGALSLNESEEIIRYITIYCGSPELIEPRLKEEFGKVLSNEQIKRLSRLRYKDWGRLSRKLLDGISATDSSGRNMSIIELMREEAVVLMEALSENYNYMSIVDEHNQEYLGDPDYVKYDMLNDFRVSPVVKKMVWQALRVCEEIFKIMKGLPEKIFVEVAREEKTKGDAGRTSSRKNQLKALYRECEKNTKEWFDKLDSHSDDEFRNNKLYLYFLQQGKSIYSGNPLDINQLMDTNVYDIDHIYPRSLTKDDSLNNLVLVEKSLNQEKGDDYPLK

SEQ ID NO: 9922 - protein, 1343 aa, unidentified
  REGION 1..1343: note = Description of Unknown: Cas Enzyme sequence
EVSIEENPVFDNREFINSLNIFENISFENESLLDFYQKVANESKDDKNKLQTLLKNIEDLDNFKLIPLHQEEYNEIKSLFEQEKIQFKNNGIILNEDIRYNTIFKNKNIIINADVKNKFKKIQKAIEEKQIKKFENVEEINFKDYSKVLSEFKEFVSNLIKEIEEGHKHRKVYLKNIEKDINNSNINFGMERKQIFNLIGNISNFQLRLLRKYFNDKFDNKFDDKKLKYYFINWVKSWRTIGNDEAKNNQKEILKNIDNIVVDFLIKLDPFKTIPPFEDQDNRHPQKDATLFINEQFLDNNFSFWRQLLKCFIEKDENLLENLDEIINKSNFNRKYLLDKDGVILQRLFDRNTILDKFKFRTLVNLYSNNKLMDSEEFLLLKNKISASDDFLIKLIEIGKKYYNEVEMAKQGLWQKSDESILKRIDLNCPKIKNCTELLLSSIFGKNINSNEVISLKSFLKDNKVKPDLPGVRAKSILSWAKDCKDAQKDYGTYLNKKIIEINIKSKYRDIEKNTDEYELYKLILAVEQAENFIIKNFFKDEKTRDFGNIYSFSQIYSFIEGDTHGFYNSSKPTAIENSWRDKTIKTIDNKTGEEIFVSNASRLPKDSVRPFDGQLGAIIERTSYEIYKKYFDFSKKSEVDELQILIEENNFEFERDLKKDIKKNIKKIVLDKITKKLNANKKTFNNRLNEIKMDSKGICPYTGNTLTNNGEIDHIIPRSASKKFGKTVFNSRLNLIYASSTGNRQKGNKIYTYKNLHANFLNRIFNTTDIQQIETDINNKLNNIIKKFGNTIITSDLEQDERIVLRMALFSENEEIKRKAYELLHTKSKTMVNGTQAYLCKNIIGKIKNNLKVSDIKVKKIQVDDIKIIRDNIPVEFSELKKEEHQSPYSHIIDATSVFCYDFKQINPEIKLEKIVPADFSFIDIKSKNLKDKTEKGGKSLLNDSIYSERYLSIFLKDNLAYAGFSLDNSEQIDTNKEKCLKFLEEINQFLEFKNTSVNNLDDFFNTSNDNLIYFTLNKKKIQDYYHEKARKNEKVNEKIEKNLSKLRFYTKRKNIEDIFDIKFSENDEIKVAFNSKVKFDFKFNKKLISIPVKNQIFSVLNFILKQINEKVQFKNQTEIIESIISYLQKEYNFFLRDNKNNEHIKVRKVFSIPVIDGPSGGIRIKRKTPLNESVYQIQATNNTIGQYAGFDKDFNEINHPHFIKNSKKTSYISGNNSEDVFFKFGECYNLNLDDKYKNLYSEIICTLNSGSRQEIILKIPEKIFIEKYLPEIDGIENNINLSNLPEKLKFAKNFPISDISPREGNTSFKGVINRNIILNFTTSGTNQYLKEKIKNAKKIIC

SEQ ID NO: 9923 - protein, 980 aa, unidentified
  REGION 1..980: note = Description of Unknown: Cas Enzyme sequence
MGKTILGLDLGITSIGWALVDVDDENLHNNKIIDSGVRIFTIAEHPKDGKSLALPRREARSARRTTKRKAQKLRAIKRLLLKNKILTQDELDNLFIGNKKQLDVWQLRRDALYRLLDNKEFSRIMIHLAKHRGYFSNRKSEEPSDSEGKAVLSGIGHNAKILSESKYTTVGEYIFTKNKKRNGKDADGKLNYDNSVSRSMLVDEINIIFTRQKEFGSSLVSDELLQDYKKIAFTQRPLKSVADMVANCPFEEDEKRASKSSYTFEYFRALQKLKNLRIIDENAYEMPLIFEQIQQIIANAKKTSNFTYKTFKKLFPQYKDMNIKGLVYYDHKTGEVKDPEKVKFLDFSAYQKIKKAIQEVDNLYWDTIENDSDILDAIATVLTTEKDDKESMKKLKNIVQSQEVCEALLSLSFSQFGHLSNKALKKIIPELEKGFDYDVACKNAGYDFQAIFKGSKSLFLPPLTKEENLEMTNPVVKRAIAQMRLVYNAIVRKHGALDSVHVEFTRDIKNSHDDRRKIEKAQGEFRETKEKAREQALDKLGHEPNAKELLKFRLWEEQNGSCIYSGEYINPHMLADPYATEVDHILPYSRSLDDSLNNKVLCFTKENQEKGNKTPKEYIDASKWDDFVIRIEGLKNLKKAKKERLKKANFDESSEIAFKERNKNDTSYISKFVKNYIESHVEFKESKMKRHVFTMNGMLTSQLRYKWGVGDKNRDNHLHHAEDAIILAFSTQGMVKKLSDVSAKREGFAYKTKEEKSKSLRFQTPLESFGEKVKESLSDIFVSHMPRRKVGGAAHKETVYSDKTLSVKKADGKVDFLKGGSLTNNVKLKHGVALNDSMPRVDLFQNKKTNKYYLVPIYVGDFVKDKLPNKAIVAGNKPWIEMDDEYEFKFSFYKRDLIEVQTKKTATKESVQVLGYYDSTHSGTAKLMLKSHDGSIEHGFGSQNLVFIKKYQVDALGNYVEVKNEKRQGTIKEGRLKRNK

SEQ ID NO: 9924 - protein, 1052 aa, unidentified
  REGION 1..1052: note = Description of Unknown: Cas Enzyme sequence
METLGLDLGTNSIGISKRNTDLGSNLFDQLEYFGVTTFNKGVGNSKSGEFSYASERTKHRSSRRLYQSRKYRIWETLKILIEYGYCPLSDEDLDKWRKYDKEKGLKRKYPINAVKFEQWVRLDFDNDGIPEYSSPYQLRAEIASTQYNLDLEINRLKIGRALYHIAQRRGFKSSKGETLKESHENEILDENSLKKSEEKKAKELNEFINQKIGDNISLPTVGCAFYEIERTGQRIRKEYQAVRSQYQEEIKYIFDFQNALSLESDFYYKINKAIFYKRPLRSQKGLVGKCTLEPTKSRCPISHPDFEYFRAWSFINNIQFRKGEKENWENISLDDKNELFNEKFLRVKNNFKFEEIRIWIEKKYNISLSTKDKTINYKDRTNVSACPISARIKNLLGENWKEIIIEANKTRIDKKTGVEKRVSYNWEDIWHVCFNYDDEENIVEFAQTNLLFDDKKTKSFINLWVAIPQGYSMLSLKAIRNINRFLNRGLIYSEAVLLAKIPEIIGEEKWVNIKDECISNIEIISNSNKEEKRILNIVNALIAEYKSLEFNEQFAAHSNDYKLKEEDYKTIIEYCKESFGEKTWNKKDDDEKQNVINDVASKYQAFFDNSRREFYKLPKIGDNLRKFLSDNFEYLHCSNNFHDNLTGLPCNCPACKQLNKLYHPSMIEFYKPSRNKTIDYNGRILSKKLLESPKIGAFKNPMAMKMLHILRRNINSLLLEGIISEDTRIVIETARDLNDSNMRWALEQYQKEREHANEEIKKAIREIQGLEQVNDSDFEKVKILIDQNDIPETGLINNETYINPQNDKKAKSKIEKADKFSIDVTKYKLWLEQGCRCIYTGKVISLSDLLGGNPKFDIEHTIPRSKSLDNSLENKTICDLYYNRFIKNYMIPSSLPNYDKDANGYSAILPRLQVWKEKIERLENNVEYWKIKSKHAQTKDVKDTAIRQRHLWQMELDYWKRKLERFTITEITSGFKNSQLVDTRLISKYATLYLKSVFNNVDVQKGSVTADFRKIIGVQGFEEAKNRDKHSHHAIDATILTLIPSSAKRDKM

SEQ ID NO: 9925 - protein, 946 aa, unidentified
  REGION 1..946: note = Description of Unknown: Cas Enzyme sequence
NILGNQKPNNVLRTISKYMYIGKVSDWKCNFDEIEGNRTNQVLYNVYQEIAKTEGYGFDWAKKSASEIDEELRSIFPLIGISPDILDFDANIEGDNFHKQPSYQLWHLIYSAEDDEKIDENDRMIYGNNSVALRKKLHEKYGFKPEYAIWLSNIKLQDDYGNLSSKAIRKIIPYLQAGHPYAKKDELDNDVGACGLAGYNHSNSETSEDLKNKVLKDKLSLLPKGGLRNPVVEKILNQMVNLVNQVIDEYGKPDEVRIELSRELKQSAEEREKMHKGIAEATNRNEEIKNIIQKEFGIPSPTKTDVYRYRLWDELKGRGYKTIFTDQYIPKEKLFSSEIDIEHIIPKALLYDNSYSNMTLAYKNENIKKSNRTAYDFISNDYQLSLNQYIGNVEAWYNNGKGNISKAKKNKLLMAMKDLPDGFIERDLKNTQYIARKAKTMLQEVVRVVTPTTGRITDRLRSDWGLTNMMKELNMPKYKALGLTEYEERLDIGTGKIKAVEVIKDWTKRNDHRHHAIDALTVAFTSHNHIQYINYLNARRDTEHKKHQIINSIENTVTEKLNGNRVFKEPILNFRAEAKKQVESILISYKAKNKVVTNNINKIKGKGKRNYKKVVQSTPRGQLHKETVYGKILRPMNKPMRLNVRFPLVKAPLIINEEERVRVLEHLAKYDNNPEKAFSSKVFKSDPILMNGDEPLKEVLCFEEVFTIRKPVAPDLKIEKVIDEKVRKILSDRLAEYGNDAKIAFSDLEENPIWQNREKGIAIKNVTITGVNNAISLHYKRDHLGRFIENDGMKIETDFVSTGNNHHIAIYQDKDGNFQEKVVSFYEAVERVNQGLPVIDKNFNDYLGWEFLFSMKQNEMFVFRSDDFDPSEVDLLNPENYGIISKNLFRVQKFTIKDYFFRHHLETTVTNDLDFTFKRINTPNGLRGCMKLRINHIGQIVGVGEY

SEQ ID NO: 9926 - protein, 1132 aa, unidentified
  REGION 1..1132: note = Description of Unknown: Cas Enzyme sequence
VTIYDGGENDMNRGYRIGLDIGIGSVGWAVISGKDNTARIEDAGVRIYDSGELIKEQSRKSQKRRLFRSARRLVRRRYFRKERLKAHLENIGFLSAQQITEYCSSSNENVFELKMKGISDKISKEQLALCLIHTCNHRGYKDFYESDEDNEDKETAINRKAAHEFDVIFKNSGCKTVSECICKHFTNEKTGQPEFRNRDSKETYLLIHRQHIKDEICQILKYQSKFYPELNNNAIDLIDKIIFSQRDFEDGPGDASLAFRRYTGFLKSIGKCPFYKLEDRGFRATLISDIYSVVNTLSQYRYIAKETGEYTLPPDIARQIVYTTIERGSITMTEVKSFLSDAGIELRKGENSDDKALSKAIKFISIAKKCIERADLKWNDFIGEEQFDIEKPSKLHQIGVLLSKYQTPSRRHSELHKLSFMTDKLEKELSGKKISGTAAVSDKYMCDAIEVFMNGEIYGNFQAEAIKRSVEQGVSADYKKTRIIEPSVFDDDIKDNPVVFRAINETRKIINSIINTYGSPEYINIEVASDLNRSFVERREIFNKQKKNEAENDAIRSKIAEILDISVEEVNGSSIEKYKLFYEQNGRCMYSDEILGDIADVLRDKTKRYEVDHIIPYSLILDNTLNNKALVFGSQNQIKGQRTPLMYLTGDKRKKYIEKVNYMYSRKEKPISLKKYNYFMLKDIYSAEAEDILKDWKSRNINDTRYITKYITSLLKNHLEFTGESKMMVYGIKGGLTSKFRKIWLNDKTWGNEDKNRNTYLNHAVDAVIIANLTPAYVEIASDNIKLQQIRRKFRRTDIPEYTDYLSQCIKKMRKYYGFSEEYTCTLLTKTERVPSYVPNIGYEVDIRFNDNDEDLFRTKIQEYYGNCDDFIIKPHMILTSHKPERRFRGTIADSNPVKLREIDGVIQKIFRKNVSELSAKEIDRLYTKDTDLITSLKHILDGKSADYTVGEYMSEKGIKCFLTEKGQPVYKVSLFEGKPYSNYYKKTIDKDNYTMLGMLKYYCIEIYKDTNGKTRTRGIRYVDIVKKDKKLYLKAECVPENYSEHVMYMFKNAYIEVYKKNGQLKFKGVFCSVKTIDRSMFYGKRNNESEAIDNLSIASTDIVRKYEIDILGRKGGEIKCSEPLSLIREKK

SEQ ID NO: 9927 - protein, 1370 aa, unidentified
  REGION 1..1370: note = Description of Unknown: Cas Enzyme sequence
MKKILGLDLGTTSIGWAYVKEAENKNEKSEIVDIGVRVNPLSTDEKQDFEKGRPLSLNAERTRMRGARRNLQRFKLRRNNLINILTKNHIINKDTILTESGKNTTHKTLKQRAKSVKEKINLDDFARVLLMINKKRGYKSNRKAKGDEDGSLIDGMQIAERLYEDKITPGQYCYDILKSGKKTLPDFYRSDLQNEFDKIWNFQKVFHSQLLDDELLSAISGQGLINTRKRIFAIKNTSTVDTKGTRKEKLLDSYRLRSEAINKKLSAEEVASVVSDINGKITSSSGYLGAISDRSKELFFNKVTVGEFLYEKLKNDSHYSLKNKVFYRQDYLDEFESIWETQKQFHPQLTEDLKIEIRDIIIFYQRKLKSQKGLLSFCSFESKNIEVVIDGKKKLKTRGMKVIPKSSPLFQEFNIWSNINNIELRQRKGDKQEFELNDEQKQSLYEELNLKGNLKGDNIFKLFKLDKDDWDINYSEIQGNRTNKILFETFIKILDDEGYVIDMKKESANKIKTAVSNILTDLGIDSSILEFDPLLDGKALENQSSYKLWHLLYSYEGDNSKTGHEGLAKKLMNDFGFKAEHVPYILNINFEDDYGSLSAKAIRKILPYLRENNKYSEACALAGYNHSSSITKEENKERELKDRLTLLEKNCLRNPVVEKILNQMVNVVNAIIDDSGMGKPDEIRIELARELKKSTEERKLMTEGINKAKNRHEQIKELLNANPFNIMNPSRNDIIRYKLWEELKENGYKTLYTNEYIPPFKVFSKDIDVEHIIPQALLFDDSFSNKTLEFRNINIDKGNKTAYDYLEQKFDETGFNEYKQRVDKYYKDGYITKAKYQKLLKKSSEIGDGFIERDLRESQYIAKKAKEMMLEICRTVISTSGSITDRLRQDWGLINVMKELNLPKYRLAEMTTKEERRGGRIIEQIKNWTKRNDHRHHAMDALTVAFTKHSHIQYLNHLNARSDKKNKKHPVIHAIENKETEKSENGKRIFVSPMPEFREEAKKHLKRILVSHKAKNKVLTRNRNITKKNGGKFEQVSFTPRGQLHKETIYSRSNHYVTKLQKINSVFDENTINKVANKAYREALMKRFKEYDNDPKKAFSGKNSVGKNPVICHNGKHIPKEVKIVSLEHQYTIRKEITPDIKIDKIVDVKIRNIVRNRVKEFNGKQKNALSNLGKNPLWLNEKNGIKIKRVTITGVRNAEPIHTKKDHHGIEILDKNNFKQPVDFVSTGNNHHVAIYRDKDGNMHEEVVSFYEAVTRKNAGVPIIQKNHPLGYEFLFTLKQNEMFVFPSDDFNPSEINLKDEQKRNLISNHLFRVQKLSGTSIDYWFRHHLETTLNNDIKLKNKTYIIIASLKNLGGVIKVRLNHLGKIV

SEQ ID NO: 9928 - protein, 1055 aa, unidentified
  REGION 1..1055: note = Description of Unknown: Cas Enzyme sequence
MTYRLALDLGSTSLGWCLFETDDGEPRRIRDIGVRIFSDGRDEQKKEPLAVSRRKARGMRRNLDRRGLRRKQLIACLVRAGLMPEDEKERKELERLDPYELRAKALDEKLPPYHLGRALFHINQRRGFKSNRKADKKEKETGAMKKAIKDLAERMEQTGSRTLGEYLYKLHKDKKPVRARPLKAQGGKSEYVLYPSREMYEAEIRTILEAQKKHHPFLTPELCEEIEDIILFQRPLKPAEPGNCVFENGEKRARKALPVFQKFRILQEVNNLEIERLSQDDPVLGPEERQKIIEALLSGKKKTFSQIRALLGLNRDVRFNLESDSRKELLGDETSAQLSDEKSFGPEWRNFPPERQEEIVNLLCQEPDPEKLARELMEKYGLDREKAEYTANEVSLPDGYCSVSKKAILNMLPWLERGNRYADAARNAGYHHSDFRTGEVFDRLPYYGEILQSNVIGGSYDEADREFPEKFYGKVNNPSVHIALNQVRKLVNGILETYGKPDEIVIEMARDLKEPADDLKKEQAKNKKENDRINKELEKLGVKQNYRNRMLFKLWEDLAKEPEKRCCPFSGKQISVTDIFSGEFEEEHLLPFSRSFNNSRANKVLSHIAWNRKKGNRSPFEAFGHEPYWNEILARVQNLPKNKQWRFMKDAWEKMEGKDGVIARMLNDTRYMARLARQYLAAVFDNEKGKSKVWTTTGQMTALLREKLGLNSLLGEDDDAKERRDHRHHAIDAFVIGLIDRGMIKKVSDAAKRVETTPELWEKRRKLVAGMPDPYEGFRDELKERIGKIVVSHKPDHGDARRAINAKRPYTVGPLHEQTAYGFISEGKKKGMVKLAVRVPVESLEKTKHISEVADPVIREKLSAAVQGLKEKSEEWKQALADFTRKTGTRRVRVHSESGADTLVGISSPKQKKNPYKYYATGGNYCAEIFSPKRGKKAGKWLCEVITNFDAHRKDFIPNWRKEHPEARLVMRLQINDMVAYEQDGKTVIARVKKIAKTKNGKIYLRPHTIAKEEGDKESWGASSNQLMLKNARKISVDILGRVKDPAAMRAKAAV

SEQ ID NO: 9929 - protein, 1140 aa, unidentified
  REGION 1..1140: note = Description of Unknown: Cas Enzyme sequence
MTYTLGLDIGAASIGWAMTTDNDLSCMGSRLFPEGLEAKSREPKNRKRREKRLVRRQIARKALRRETVLRAFQILGWLPTEKSVLEKIWLEDPYAIRKKALDEPLTKSELARALFHLSKHRGFKSNRKTDTDEELVVEETPATEAKGKAKKSKNLLRDGDAEKQGYGELDQLLKTGTVRTVGEYLASLNPHEVRIRARYALRKHYEDEFEKICDAQRAFHAELDTPVPEKLLTELCSRKQQAAWKKKSDQSLRAFIKSYLIFFQRPLKSQKHLVGNCSLEPKLRRAPISSLTFQTYRIWDKLATIELLTPERRFLTPEEKARAAELLEKTKEIEVGKLLEKISLTFQGKSDGLSESLFNDKPKAIDINTVTCNYDLDKKIKGNETAVQMMTMFREKDGRPTKKEQEAMEDKWNALSEEEKEHRWKIIYDATDNEWLERYGKEKWGLSDIGAKALTKIQFKQGYGNLSGRAMNKLIPFFKQGYNYAEACQQAGYHHSDKRPKALLDKLDKVPNLRNPIVQQGLFELRRLVNAIIKEYGKPDAIHIEFARELKLPKQKREELTKENEARRKANEQAIADIQKLGIQNPSSTDIVKYKLWRECNGICPYTGKQISAETLFRNNEIDIEHILPYSRTQDDSFNNLTLCFVDFNRNTKQNLSPFEMKERGIISEAEYEQMIERVAKFGNKAKLKRFTQKEIDDEKFVSRQLNDTAYLAREAKAYLETICPNIVVSNGQATAKLRNLWGLNSLLHPLGKNRQEATLNELEALAEKNRKDNRHHALDAAVIAATTRGFVQKLSTYSKYKREPNADKFPLPFPSFREQLKAELDDLLVSRYRKNRVQGALHEDTFYGAVREQDGSHRKDGKYEKVYTIRKKVSQLTGNEVRRIADKHVKEVFDKIIDDLKKAGKIKIVYKEKSKEKEKAPELPREFYEAAKQVKMPIKRVTIEGNRVSAKTLTPNDIPNIEPYFIRAFFEKRLQDFPNLAPDQPLPDAFFENFGVPIKCVRIHQKSQARRELRPGVFIETSNNHHIEIFRKLDTKKGKAEYTGRFVTLLDAATRKRKKQPVIDKTMEGHEFVMSLMTDEMFLMSEDGFDVRTVNWEKPDYKTISKHLYRVQKMTEGKITFCHHLDSKAENSFGKSPNT

SEQ ID NO: 9930 - protein, 1012 aa, unidentified
  REGION 1..1012: note = Description of Unknown: Cas Enzyme sequence
MRILGLDLGIASCGWALIEERDEGGKLLAMGVRSFDAPETAKERTPTNQLRRQHRGLRKVLRRRRQRMAELRRLFAEHGLISSAAPDALARGLDPWALRADALDRTLTGEELAVALGHIAKHRGFRSNRKRLANEAEDRTMLAAIAARQERTGRFRTIGEAFARDPDYALRKRNRDGDYSRSILRSEQEHEVRVIFERQRALGSRFATEDLQDAFAGIAFFQRELAGSEERVGFCPFEPEERRAAKRSYSFELFRFLARLTALRVGTRRNERPLTAEEIARAAEGFGAQQGMTFARLRQRIGLPDGVGFAGIPPEEEKKRDVVNRSAGNGCMRGSHALREAIGEPAWRALLATPEKLDAIASLLSFAAEKDIGARIAAIDLPEGVAASVLEGVRQGLFEGFAGAGHISAKACRAIIPGLRRGLVYSEACAEAGYDHARRPRTELADIANPVARKAIGEALKQVRAIVAEHGLPDRIHVELARDVGKSAEERREIERGIEKRNRERDRLRQVFVETVGQEPRGAEDMLRFELWTEQAGRCLYTDQCIPPDAIVSADNRVQVDHILPWSRFGDDSFVNKTLCFASANQEKRRRTPFEWLGADQARWERFVAAVEACKGMKGRKKRIYLLKDAASVEEKFRARNLNDTRYAARIVLEHLARLYPEDGSRRVFARPGALTDRLRRGWGLQDLKKTLEPDGEKRREDDRHHALDALIVAATSESALQRLTRAFQEAEARGSHRDFAALAPPWPGFLEEVREAFRTILVSRAERGRARGAAHEATIRQVRQEQDGPVVYERRAVEALTEKDLARVKDPERNAALIASLRAWIAAGRPKDRPPLSPKGDPIAKVRLATNKNVDVAVRGGAAERGEMVRVDVFRARNRRGAWEFYLVPIYPHQVADRERWPAPPDRAVSAHKPEGQWPVMDSGFEFLFSLHNRSFIEVEKPDGTVITGYFMGLDRASGSITISAPHSTNALARGIGARTLRRLQKFRVDRLGRVFPVARETRTWHGVPCT

SEQ ID NO: 9931 - protein, 1469 aa, unidentified
  REGION 1..1469: note = Description of Unknown: Cas Enzyme sequence
MSYFLSCNKKHLSDVQVSSRSTMNKTDSYSTISAIAVDLGAVNTGLVLTHGAIGQLPHEHLRQGLTLTLPEKGLQLSQKERLAKRHQRRGLKRRRLSKRLLQLMLKQHYSGSPEDFFNDFAKLRTFLNRRGYTYLTLEEVQGIVEDIESMDLDTRHEIVASLGAKCPLLATKEFMPQLEKTADKPLEFYQTLVTLCEETSRENKTLGKNLKKKLRSIQDYCTNILKSEKDGHKTRSQYLQNIRSDLKQPDYVQLAEHFGLTIDKLANLIGHIANLQLRVLRRYFNDPKMKIADYWDAKRLEKVFVRYLKAWHVRKSDQEYQNREKVLEYCVGNGIEKTLTELEPELTIPPFEDQNNRRPPTCASLHLDETKLDKEFPGWREWTHALVENKANTYELSGSTADEELEFLSKYYEKSAAFTKHRLSKGRDAILLQRLLDRSSLIDDYKFRTLVQVEEMVAAGEPVIDGKQRAYESGKKEIEAAIGTKIPKALVALAHRYYKESQQAKRGLWLPGETNNILFRCDRKPRQKKNAREELIGHILGVDLGSHKLWQTWEQAYFAAKTINSRSSLSSVCKGIEEARKEYGDEFHLHWSRIQRKNFQPNPANKIEKEVLKEVQKAKEAAAYIAKTLEHNAEQSKRYENPYSLAQIYNIMEGDIAGFHKTCPACTRENFWRSSPAAAAVPDTSGKIAARASRLAADTMRPFDGFLARYLERLGEKIAQEKWRQLSTEQLKGPVLLPILLEENRFRFNADMAEIKQAARRKKAQEKFARSEKREQDKWERIRKAGHGICPYTGDRVGAGGEFDHILPRSYSKSRYGTVFNSEMNLVYASTTGNQKKGDRRYTLKDLHSVYLRTVFGTDDTDTIKKQIAQTLAKYPEKNSVYFHDLDPQEQNHFRHALFDDELLGKVYHSLQAIYKMRVSGLQGYLARVIYHKLQKLNEQKKLHLHFEVFTYLASDTSLGSHRQNLMSHNKAYAKPQDDQQAPGSHVIDATMVWAEALKREDIPGLPSGLELEGDALEELLPDNLQIISLESRKQYRRKRPQSMPIFKDTIYAERYLALIVGEKKCGFGFNLKNMVEFDYEHLPWVFELLKPFGAFRGAPITETLEHYRKMLEQKKKYIYFNIVREKAAEFQQQHAYAPSLTPEQHNQMELLTGLRYFTIKKEIFAAMSDAQGKATAMFKESKDTAKFDIKVNFLLAPANEKKALRIAGKVSLPQLLAWENIAKDKTVSTFVRKGAKWQELTSSDEEDLIKRHFPRTVVNTLNHHGVRKVYSLPLPEGPSGGFRIQRRNGRRQFHVQGVEGAKFKGFTIRDGQVDFSLPAILPVLTKPNSLAPVDGYVGQPTNEFVFMDEWREIPLANFPDAWQGVERFWLQPNSEPRMRIRLQISNTVIAADLTAWHLTAPLAISTAKESEDKALAKLHKRLVTLLESINLKPRDKVNLVSVNTKSTVYEFIVQSTSSEMKAWYNTGH

SEQ ID NO: 9932 - protein, 1195 aa, unidentified
  REGION 1..1195: note = Description of Unknown: Cas Enzyme sequence
MTESRKMWRLGLDMGTDSIGWAAIELQGGEPTGLLDMGVRIFNDGRDPQTYESLNLNRRTARLMRRQKYRRLRRQKLIKNLLIRHGYFPEEPEKQEELKLLNPYVLRKKALDEKLEKYELGRVLLHLAGHRGFKSNRKTDAQDKEMSELKKKMSALEEYLKTKNYRTLGDYLYEEKLPKDYKEGVGKPFPQGPEAGLRFRPESSEFFPTRSLYEHEWDTIRQVQEKFHHDLPWDKVREKTYHQRPLKSQARGLCFYTRQKRAWKFLPTMQRFRIYQEVNNLKYWEVHENTRWRGETKTLTLEQKQLLAECLDGVRDAKVSGKRNQMYLSWAEIKKILGLKDKNYEFNLEKEPQRREGGLLANWIAYTLKKPEYFGDGWSTLTDDEQDNIVKKLYVEHDEGKLREYLKNWVKKEHQLQALLDFNVGLSTTASVSLKFARDVLVYLRQGLIYREAAEKAGYSFKTNEGFEDGTRAQLPYYGEILWDVVVNRGAVESEDEDELKKEGDTQKPSEEKPSEDDPNYLKNAIEYYGRIGNPTVHIALNQLRKLVNKLIQRFGKPAEIVVEMGRDLKATKKKRDDISKKNAQQKKENDRIRKELREKGFSNPSSWDIKKYKLWEELGRDQFSRVCLYTGKTINLDKLFSDEVEIEHILPYSRTLNDGMSNLTVSYKHANAYKGNRTPWEAFHDSNDGYDWRAILERVKRVFNPIGVDRDKQKYFEIKRSRFEKDALENYKQGEEFIESQLTDNHYIARSTRRYLSAICPPEKIWHSVGSITAKYREVYGLNKILQKETFNNDDDKTHKNRSDHRHHALDAFVIALVDRSVLQRVNTLHAQNRLGMKDFEAWKKVLPKPPSWINLQEKIKNIVPSLRVNHKLNGQFFMETALGHPRVIQGVNVLQLSDYLDLKNERDLEFIVSKKIRNEFKELYAVHKNRDKVLQELSKMYTVIYINQPLYVSRSSTAMLKDENKLNLIYDPVVLKAWKDFSSLPGEKRDLQQFFKERNIKHLRTKSFSQEACEVPSAPYKFYCLSDFLFVDVWFVPEHRSNGKKQSARYQGVFVSRWDALREKLKKVDLSLRKPHPAAKKKGRYYKDDVLYLIPKDKTSEPIWVKVKGFSTTDNKMDIYPIYVSDELVKWVRNVPEPLLPKLPKFLEKYKGYSREKKIPQNFISINVLFQDFEVQKVFVDVDGEVKLPIHKT

SEQ ID NO: 9933 - protein, 984 aa, unidentified
  REGION 1..984: note = Description of Unknown: Cas Enzyme sequence
REYGSYSAMAIKKLLPLMRVGKYWSENAIQEQTKNRIQKILDGEFDELLNINIKDKIKKWEKEKRTFTSLKDFNGLPTWLAGYVVYGIHSENEIENCKTSDEFNDKVILKLKNNSLRNPVVEQVVRETLLLVRDLWKKLERKNEKIDEIHIELGRELKNNTEEKQKIADSQKKNFEEKQRIKALLKELLNDGFKQIEDEDEPKFIDGKFEFKTKEVNANFEVKPNPENPTDIEKFKIWKSLSKRSDLEWEKKVNVEKIPKEQEIKRYILWLSQECRSPYTGKLIPLSKLFNPNQYEIEHIIPRAKMKNDSMSNLVISEWGVNKAKGNQLAANFIYDSNGKCKYGDIEYKLFTYKEYVAYCNDVFKFNKVKRNNLLATDVPEDFIERQLNDTRFITKKVAQLLKPVVGSDTKIIFTGGSITSELKKNWGLTKEWKKMMLPRFKRLEAITGKTYIKQNEHDRNDIDINVPENDKLDIKRIDHRHHALDALIVAATTREHIRYLNSLNAVDSNEELIKIKQSLVKGKIRDFNLPWETFTKEARQKLEETIVSFKVNNKIISQPTNQYSIWSKDLKKIKIQQKPNKRWMSVRKSMFKEPLGVKWIKQIKSVKVKDAFKIEIDRQKNKHDKTAPYIYDKQARLIIKQIIHQCNTPIDEKEALLKEIDAYLNKNKNKTGYLLNGIYYEKIDIAEIVSYKTKRMALTKKEYVEGLTIDKMKKDFPYFDTISKQQFELFDADKQKLITQNGIKVSDTKAMNDFNFLFLTHILEFNDNPKEAFSQEGIDYLNKKAKENPKIGKEIKSVTRLDGKVDREEMFNGGYYETDKGAMAYFVIYENKEKERSDFESIPVHKAIEKIINNKPIAEDKHGYKKIILQPGDLVYVPTEEEIVKIKNNDFNLNLNNLSKICNQLYQVRKFTGKQIYFLKATISDLILPYDEYDKQNKRKYGEFGSQNYLVINDDGKKIVDYCIKIELDRLGNVIYDKKNAFN

SEQ ID NO: 9934 - protein, 1027 aa, unidentified
  REGION 1..1027: note = Description of Unknown: Cas Enzyme sequence
MESGAAAGRGPPAQPIGLLDLGVRVYPDGRNPKDGSSLAAQRRGPRAMRRNRDRYLQRRAKLLNALTRHGLMPADAEGRRAVAARDPYCLRRKALHEKLDAHDLGRVLFHLNQRRGFRSNRKIDRADNESGKIAEATRETMAALQRDGFATYGAWLAERHEKRAGVRVRLAGSGTTAAYPFYPAREMIEDEFDTIWRAQAGWNAALTEAMREEMRGIIFHQRPLKPARVGKCWLEPEEDRAPRALPTAQRYRIAQGLAHLRYTAPGMPERPLDAAQRESLARLLYAGKDLKLDRVRKLLNLPAETDFNTREEALAGCATAARLAGGKKAPIGESWHKLDLAAQDAAVRAMLEGNTDDETAAALVALGIAPEAAAAAARVALPQGRAALSAKAMGRMLPFLEAGRRYDEAVRDAGYAHHSDLRTGEVRRVLPYYGEILCRRVGTGSGEPGDDAETRYGKAPNPTVHVALNELRRVVNAITARHGPPAEIVIETLREVGRSARQRQEYEKQQRENRAKNDARRRKLAEMGVADNAANRMRLRLWEEQAADPKDRVCPYSGTPITERMALSDAIEEDHILPFALTLDDSAANRVLVTREANRAKARRSPFEAFGHLPQWTEILERAKRLDEAKRWRFAPDALEKFARDGDFLARHLTDSAIIARWAREYLEVLAPGKVWSIPGRLTDMARRALGLNSETVLGKGGARKDRDDHRHHAIDAVVVALMDRGLLQRMTVAVKRAEERGERLFADFAPPWNGFVRDVAARAGALVVSHKPDTGWQGALHNDTAYGPIRGAGEKEPNVVVRRPLEYLAGRSAEEVRAGVRDADLAGRIAAAVEGKAGAEARAALAGVSDPAGRTVRRARTVERLDATVAIRDRRTGAPYKLFKRDTNHRAELWRWPNGKAVLRVVPTFDAARQAEAARRGQAAMDGRPHPAAKLLMRLHKNDMVAFGTGAARRLLRVVKMSGSSVTLAAPHEGGNLQARDGDRSDPFKYVHASATRFLKEGARKVHVTPDGRVLDNGPLREGGRA

SEQ ID NO: 9935 - protein, 1036 aa, unidentified
  REGION 1..1036: note = Description of Unknown: Cas Enzyme sequence
HYRLGLDIGANSIGWCCLSLDGAGRPDAILAAGVRVFPDGRDPQTLASLGADRRAARAARRRRDRYLRRRRALANALVRHGLLPATGSVAGSDPWKLREEALSRRLEPHQLGRVIFHINQRRGFASNRKTDRGNEDERGKIADASDRLRGELARSGAPTLGAWLAERHAARKPVRARLRGEGAQAQYDFYPTRDLVLAEFDAIWAAQAAWNPALTHAMRDEIRRILFHQRPLRPPVVGKCWLEPAEDRAPRALPSVQRFRIAQDLAHLRVTIPGFPDRALGDQERAVVSARLAAGRDMSFEQMRRALGLSGEARFNLESDSREKLDGAATAHRLAIGTKKRPAPLAGLWNTLDDDTRDAVAAALLDAEHEGEAADRLVALGLPEEAARRAAGTTLQDGHASLSLKAIRKLLPFLEQGMRYDEAVKAAGYAHHSDDRTGELLPALPYYGEVLKERLGTGTNDPRDPEERRIGRAPNPTVHVALNELRRVVNAIIARHGPPAEIVVEVLRELGHSAAQRREIEKAQRENRERNEHARRCIESLGLKVTGGAIKRYRLWEEQAKDARDRCCPITGTIIGIERLFSAEIEEDHILPFAITLDDGNANRVLITREANRRKARQAPFEAFGHTPEWPEILKRVALLPPAKRWRFQEGALEKWRGEEQDFLARHLTDSAYLARLARLYLRAICDPDRVWTVPGRLTALVRDAQGLNALIGRGGARKDRTDHRHHAIDALAVALTDRSLLQRVSTAARRAQEVDRRLLADLEEPWPGFVAEAQAAIGRIVVSYKPDHGTGGKLHNDTAYGAVRGAGETGPNVVVRKPLAGFVKARPEDAREAIRDPVLAGKVAATLAITDAKARAAALAALEHGGAPVRRVRTWERLETRPIPSAPWKRVKLDANHRIEFWRLPGRDGRPGKVVTQVVPLMDAAADAEAKRLGRKVPERKPHPAATLLMRLHKNDLVAFGEGDGRRILRVVKFSAKQLAFADHAASGNLKARDADKQDPFRYTYASVALFARERARKVRVDPDGRVHDPGPRVW

SEQ ID NO: 9936 - protein, 1127 aa, unidentified
  REGION 1..1127: note = Description of Unknown: Cas Enzyme sequence
VLYHLNQKRGYKSVRTESSSDKKDTEYVAEVKSRYQKLKEEGKTIGQKFYEELLKNKFYRIKQQIFPREAYIEEFNLIMKKQQEFYPEVLTNELIEHIRDNIIYYQRKLKSQKGLVSVCEFEGFYVKNKDGKEIFIGPKVAHRSNPLFQVEKIWETINNISIKDKRNNELQISLEQKQSIFEYLDNNEKLTHSELFKILGIKEKSGWVGNKMLARGLQGNLTKVWIKKAFDNSSLENNLLKFNLNLIIRDEEAFLVNKETGEILSSLPKEEISSEFVNEPLYQLWHTIYSIDDIEESKKALIKKFQLDDNTADKLSRIDFNKLSYGNKSIKAIRKILPYLIQGYRYSDAASFAGYNHSFSLTKNEVAVKSLLDKIPLLQKNSLRQPVVEKILNQMIHLVNNIIDEKRNWITKEERENGLFEIRIELARELKQSKEERNETFKNLTKIEKENKEIEKKLLDMGLRATRNNIIKYRLFNEISNNKINGMCIYTGKMFSLTNALNGDEIDVEHIIPKSLLFDDSQSNKTLTYRWVNQEKGDLTAYDYMASKGEDVLNEYIERVNNLYKDKIISKTKRDKLLMPANKIPQDMIARQLRETQYVNKKAKEILEQICKNVWTTSGNVTAYLRRIWGWDDVLMSLQIQRIKEIIPDPLQEGITEIIEWETDDGQIHKKEAIKGWTKRDDHRHHAIDALVVACTKQSFIQRINTLSAQHTREELFAEVSKQSTNLREKLSLLDKYLILQKPFTTKQVEEKASEILVSFKPGKKVTTYGKRFIRKNGKRIKVQDKIIVPRGQLSEESVYGKIKTIEQNKPLKYLFENPHLIFKSYIRDLVETRLSKYGGDIKQALNSLKKDPIYLDKENTIILQYATCFKEEYVLKYPLNDLKKDDVKFIVDKRIREIVEQRLKQFDNNHKEAFKEPLFYDKENKIPIRTVRLFTGLTAVEPLKIDNRGEPISFVKPGNNHHLAIYEDENGNKIPHLCTFWHAVERKKFGFPVIIDNTTLVWDKIFQDEEGKYTEEFLRKLPGDKWKLNLSIQQNEMFILGISQENFYNIINNKKLLSPYLFRVQKIFFNGKQLEVYFRHHLETLLNDSNEAKKIKRFYAIKSLTALENLNPIKVRINRLGEVEML

SEQ ID NO: 9937 - protein, 986 aa, unidentified
  REGION 1..986: note = Description of Unknown: Cas Enzyme sequence
ILALGVRCFDAPEDSKDRTPNNQARRQHRGLRRVLRRRRQRMQELRHLFLAHGLLASAGPDALALPGIDPWAMRAEALDRVLAPCELAVALGHIARHRGFRSNRNQRSNEAEDRTMLAAIAARQERTGHYRTIGEAFARDPEFARRKRNRDGDYGRSILREEHEREVRLIFARQRALGSQCATEALEQAFTDIAFFQRPLAASEDRVGPCPFEPGERRSARFAPSFELFRFLARLTTLRIGTRREERALTAEEIARAEQGFGTQQGMTFKRLRKLLNLAEAEGFIGISPEDEGRDVVNRSPGNGCMRGSAALRQAIGEGAWLRLLSTPERLDAIAFVLSFAAAKEFPERLAALGIEEDVIAAVLAGVEQGMFDHFAGAGHISAKACRKIIPGLRRGLVYSEACQEAGYDHARRPETSLSDVANPVARKAIGETLKQVRAIVAEYGLPERIHIELARDVGKSAEERAEIARGIEKRNRERDRLRRIFVETVGREPAGSEDMLRFELWLEQAGRCLYTDHCIPPDAIVAADNRVQVDHILPWSRFGDDSFANKTLCFATANQEKRGRTPFEWLGADQERWNRFVAVVEGCKGMKGRKKRIYLLKDAVSSEEKFRTRNLNDTRYAARIVLEHLAHFYPEDGSRRVFARPGALTDRLRRGWGLQDLKKKLEPDGEKRHEDDRHHALDALIVAATSESALQRLTRAFQEAETRGSHRDFSALAPPWPGFVDQAREAFKTILVSRAERGRARGEGHEATIRQVRKDEDGPVVYERKSVEALTEKDLARVKDPERNAALIESLRAWIAAGKPKASPPLSPKGDPIAKVRLRTDKKPAIEVRGGVAERGEMVRVDVFRARNRHGRWEFYLVPIYPHQVADKVRWPTPPDRAVQGNTPEEQWPVMDAGYEFLFSLHQRSFIEVEKRDRTVITGYFMGLDRHTGSIAISTPHSTKALARGIGARTLMRFEKFRVDRLGRTFAVRQETRTWHGVPCT

SEQ ID NO: 9938 - protein, 1547 aa, unidentified
  REGION 1..1547: note = Description of Unknown: Cas Enzyme sequence
LGTNSIGWAVVNADEITRENETTYLKPTSISSAGSRIIPMSADILGNFDAGNSVSQTAERTGFRGVRRLHERNLLRRERLLRVLKLMGFLPEHFANQIDEHGKFIDYSEPKLAWRKDKNGKYDFVFKDSFDEMLEDFAQHQPQLVAEGKKVPYDWTIYYLRKKALTQRLKKEELAWILLQFNQKRGYYQLRGEDEDEQQDKMVEFIAQKVVRVEATDEKKGDDVWYNVYLENGMVYRRTSKMPLDWEGKIKEFIVTTDLEKDGMPKKDKEGNIKRSFRGPKEDDWTLMKKKTEYDIDNSHKTVGCYIYDNLLQKPDRKIIGKLVRTVERKYYKEELRQILATQIVLITELRDEAIYKRCIEELYPNNEAHRSNIAKPDFANLFVNDILFYQRPLKSKKSLISDCPYESHFDENGNEHPLKCIAKSNPLFQEFRLWQFVQNLRIYQRERIISDGQLDLFGNISAGRLQTDVDVTDEFLKTEDDYVKLFDWLNDRVSIKQDTLLNSYFKFKKEKGKDQYPYRWNYVEDKEYPCNESRATMLNGLAKCSIDAGFLSHEKEMSLWHILYSVEDKVEIDKALKKYAEKNNLPNSFAEVFAKVKPFKKDYGSYSEKAIKKLLPLMRMGKYWDANAIDDKTKERIDKMLTGEYDENIKNRVREKAINLTDIIHFRGLPVWLACYIVYNRHSEAKEIGKWQKPEDIDCYLKEFKQHSLRNPIVEQVVTETLRTVRDIWKQEERIDEIHLELGREMKNPADKRKRMTENILQNENTNLRIKAMLMEFANPEMGIENVRPYSPSQQDILRIYEENALDNLTKDDKDYDFISKISKLAQPSKADITRYKCWLEQKYRSPYTGEMIPLAKLFTSAYEIEHVIPQSRYFDDSFSNKVICEKEVNGLKDRQLGFEFIKNHHGEKVQLSQGKVVEIMSVEAYEKFVKEHYASNRTKMKKLLMDDIPDGFIERQLNDSRYISKLVKGLLSNIVRERLENGEYEQEAVSKNLISCNGSITDRLKKDWGMNDVWNSIVLPRFRRLNELTGRDCFTAISAEGHEIPAMPLELQKGFNKKRIDHRHHAMDAIVIACATRDHVNLLNNEAAHSKHNANRYQLQRKLRRFEKVVINGQEKEIAMEFLKPWDSFTTDAKQILENIIVSFKQNLRVINKTTNSYLHYDENGKKVMMKQEKGDSWAIRKSMHKDTVFGEVNLRMSDKTVLLGEALKNPKAIVNKEFKKKVVELLEAGRDAKYIKKYVEDNKDVWSDIDVKRIQVYYFTKETKDRYFATRKPLDTSFNRKKIEDSVTDTGIQKILLAHLDAKGGDPELAFSPDGIDEMNRNIVTLNKGKFHQPILKVRVYEKAEKFAVGQNGNKSAKFVEAAKGTNLFFAILGTEKTNKETGKTEIVRSYLTIPLNVMIDCQKRYGSQWRNNIEAYLQEQQLVTSDVRLLFILSPNDLVYLPTEEELKGGLEAVDRKRIYKFIDPNSNKGNFVPYSSANVIFSINFTDQKKRGMSYPIQDEFGIGSQASKNPRAITGEMIKETCVPIKVDRLGNIIELNGKKV

SEQ ID NO: 9939 - protein, 1536 aa, unidentified
  REGION 1..1536: note = Description of Unknown: Cas Enzyme sequence
MKKILGLDLGTNSIGWAVVNADEINRENGTTYLKPIGISVAGSRIIPMSADILGDFDKGNSVSQTAERTGHRGTRRLLERNLLRRERLLRVLKIMKFLPEHFDNQIDNRGKFTNYLEPKLAWKKDANGKYEFVFKDSFNEMLTDFALNQPQLVSDGRKVPYDWTIYYLRKKALTQRITKEELAWILLQFNQKRGYYQLRGEEEEEPQNKLVEFLAQRVVKVEATNDKKGDEIWYNVYLENGMIYRRTSRIPLDWVGKTKEFIVTTDLEKDGTPKKDKEGNIKRSFRAPKEDDWTLLKKKTEYDIDNSHNTVGCYIYDSLLQKPNQKIIGKLVRTVERKYYKDELRQILEMQESMIPELKDEALYNACIEELYPNNEAHRQSIVKPDFTYLFINDILFYQRPLKSKKSLISDCPYEIRYDKDGNEHPVKCVAKSNPLFQEFRLWQFVQNLRLFQRERTINDGQLDLFGNVSTGRLQTDVDVTNEFLKTEDDYVNLFDWLNDRAEIKQDTLLNLYFKIKKEKGKEQYPYRWNYVEDKEYPCNETRASILSGLTKCGIGADFLTKESEMLLWHILYSVEDKVEISRALKTFAEKYGLNNSFVEVFSKIKPFKKDYGSYSEKAIKKLLPLMRMGKYWAIDNIDAKTQQRIEKIITGEYDENIKNRVREKAINLSDITHFNGLPIWLACYIVYNRHSEAKEIEKWDSPEAIDDYLKAFKQHSLRNPIVEQVITETLRTVRDIWKQEGRIDEIHVELGREMRNPADKRKKMTERILENENTNLRIKAMLMEFMNPEMKIENVRPYSPSQQDILRIYEENALDNLSKDDKDYDFVSKISKMAQPSKADIIRYKCWLEQKYRSPYTGEMIPLAKLFTSTYEIEHVIPQSRYFDDSFSNKVICEAEVNKLKDRLLGYEFIKAHHGEKVQLSQGKVVEILSVEAYEKFVKDHYSNNSIKMKKLLMDDIPDGFIERQMNDSRYISKVVKGLLSNIVREKLDNGEYEQEAVSKNLISCNGSITDRLKKDWGMNEVWNSIILPRFQRLNEIMGKDCFTTTNAEGHVIPQMPLELQKGFNKKRIDHRHHAMDAIVIACATRDHVNLLNNEAAHSKHNANRYQLQRKLRRFEKVVIDGKECEIAKEFIKPWDSFTTDTKQALENIIVSFKQNLRVINKTTNYYQHYDENGKRVLLPQQKGDSWAIRKSMHKDTVFGEVNLRMKKTVPLNEAIKNPERIVNKDFKVKVKELLREGRDAKYIKKYIEENKDVWSDINPYKIEVYYFTNETNDRYFATRKSLDTTFDKKKIETSVTDTGIQKILLAHLASKEGNTELAFSPDGIDEMNRNITTLNGGQHHKPILKVRVYEKADKFAVGQTGNKSSKFVEAAKGTNLFFAVFATETENKETKEMELVRSCLTISLNVMIDCQKMYGKQWRNNIEIYLKEEGLSANVSKLLFILSPNDLVYLPTKEELKEGIKEVDKERIYKMVSCTGNEGHFVPAIIANPILQTTELGSNNKAQRAWTGEMIKEICIPLKVDRLGNIIELNGKQP

SEQ ID NO: 9940 - protein, 1372 aa, unidentified
  REGION 1..1372: note = Description of Unknown: Cas Enzyme sequence
MKKIVGLDLGTASIGWAAINKAEKEGEVTEILACGSRIVPLSTDEKDNFEKGKAITTNADRRLKRSMRRNLQRRKQRRDNLKTLLVEEGWIPADFSFSEKGKGTTHETLSLRAKSATEEVSLQEFARVLMSINAKRGYKSSRKTDSGEDGQAIDGMNVAIELQKNHLTPAQYAKNVLVENPSARFEFYRSDLESELDQIWSYQQTFYPQILTDELKRQISHQGKTGTSKIILAQHGIYTADNKGKDRRITAINWRVDALSKRLEEPVLAYVISDLRGAIQNSSGYLGDISDRSKELYFNHETVGQYLYRMLQTDPLYSTRNKVFYRQDYIDEFNRIWAEQSKHHPELSQELKRRISDRILFYQRPLKSQKGLVSFCEFESRPIEVVIDGKKKTRRTGSRVAPKSSLLFQEFKIWQTLNNIEIYDSTADQERTLAQEEKILLADELAIRPSMKASEALKLLGLSSRRYRLNFKELSGNVTMAALFASYFDVIEASGHGEYELSKLRYQESLRILEDVFPVLGCVKDIFHFDSQLEKEAYEQQPVFKLWHLLYSYEGDKSPSGKEALYGRITDITGLPREYARIIGAITFPDDYGSLSHKAIGNILPFLKQGYAYDDACRMAGYNHSHSRTGEENDSRELQEKLEQIGQGELRNPVVEKILNQMVNVVNAIAETYGKPDEIHIELARELKQNAKERERATSDILANNKRNQEITQILQKDFGIHSVRKTDILRFRLYEELKENGYKTLYSNKYIRRDQVFSKDIDIEHIIPQALLFDDSFSNKTLEFKDINIEKGSRTANDFVKDKYGEEGYNSYRLRIDDLCNRGIISEKKRKNLLMTESEIPAGFVDRDLRNSQYIARKAQELLDGYVRVVVPTTGSVTARLREDWQLVDVMKELNFSKYEKAGRTFIDVDSDGRQIPKIQDWSKRNDHRHHAMDAITIAFTKPEHIQILNNLNARSNKDSAFYQMFLNETVRTDKKWIFAPPMPLDILRREVKSHLDAALVSIKAKNKVVTKNINKTLSAAGVRKTTELTPRGALHKEQVYGLRQQYEVFEVPVNAKMTREVIASVASSRIRAALLDRLNAFGGDPKKAFSGGNTLEKNPIFLDPAHCSAVPLKVKCVRFKPYYSIRKDVAPDLNVEKIVDSKVRARIQERLAAFGGVARAALSNLDENPIWLDDAKTIPIKRVTIQENFDLYALHDKRDKEGKVLLDSLGRPISNDFVNLRNNHHVALYLDENGKVQEMVVPLFEALNRINQDAPVIDRSFHADLGWRFLFSMKVNEMFVFPDEATGFNPADIDLMDPKNAAIISPHLFRVQKLSKGDYWFRHHLETTIEDDKDLKDITWKRINSIQAMLNVVKVRIDHLGRIVGIGEYD

SEQ ID NO: 9941 - protein, 1512 aa, unidentified
  REGION 1..1512: note = Description of Unknown: Cas Enzyme sequence
MKKILGLDLGTNSIGWAVVEKDDNNGRIIKSGSRIIPMDAATLGDFASGNTKSQTAERTAKRSARRMRERFLLRRERLHRLLHILGFLPKHYEEKIGWDMENDSKHYGSFLENEEPKIAWMKNEENKYEFIFQSSFHEMLEDFKKYHPDILSDGKKIPYDWTLYYLRQKALSQPIGKEELAWIILNFNQKRGYNQQRDEELETSDDKKEEYMCLTVLSVTPDEDAKGKDIWYNIRFENSDIVYRRKSKYPLNWVGKKRNIIVTTKLDEDGNPKLKKDGSIDYSVKSPNDDDWALQKIKTEQDLKASRQTVGQFIYAALLANPSEKIRGGIVRTIERDFYKDELEDILQKQSEFHAELKDRSLYEQCINELYRNNEAHRNNIAKNGFTFLILEDVLFYQRPLKSKKSLIEDCPYESHQGIDKETGEICTYPLKCIAKSNPYFQEYRVWKFLSDLRIIANTKEINGHIHTDVDVTSEFLPDNESWSNLYIWLNDKGHVNQSDILAYLGIKKKEQSKYRWNFVADKHYPMNATRHAILNRIKDDEVLTREQEQAIWHLLYSTTSKAEIDKSLSSSDNPSNIYTKLIEGGFTQESIEKIKTIKLPDEGYGAYSEKAIKKLLPLMRCGKLWDEKGIHPSTLQRIDAFSKGEGMDAFSENVNLRLSSMSGIDSFQRLPEWLACYVVYGKHSEANDIVKWKSPDDINIYLNNFKQHSLRNPIVESVILETLRIVRDLWKRYGDIDEIHIEMGRELKNPSDKRAQITKRVLENENTNIRLKTLLAEFLAEEYKIENVRPHSPSQQDLLRIYEEDVLAHNEPDDEIKDIINSLSNPTKQPTRTQVLRYKCWLDQKYCSPYTGQPIPLSRLFTSDYEIEHIIPQSRYFDDSFSNKVICESEVNKLKDNQLGYEFIKQHHGQTVQLASGKMVRVLEVDHYEQLVKDNFAQSKRRKLLMDDIPAEFIQRQLNDSRYISKVVKGLLSNIVRTTDEDGNLEREAISKNVITCNGSVTTRLKRDWGLGEVWNFIILPRFQRLNELTGRNCFTTFNTHGNEIPAMPLELQKGFSFKRIDHRHHALDAIVIACTTREHVNLLNNEAALPNHQEMKHALSHKLRRCEEIVINGKKRRIFKEFIMPWASFKNDTLLSLQQIVVSFKQNLRVLNQATNLYTKYENGQKTLSAQHSSDHFAIRKSLHKDTVFGHVNLQRRTTIKLKDALKDVNRIVDKRLKRKIKELRAKHYNDKQLLVYFKDYAYEWKGYDFNKVEVFYFTDDKEPMVATRFCNDLVSIFSGKNKKQDIEKVIAQITDTGIQKILTNYLNKNLDKIEYAFSAEGLEQMNENIDQYNNGKKHKPIYKVRLTEIFGQKFQIGLSGNKTAKYVEAAKGTNLYFAVYQSEEGSRAYTSIPLNIVIERLKQHLSPVPERNDKGNNLLFYLSPGDLVYVPTIEENVFSVDTIANNRIYKFISGSGYQAFFVPYNIANPIIQTIELGSNNKSERAWTNEMIKEYCFPLSINRIGEIKLK

SEQ ID NO: 9942 - protein, 1208 aa, unidentified
  REGION 1..1208: note = Description of Unknown: Cas Enzyme sequence
MSKILGLDLGTNSIGWAIVEKEEGQPYHLLDRGVHIFQEGVAREKSVEKPAVQERTAARASRRHYFRRRLRKIELLKVLVSNELCPFLSEEELNRWKSEKRYPMNDEFLAWQRTDENEEKNPYHDRYVCLTRSLDMKQRSERYILGRALYHLNQRRGFLSNRKDAAREDEKGKVKTDITSLSGEMQSAGCKYLGEYFYQCYGKEKIRTRYTARNEHYKAEFDAICQKQHLSESLKKDLERAIFYQRPLKSQRVNVGKCTFEKDKPRCAVSHPRYEEFRMWQFINSIRVSFCGEAERPLTVEEIDTVLPLFFRKTKADFDFEELAKKLAGKGNYAYREDAREVAYKFNYKMSANVPGCPVLAAVLAETGIAPSLEWDKELAATYTKGEGKTVDQIVNDVWHALFAFDDEEKLIVWLKESLQLDEESAKKLAKASIPQGYASLSLKAINKILPWLKKGYLYSHAVFFANLGNVLPNGTTQDKRAEVEENIRILLDSTASQSRMQEAAIYKDLKGYFPGANLEKLYHPSMIEVYRKALPDEQGRIRLGSPRTDAFKNPMALRALFRLRALINRLLDEGAIDTETKIHIEFARGLNDANKRKAIEDYQRELAKQREEDRKKIKAEFVREYGKDYDPTEDDLLKYRLWEEQDHICLYTGHQIGLSSFLGTATEYDIEHTIPRSRGGDDSQMNKTLCDSHFNRFVKKAKIPYELEEQKVILQRIEKWKEQIDALEKQIAFQKRKSRGASSKAEKDNAIRQRHLLTMKRDYWKGKYERFTMTTVPEGFSNRQGVDIGIIGKYARFYLETVFRRAYIVKGATTAAFRKEWGLQKEYVKKERVNHSHHCIDAVTIACIGKNEYDQWKQYMEREDDYLFGKGPKPVFEKPWPTFSEDVNAIPRELIVSHYTPDNMPKKSRKILRVKGVIQRNEKGEPIYVQGDSARGLLHKDTFYGAIKRDDEIRYVVRRSLDSIEEKDINNIVDDVVREKVQMAAKRAGSLKKAVEEGVWMNEEKHIPINKVRMYANSVVSPVHLKRHRDESDKEYKRSLFVMNDSNYCMAVYGDKRPSFKLYSTIEAARLFKEKGGMDQWIPLSDDKDLPLRFVLKVGTMVLFYENSPKELLECSQEELTARLYKVTGLSSMTIQRKYNYGTVSLKHHQEARLSTELTVSKGVWNNGQPYRALINLLHTQLSILVEGVDFELSTTGRVIFKPHPVW

SEQ ID NO: 9943 - protein, 1524 aa, unidentified
  REGION 1..1524: note = Description of Unknown: Cas Enzyme sequence
MKNILGLDLGTNSIGWAVVNAETETRNNETSYLKPIGISSAGSRIIPMSADILGDFDKGNSVSQTAERTSYRSIRRLHERNLLRRERMLRVLRTLGFLPEHFEAQIDRYGKFANNCEPKLPWCKREDGKMVFLFQDSFNEMLADFAVNQPQLVVNGKKVPYDWTIYYLRKKALSHKISKEELAWILLQFNQKRGYYQLRGEEEEQEDKLVEFLAQKVISVEATNEKKGDEIWYNVHLENGMIYRRTSKEPLDWVGKVKEFIVTTDLDKDGLPKKDKEGNVKRSFRAPKEDDWTLMKKKTEADIENSQKTVGCYIYDTLLQKPDQKIIGKLVRTVERKFYKDELIQILKKQQEYIPELQNEALYLSCIEDLYPNNEAHRNNISKPDFVNLFVNDILFYQRPLKSKKSLISNCPYESRFDKEGNEHPIKCIAKSNPLFQEFRLWQFVQNLRIFEREKEIGGKLLADVDVTNDFLKTEDDYVNLFDWLNDRAGIKQDTLLNSFFKIKKQKGQEQYAYRWNYVEDKEYPCNETRASILSGLTKCSLDADFLTKEAEMHLWHILYSVEDKIEISKALKSFAEKHGLTDIFVEVFSKIKPFTKDYGSYSEKAIKKLLPLMRTGKYWAIDNIDTKTQEHIEKIITGEYDENIKNRVREKAFNLTDLTYFKGLPVWLACYIVYGRHSEAKEIEKWETPEAIDKYLCAFKQHSLRNPIVEQVITETLRTVRDIWKQEGQIDEIHVELGREMKNPADKRKKMTERILENENTNLRIKAMLMEFMNPEMGIENVRPYSPSQQDILRLYEENALDNLTKDDKDYDFVSKISKMAQPSKADIIRYKCWLEQKYRSPYTGEMIPLGKLFTSTYEIEHVIPQSRYFDDSFSNKVICEAEVNKLKDRLLGFEFIKAHHGEKVQLSQGKMVEILSVEAYEKFVKDHYSSNRTKMKKLLMDDIPDGFIERQLNDSRYISKVVKGLLSNIVREKLDNGEYEQEAVSKNLISCNGSITDRLKKDWGMNEVWNSIILPRFQRLNEITGKDCFTTTNAEGHLIPQMPLELQRGFNKKRIDHRHHAMDAIVIACTTRDHVNLLNNEAAHSKYNANRYQLQRKLRRFEKVVLDGKEREIAKEFIKPWDSFTTDTKQTLENIIVSFKQNLRVINKTTNHYQHYDDSGKKIVLPQQKGDSWAVRKSMHKDTVFGEVNLRMKKTVSLNEAVKNPQRIVNRDLKKKVMKLLAAGHDAKYIKKYIEENNDVWSDVNLSRIEVYYYTKETKEHYFATRKPLDTSYDKKKIENSITDTGIQKILLAHLEAKGGDPELAFSPDGIDEMNRNIITLNSGQYHKPIFKVRIYEKADKFAVGQNGNKVSKFVEAAKGTNLFFAILASEKLNKETGETDIVRSYCTIPLNVMIDCQKKYGNQWKGNIEKYLQGENLVANDVKLLFILSPNDLVYLPTKEELKAGIKEVDKKRIYKMVSSSGNQCFFINAKVAKPIVDKVEFSSLNKAERAISGEMIKMTCVPIRVDRLGNIVELNGALYD

SEQ ID NO: 9944 - protein, 1217 aa, unidentified
  REGION 1..1217: note = Description of Unknown: Cas Enzyme sequence
MKRILGLDLGVGSIGWSLIQADDEGNPQSILDIGCRIVPLSPDDTNEFSSGNAISKNRKRTQKRTCRKGYDRYQQRRQNLTDELRGLGMLPDERLIKLPVLDLWQLRADAATPGKKLTLPEIGRILYHINQKRGYLHSKTDEDDKAQRDYVQAINNRFAHIKAEGKTIGQYLAGKLADSEVTTDKGQFYTFRIKEQVFPRKAYQEEFDQIIACQRIHYPDILTEEVIHRLSDEIIFYQRPLKSCKHLISQCEFAMREYKTADGKRIQAGPKVAPRSSPLFQVCKIWESVNNIEMKNRNGESYPFSEEERLKLFNFLDNNEKLTVTDLKRILGLSVKDKWWGGKAIGKGLQGNTTKIALKKALQGHEGLLSFHLKTVDSRHIDTETGVILQEIAPGFEKEPLYRLWHIIYSIKEPDEMASALKQQFGIEDPEVLSRLAKIDFVKAGYGNKSARFIRQILPYLQKGLKYSEACDYISINHSNSLTTAENKSRKLQPRMQQLQKNELRQLIIEKILNQMVNVVNALLDKHVSIDEVRVELARELKQSRDERNSTFLNNSKRERENKIISERIQEMGIRPSRNRIQKYRLWEESKHICFYCGQPVGVREFMEGVDVEIEHIIPRSLFFDDSFSNKVCACRKCNAEKGNRTAYDYVKKKGENEFADYTRRIEEAFEKKEISKTKRERLLTSAKDIPEDFIDRQLRQSQYISKKAVEMLKQVCRNVWTTSGSVTDFVRHQWGYDNILHDLNFKRYKDAGQTEIIVCDQMGQVRQVERIKDWTKRLDHRHHAIDALTIASTKQSYIQRLNHLNASRDQMFQELETQSNKVREEYSLLENWMKERPHIPVSVVSQIVDGILVSFKTGKRLTTPGKRYTYKGGKREIAQSGIIVPRGALSEDSVYGVISCLEENVPVKKLFEHPDIIFKPYIRTKVENRIKEYDGDWKAALKSLKKAPIFLGDGETKPLEYATCWKKEYVIRYPLASIQKKDVKYIVDQHIRQLVSERLNAVGEKDAFKEPLFSDKAEKNPIKSVRLFTGLTHNSLSPVKYLDGFPIGYSKPGNNHHFCYYRNENGELFEHIVSFWHAVDRKKYGIPVIIEDTDVLWDEMANRDLPQDFLKYLPPVGLKLEVSLQQNEMFILGMKDEDYERSIKEKDLRMLNQYLYRVQKISSQYIVFRRNTDTGKDEDSKAQSIGQFVRVSSIKGWIQCNPHKIRVNVLGEISEI

SEQ ID NO: 9945 - protein, 1207 aa, unidentified
  REGION 1..1207: note = Description of Unknown: Cas Enzyme sequence
MEIDAKQRILGLDTGTNSLGWAVVDRLPEGYKLVDKGVHIFQEGVNIEKGTQEKSRAAERTEHRSLRKQYWRRKVRKIRLLAVLSNAGLCPPLTSEELHAWRVDGKYPLSNEAFMSWQRTDENKGVNPYAARCKCVEQELDTENRNERYLIGRALYHISQRRGFLSNRKDQADDKETGVVKEGIKELTQKIQNAGCEYLCQYFYQLYQRGERIRSCYTDRKEHYEKEFAAICEKQHLDEALVATLHKIIFVPRPLKSQRRGVAKCPFEPSKHCAPISHPLFEEFRMWSFIRNIKVQTPEDSELRALTNEEIAKVLPLWFRKSKPNFHFEDIAKAIAGKGKYCYYKSAEAKPFRFNYYLDSSVAGCPVSAQLKEIFGEDILRDRAKVDTIWQALDFYTDDLKLREWGIKHFNLTDEQADALVKIRLPQGYASLSLKAMENIVPLMRDHGMIYPNATLIAKLRDLLKGYDFDEEVDAYLINDIEDYLTIPTDKDGKPLMTREERKQILERKWQMHYNLSDKDLQKLYHPSMIEEYRKVENKTNGVYQLESPRISALKNPMAMRALFRMKAVVNQLLKEGTIDENTIIHIEFSRSLNDANRRAALRRYQTILRDEREKACEAIKPYVPNPSDDDILKYLLWQDQGGKCIYTGKDIHPRELYFGTEYDFEHTVPRSMGGEWTRENLTISDKTFNTETKGSRLPSQLMPKYQQMFAAILQSWKEKYEALDKQVRAEQRKAKTATIKQKKDSYTQSAHLKAMQRDFWRDKYEAFTIKEEEVKGFTRRQVTDAAVISRYARLYLLSLFNRVDVVQGIITADFRKLWGIQPAYEKKNRENHVHHCIDAITIACIGKREYDLRAASYRAEEERKVKLVVPKPWPGFTENIKEIEKEILVTHYTPNPMGKQTKKKLRDSHGHILYDKHGKALYSFGDTARCALHNDKIYGMIANSHDIDAKHTIGRKCAVLRVPLINVDVKNVVDPVVKQVIIDAIAKYGSLANAIEAEQENNDGSIWLNEEKHVRLKRVRCFQDKYNNAAPIRPLRDKSAKEYKQNQYSATNGNYMAAIYEGTDNKGNRKRSFVLISNLIAAKAFKTHLPIVPTTSEEGYPLIMTLRIGDLVLLYEQSTNEIRNASQKELVKRLYKITGMSDSGGLQITMRHQQEARPDKELQQINGAFIASEPIKNMRMLRHTQINALVQGHDFELTETGKIIFK

SEQ ID NO: 9946 - protein, 1021 aa, unidentified
  REGION 1..1021: note = Description of Unknown: Cas Enzyme sequence
CPISGRMKNLFGENWENWQFDSGVTKINIKSGEIKTITYDAIDLWHVCFSFDEPEYIEEFAKNKLHFDDIQTKQLVRIFGAIQQGYGMLSLKAIKNINHFLQKGLIYTDAVLLAKLPDIFKDKWETVEDIVIKEIDAIIDNNRKQKQVFNIVNALIANYKSLGITEQFANKNYDYKLGSSDFKDIREAVLRAIGEKTWAKKNTEEQNQLLDEVAELYQNFFVSEKRDYYKLPKVADALAEFLRERYEFLSEKDLRKIYHPSMIAFYAPSKPEIIEDGRCLCLLGSPVIGALKNPMAMRVLHTLRKQVNALLKATDEYGNALIDEDTRVVVETARELNDANKRWAIEAYQREREAENKEYEKLIKEYYPSRKMKDDDLAKARFVCEQHDLLEVDIRRTKSHKELKEKELRYKKDVTKYRLWVEQGCRCLYTGKIINITNLFDDNAFDIEHTIPRSQSFDDSLANLTICDASFNRTIKKNQIPTQLANYDDIKSRLQPWFDKVEQLKDNVEYWKSQSKRAQTKERKDNCIRQRHLWQMELDYWQNKVSRFTMTEVTSGFRNNQLNDTRIITKYAYHYLKTVFNKVEVQKGGVTANFRKMLGIQSVDEKKSRDKHSHHAIDATILTLIPTAAQRDRMLELFYKIQEKKRFGDNTSELERDLGKEIKNCGLSGNVSEIVPHIENNILVNHVSKDQTLTPAKRKARLRGKEVFVKNKQGELVNKWITGDSIRGQLHKDSFFGAIRYPATDENEIPKTKDGRFEYVKDSEGKDVVSMVMRVPITSFTKEDELKKIIDPHVRGSIETNIRNRQSEGKSFKAAIEEHMWLLDGKGNEIKQDKNGRPLSPIRHVRCRVAAGRGYFTKDKAIEIKKQTYPSLYEYKNSYYAQNDGNYLCLLYEGVKKGKVERRFRFLNYFDMVQLGIKDAKEIKNEPYFQTIEENNDSLYLTAIIKAGTRILMWSNSPEELVGMSHKDVSKRLFVVYKFNLKGANCIYLQNHIEARNEINKDEDCTVFDESKYQARLTLVA

SEQ ID NO: 9947 - protein, 1018 aa, unidentified
  REGION 1..1018: note = Description of Unknown: Cas Enzyme sequence
KCEYLGDYFYKIYKEKGNTERIRTHYTDREEHYKKEFYAICEQQQLTEEQISKLEKALYFQRPLKSQRQGVGKCTFEPKKPRVADSHPAFELFRMLSFVNNIKIKGPHDVELRPLSQEEYEKAKPMFFRKSKPQFDFEDIAKAIAGKGKYQCIKDAGDKEYKFNYRMSQSVTGCPTIASLMSVFGDDYETAIAERYTLSDGKTPKQMVNDVWNVLYSFSDKDKVKQWGQDKLQMNDEEAEKFSKIRLTHSFGSLSLAAVNKILPWLEQGLIYPHAVLMAKVPDIVGKEVWNTRGESITNELYNLITNFNPKDDAMQGTLDFCIKDVLKDMCNLAPGAAEKLYHPSMIETYPDAKKNAQGVYQLGSPRTNAVRNPMAMRSLHQLRKVINTLLREGTIDSQTEVHIEYARELNDANKRKAIAQWNKNRETQRKKYAEDIRALYKQSCGKEIEPTDDDIVKFQLWEEQKHICLYTGDSIGISEFIGPNPSYDIEHTVPRSVGGDSTLENMTLCSSKFNREVKKAKLPTQLSNHEAIMDRLEEWREKIEKLRKDADRVKTHSGMDKGVKDRLIQKRHLLKLELDYWLGKYKRFQMEEVPEGFARRQGAGIGLVGKYAGLYLKSLFHKTDDRSKSNVRVVKGTTTAEYRKMWGIQDEYEKKSRDNHVHHCIDAITIACIEPGEYNATARYYQQLEEYERTKSAKPSFPKPWPTFTEDIKAIAQEILVVHSTPDNMPKHARKYVHTSQGKKLAMGDSARGSLHNDTYYGAIERDGEIKYVIRKELSSLKETDVENIVDDVVRDKVKQAIAEKGFKQAMEEDIFMNEEKGIKIKKVRCFMPSVTNPLHIRTHRDESQKEYKRQFHVTLDGNYCMAIYEGVVKGKMKRTYEIVNMIDAAAYFKKSADMTNHYPIAPENKNGLKYRCTVRTGTQIILLQSDDEEINLKNKEDIARRFYYVAVMQKDGRIVLRYNQDARDATTLKKERKSGAYKVGEQYRSEIMLSLSDFHALVEGVDFIINVLGEIE

SEQ ID NO: 9948 - protein, 1469 aa, unidentified
  REGION 1..1469: note = Description of Unknown: Cas Enzyme sequence
MKNILGLDLGTNSIGWALIQTDDEGKTYQRDIKLGSRIIPMTQDVLGAFEGGAPIQTQTASRTQKRGMRRLYERRALRRERLLRVLHILGFLPDHYDHSIGWDPRQTKTFGKFINPDEEPKLAWMRDAQGKPSFLFKSSFEEMLADFKAKQPEMVANDKKIPYDWTLYYLRQKALLQPITKEELAWILLNFNQKRGYYQLRGKDEISQDEDKSKIVEYIEQVVTDVDFDPNEKESSKGRWYNVHLANGMIYRRQSQISLKDWIGKKREFIVTTELDDHGKPKLNKDGGIKRSFRAPEANDWTLRKVRTENNVEQSGMTIGAYIYQHLLTDPSGKIIGKFVETIDRHFYKDELTAILKKQSEFYPELKDQAMLDACSKALYGHNSARQFSLKQKDMAYLLIEDVLFYQRPLKSKKSLISNCPFESHTYVDKETGEVKKEYIKCIAKSNPYFQEYRIRHFMQNLKIYDTSGLEEKDVTEQYLPDAEAWKRLYNWLNERDSVNQDSFLKDFLAIKKPKGKDAKYLLRWNYVEDKDKKYPVGETHALLKSCLEKAGAATSLLNDFAVEYRLWHLLYSIDDVNELKGALRKFASCYRISDIDSFVEVFSKAKPFDKDYGSYSEKAIKKLLTLMRQGIRSEQACEQLYEKKPAEQWTSPSDIHAFITDFQQHSLRNPIVEQCILETLRTVADIWQQCGHIDEIHLELGREMKNPADKRQQISNRNRENENTNLRIRALLTELLNDSNIQDVRPNSPMQQDILRIYEEGALTELKPSDPEYKEIQEISRLAQPSVSQLTRYKLWLEQRYRSPYTGRVIPLARLFTPAYQIEHVIPRARYYDDSLNNKVICEAEVNKDKTNLLAHEYICQNGGKLITTTSGTVKVFNKEEYEQFVQDHYAILKTKKRNLLLDDIPEEFIQRQMNDSRYISRYVKALLSNIVRADENDDLETSKNVIVCTGSVTDRLKKDWGLVDVWNQLIYPRFERLNNLTGTNLFGQWVNKDGKRYFQTDMPLALRKGFSKKRIDHRHHAMDALVIACATRSIVNLLSNMNANKTEQREDLKRTLTGKGGLFNKPWPTFTQDAFQALSEVVISFKNKVRVLSRASNYYEHYDAEGRKRQVAQKGGKQFVVRKPLHKDHMYAHINLRRKKSVSIDAALQEVRNIVDTKLRNRIVDLFSQGLDKKKIKKQLAEEGVGKQIEIYFFTDDVEPLVAIRNKLDKSFDKKKILSITDTGIQKILLAYLASKGDNPGEAFSPEGIAELNEHIAEFNGGRRHQPILNVRVTEKMGEKFQVGETGSKSRKYAEAQSGTNLFFAIYESEGGKRTYATIPLNIAVERIKQGLGPVPEKDEIGCTLKFFLSPNDLVYVPTEDEMLHKNIEIESLDKERIYKFIDSSVTTANFVPHRSASLLYALPKDEAVSFCKTDKIVQNEYGIGSPQSKNQKSISNGKNTADIYIIKSVCWKLEVNRLGQITKIIR

SEQ ID NO: 9949 - protein, 1365 aa, unidentified
  REGION 1..1365: note = Description of Unknown: Cas Enzyme sequence
MGDKKYYLGLDMGTNSVGWAVTDEKYCLLKAKGKDLWGIREFDEASTAVDRRMHRVSRRRRQRQVVRIGLLKDYFSDQIEKVDPYFYQRLENSKYYLEDKDEQVKDKNALFNDPGFNDRDYFKNYPTIFHLRKELIENPAPHDVRLVFLALLNMFKHRGHFLNAGLDSEGDSLGNMSEIYREFAEITADDLDFPIETKGEKIEDILSSRDHSRSVKSEMLIELFGFDKKDKKRREFVRAICGLKTDTTKLFGDDQGFSSEEKTEFSFSDAAYDEKVPDIVSIIGEDRYYILELMKAIYDKGTLSEILKGSDYLSQARVASYNKHSDDLLRMKKVVRKYGSPEEYDFFFRSTEDGSYSSYVGTVNSGKKKRRSMKGDFISETNKYMTKLKKDHEDDQEIDTILNDIALENFMPKQLTSSNGIIPYQVHLKEMKKILGNAEGYLPFLIEKDESGLSVSERIIQLFSFQIPYYVGPITSKSQSDGGNGWVVRKDEGTVLPWNIHDKIDMEKTQEEFIKKLIRKCTYISGETVLPKCSLLYEKFSVLNEINNLRIDNERIDPELKQDIYNDLFLAGKAVTKKQLMKYLMNRGLITQADQVSGADITSESNARFNSALSSYGKFISIFGSDKMKEDQYQEMAEHIIYLVTIFGDSKSVLRDYLKREYGTVLNEEQIKKITGMKFRDWGRLSKAFLELHGCNKADGESKSIVRAMWDNNLNLMELINSDEYTYKDELFEKTNVQTKCLAEFKAEDLDEYYFSAPVKRMIWQTVLLIKEIEYIMGGAPDRVFIEMTRKPEDKPTRKDSRKKKFMDLYSNIKEEQKYWKDLIETSDSNGTIRSKKMFLYLTQMGRDMYTGKQIELDRLFDDNLYDIDHIYPRHFVKDDNLQNNLVLVDKRKNARKSDNYPLEKEISSNPEVVALWKTLHEKKLITDEKYRRLTGRTPFTDEQKAGFIARQLVETGQGTKGVADILKMLLPKDTTIVYAKASNASEFRHKFDLPKSRLVNDFHHANDAYLNIVVGNVYYTKFTQNPLNYIKNEYRKNSQNAEYNLDKMFDRDVIRGDQIAWKASKKDGEAGTITTVKKMMQKNTPLLTRYSFVAHGGITRKDTIWGKEVAKTEGYIPLKASDKKLKDVTKYGGFNNVSGAYFFLVEYEKKRKKERSLEVVPIYLVDRFENNVSELEKYCREELGLANASVRMSKIRIQSLISIDGYRLHISGKSENRILLRNACSMCLNTDWIKYIQKIEKYVETEVLDEEILNKQKNERLYNILKEKHLYQIYSYRPNSIGEKLEKAEVIFCGLDVKKQCSALYQLLQLTSIGPAIGDLTLLKESKNSGTMRMSKNISGNKDLYLINQSVTGVYENKIDLLTV

SEQ ID NO: 9950 - protein, 1394 aa, unidentified
  REGION 1..1394: note = Description of Unknown: Cas Enzyme sequence
MKRILGLDLGTSSIGWAVVDQSENEKEQSQIIKMGVRVVPIVSNEKDDFEKGKSITTTAVRNLKHGMRINLQRYKLRRHHLIQILKRNGIIHDETLLYENGNHSTFETYRYRAKAATDEITLEQLARVLLMINKKRGYKSNRKADKQEDGQLIDGMAIARKLYDEHLTPGQYVYESLKQGSRYIPTFYQSDLRAEFDAIWQYQTRYYPDILDDELREKIKGRGKNDTSKIFYASKNIAIAENKDRKTRLLVAYRRRSEAVNHQLPISEVAAALCDINGNISNSSGYLGRISDHSKELYFQKLTVGQYLMRQLDKDPHYRIKNRVFYRQDYLNEFNTIWETQSRFHPELTAALKEEVRDTIIFYQRKLKSKKGLISHCELEGKQITVNVNGKAKNVMTGPRVCPKSSPLFQEFKIWQELNNVLIENKKVKTSKKTLPSLFPGPEKYVPLTSEQRQLLHNELMVNKELSKSAILKLLGLNDKDYSINYKALHGNTTQVQLLSAYRQILEWSGHDVDQFDRLDYKTKMAFITSVFDALGAKVDFLTFDPSQLDNYLEQPAYKLWHLLYSYEGDSSETGDAKLKEHLKELTGLNDEYVAAIASVQFEQEYGSLSAKAIKNIMPHLLEGKIFSEACEAAGYRHSSQSLNREELDTRPLAANLEVLPKNSLRNPIVEKIMNQMIHVVNAAMQEYGIERDGVKRFDEIHVEMARTLKQTKDQREKTADALNKRTRENEEIIKTLQQEFGIGHPSRNDIIRYRLYMELKDNGFKTLYSNTYIPKEELFSNKFEIEHIIPQARIFDDSQSNKTLETHQVNLDKGKRTAMDYVLDTYGEIGAEQYRQRIAYLYDSKNRCGTNKKHKNLTTTESEIPKDFLNRDLADTQYIARKAREILMQVTRTVVPTIGSITARLREDWQLVDVMKELNLPKFEQLGLVETHTTRDGRQVKRIKDWSKRNDHRHHAMDALTVAFTRLEHIQYLNNVNAHSDENQLHPNAVALRTNLIKDSRFIPPMPLGQLRSSALEQMRGILVSIKAKNKVATRQVNRVKGSDVRQVALTPRTQLHNETIYGLRKRYKTVIEKVGSKFDAQHISLVARQDYREALMRRLDECGGNAKMAFTGKNALSKAPLYTDEQQTRKVPENVKLAWLETYFTIRKPIDKSLKIGQVVDKKVREILQQRLLEYGNDPSKAFSNLEESPIWLNPEKGISIKRVTIQSHLSEPISLHSKLNRDGSLLRDEDGKTLPNDYVNTSNNHHIAIYEDTEGNWHENIISYFEAIARANDQMSIVDKQYNQSEGWKFMFTMKQNEYFVLPDPEHGFLPNEIDLMDEKNYAVIAPHLFRVQRLSSKDYYFRQQFETSVTAGDSLPQGVAYTRIRNENKLKGIVKVRINHIGKIVHVGEY

SEQ ID NO: 9951 - protein, 1447 aa, unidentified
  REGION 1..1447: note = Description of Unknown: Cas Enzyme sequence
MKRILGLDLGTNSIGWAVVDGNNNAIIKAGSRIIPMDARAMSEYETGNLQSAAAARTGFRGTRRLYERAILRRERLLRVLNVLGFLPEHFKQQIDFDKHPGRFIDHCEPLLPYKKTEENKNEFIFMDSFNEMITEFAQKHPQLTENGKRIPYDWTIFYLRKKALYQPIKKEELAWLILNFNTKRGYYQLRGMEDETKTTDGEEYKILQVTSVEKTNEDKKRKGIFWYEITYENGAKQRKSGPVAPRKVGDMVEVIVTTSYDKDGKIKTDKDGNPKISISTPPADEWKLLKKRSEKAIKESGKTVGEYIYEELLANPEIKIKGKLIRVIDRPFYKDEFERILNRQTEFIPELQDRILYEKCVRELYHQNEAHVQSIMDKSFTKLFVDDIIFYQRPLKSKKSEIANCPFEHYHYIDKETGEIVNKPIKCIPKSHPLFQEFRLRQFLQNLKIFKREKVVNGMLKTDVDVTSDYLSTQEDYNALFDWLYEKEEINEKQLLRNPLFNIGKNASEYRWNYVEDKSYPCNETHYTINKQLADIGYKQLTLEQEIALWHILYSIDDIIVLRKALTSFAKKNSIDTEPFVKAFEHIEPFDNNYGAYSEKAIKKLLPYMRKGIRLHDACYEVYGRFSEAANTDRWTKPEDIDRYLEYEFKQHSLRNPVVESVLGETMRVVRDIWKTYGEIAEVHVEMGRDLKKSNQERKDSTDRIRKNEQTNLRIRLLLQEFLNPEYKIEGVHPNSPSQQEIFKIYEENALANMGNDDDSEDIQMIADNLGNPTKHVSQSEIMRYRLWLEQKYKSPYTGQPIPLSKLFTSAYEIEHVIPQSRYFDDSLSNKVICESEVNKLKDRMLGYEFITKHGGEIIQGNLGTQIKLLDKVQYEDFVKQHYSGNKGKMKKLLMEDIPDSFIERQLNDSRYIARKTIAILSRLVREENEAEATSKNVIVTTGKITDRLKKEWGVNSVWNDIIAPRFQRLNSLTGTNNYGKFVSRNGKQYFQIDVPLEISRGFSKKRIDHRHHAMDAIVIACTTRNHVNYLNNKAALSSEKDLRYDLQHKLCTKVKTDDRGNYIWQFNKPWETFVQDVRSELSSIIVSFKQNLRVINKMTNFYWHYENGKKVLARQTKGDGWAIRKSLHKAGLSGAVRLQTKKTVKLVDALDCINMIVDKEIRKEIKAVVSNYGKLYEKKTILKYFKDRKYKVGKKEISRIEIYYTPDVADLSAKRVMLDTSFDEKTIKSITDTGIQKILLQHLANNGNDPKIAFTPEGIAYMNAHIKELNNGKDHKPILKVRKTESFGLKFPVGDTGNKTKKFVEADKGTNLFFAIYEDEEGNRSYESIPFNVAVERLKIGEQVAPTINEDGNKLLFVLSPGDLVYVPDEGEHVDEIRNIDNIWKFVSCSTNRSFYIPVSIANTISNGKEYGSLNKVELTDNKISIKGSCLKLQVNRLGIITKIFA

SEQ ID NO: 9952 - protein, 1596 aa, unidentified
  REGION 1..1596: note = Description of Unknown: Cas Enzyme sequence
MFSQRNNPYCDLQKNSTAKLNNIFTTAKQLKLFNIMKKILGLDLGTNSIGWAVMNAEVVTRDNDTTYLKPVQISSAGSRIIPMSEDILGNFDRGNSISQTAERTGHRMMRRIHERYLLRRERMLRILKIMGFLPKHFSEKINNYGKFAAETEPKMPWCDDEKGKKNFLFIDSFNEMLADFAEYQPQLIENGKKIPYDWTIYYLRKKALTQKITKEELAWVLLQFNQKRGYYQLRGEEEEENADENTEIISGVVLSVEKGDKDKKTDKYWYKIHLDNGKEYEATFYNEPSDWLGMTKDFIQKTTIRKDGSSSYKLSFLPSMEEIESMPEKQRNAMYAKIKLRTEKKIDESNETLGCFIYDAILHKPSQKIIGQFVRTVERRYYKDELKKILEVQQQFIPELRDEALYERCVEELYPNNEAHRNSIAKPDFINLFVNDILFYQRPLKTKKSLIDDCPYEVRWDKNGGPHPVKCIAKSNPYFQEFRLWQFVSNLRIYQREKIVSDGQLNLFDGAPAGKLQTDVDVTQEFLKSDEDKVNLYEWLNDREKIKQDTLLNSYFKIKKAKGQTQYPYRWNYVEDKEYPCNETRAAILSGLEKSENSSDFLTYGVEIKLWHILYSVEDKEELVKALRNFAKDNGLNDRFAEVFCKLKPFKKEYGAYSEKAIKKLLPLMRMGKYWKEDNIDANTLQRIDKIITGEYDEQIKSRVREKSINLTDVSHYKGLPVWLACYIVYDRHSEAKEIEKWKTPDDIERYLMGFKQHSLRNPIVEQVITETLRTVRDIWKQEGQIDEIHVELGREMKNPADIRRDITQKVLKNENTNQRIKAMLKEFMNPELNIENVRPYSPSQQDILRIYEENALLNLSKEDKDFEFVSKVSKMAVPSKSDIIRYKCWLEQKYRSPYTGNMIPLAKLFTPAYEIEHIIPQSRYFDDSFSNKVICESEVNKLKDRLLGHEFIVKHHGEKLSESVKIFSVEEYEDFVKTHYAKSPKMEKLLLDDIPDKFIERQMNDTRYISKVVKGLLSNVVREQNADGEYEQEAVSKNLISCNGGITTRLKTDWGMNDVWNHIVLPRFERMNALTQTKDYTTTNREGHIIPNTENLQGINKKRIDHRHHAMDAIVIACATRDHVNLLNNEAAHSKHNENRYQLQRKLRRYEKVMIDGKEREIAKEFLMPWEGFVVDAQRVLENIIVSFKQNLRVINKTTNYYQHYNRNGKKETTEQKNGDSWAIRKSMHKETVFGEINLRRKKTVSLNEALKQPERIVNKDFKKKVIELLKDGKDAKYIKKYLAENSDVWSDVNPAKIEVYYFTKDEKKRNGEPKERYFAVRKSLDTSFNRKKIEEQIADTGIQKILLAHLQLNGDDPQKAFSPEGIEEMNRNIVSLNNGKFHQPILKVRQYEKADKFAVGQTGNKAKKFVEAAKGTNLFFAILGKREENVEIGDGRIVRSYFSIPLNVVIDCQKLYGKDWRDNLEKYLKEKCLIDSDVELLFTLSPNDLVYLPKEGESYDDVSTIDKNRIYKFVNPDGQTANFIHFAIAKPVFSMNFVDQKKNGINIPIQNEIGIGSRGSKNPRAFTGEMIKETCIPIKVDRLGNIIEFNGMRL

SEQ ID NO: 9953 - protein, 1369 aa, unidentified
  REGION 1..1369: note = Description of Unknown: Cas Enzyme sequence
VANEKNFLGLDIGSNSVGWAVTDENYRIKKFKGNLMWGVHLFDEAQQSADRRMFRTARRRLDRRQQRILLLQELFAAEILKKDEKFFLRLKESALLPEDSENRKHNIFFDDENYGDNEYFNEYPTIHHLIAELMSSDFSHDIRLVYYACAYILAHRGHFLFNVEKDNIDKITDFKPLYKKFYSDLTELCETPAFDENAEIMEEVLKKHISVTSKDKELKQILFGRKVPKDIDTIKYELLTKLICGGTVKMSELFRKEEYSELEKNSICVKSADFSDTLESLEGQLDELHFALIASAKAMYDWSLLVEILHGETMISKSKVEVYDKHKADLKELKYFIKTYLNKADYDAVFREISDKANYVSYVYNASSDDERNKYKRCSQEDFCKFLKPYLAKITPTDDDKERFEELKKKCEDNELCPKQVTTDNRVIPYQLYYAELKKILENACKYLPFLNEKDEYGTVADKILKIMEFRIPYYAGPLVSEEKSVNAWLKRKADGRIYPWNFSELVDEDESENVFIRRMTCKCTYLAGEDVLPKYSLLYSKFMVLNEINNIKVNGEPISVEAKKRLYHDKFVESKARVTKKRIKEFLVSIGEYSGEVEVTGVDDTIKSSLRSYHDFKKLIEDGKLKELDVEKIIERITVTTDTKRLKNWLKQEYPQLSANDVKYISKLKYKDYGRLSRSFLEKIIPIDADTGEVLGDNNIITALWETNSNLMQLLSMGKGYSKAIEKFNNDYFDQHPEEKSISRRLKNMYVSPAVRRSIIRTLDIVKELKTILKKAPDKIFIEMARGEGDTPKGSRTKSRRDQITEYLDNSDAENIDELRERIEKTDDGRLRSEKIFLYFMQLGKCAYTGKNISFDELDDNTKWNIDHIWPQAKIKDDSIDNKVLVDSNANGAKGDKYPISSDIRSKMSGFWHALYKKNMMSEKKYQRLMRSTPFTEEELSGFIARQLVETRQSTKAVAAILKEILPESEIVYVKAGIVSEFRQEMDMLKCREINDLHHAKDAYLNIVMGNVYNTKFTKDPLNFIKSGEHYSMKLFKKDQSGKESGLLTGVVKRGDNIAWDPETSFDIVRHMMSKNSIRYVRYTYKRKGGLFNQMPERKKPGLVPRKKGLDTEKYGGYNNTIAACFSLIKYKNDVIIIPVENMYLKLYETNKEFRINYSAIQMKGILSSDINIKDISFPFENRIIKINTLIEVDGFRCNIVQKSNKGRTIVVSSAESLIVCKEMNDYIKKVSSYLEKSEKGKKFAPAAYSRLNADDNVKLFDLLCDKISKKPFSSILQKIGNKIQNKREDFLKLELKEQILFLSNMILLFKTGRSTGCDLKLIGESGQAGVITLNSTLTKISGRQSIRIIDQSPTGLLEKKSVNLLEL

SEQ ID NO: 9954 - protein, 1354 aa, unidentified
  REGION 1..1354: note = Description of Unknown: Cas Enzyme sequence
MENKKYYLGLDVGSNSVGWATSDENFNILRLKGKTAWGARLFEEASDAKSRRGFRTNKRRLNRRKYRIYLLNQLFAPIITKFDKDFFARMSESNLYLEDSKINNKHYLGDLKSEKEFYKNFPTIYHLRKALCDESSVAYSDPRYVYLAIHHIIKYRGNFLRNDNFDISKFNLEIFNHINDLFKNIISEESEVPVEDVDFEYIKEPLKILDILNNISLNKKDKQRELKAVLNHPIFEKAKRYDELFSVLITGGSYSISKIFDDEKESIVFDSSYDEKEPTYQSIFGEKFLLIELCKNIFDYVSLKELLGDSKSISEAFVNVYESHKEQLKALKELCHKIDEKFNLKRENSTYWLIFKNRSKDINNYANFVGVDTEGTRTGDINSFNKYVLNILSKYEEYLCENKNYLVLKSYAEKDSLLEIIANQSTSLIPHQLHENELIQIVNNCKKIYPEIFNLKEKLIELFEFRIPYFVGPLDTRSTKYSHIVKKDEYLNTRITPWNIDEIVDFDKSKEAFMNSLTNNCRYLIGEPVLPAKSLIYERYNILNKLNVLSINGIRIRKEVRNELLNNLILVNKSVTLNQITRYLKKRYNHYNNMELSVSGINSTDKITADIYVSFKNIFGHELSSEELKLSDEIIRVLTIFTDSFDDGIKYIKKNCCDLNDEQIKILKGIQFKGWAPFSYKLLCGIKIVDDNGVVHSILGEMDANVKNFQEVLNDNLYNFASEIDKYNESLSGNKTREEMVNELIDSVPPKMRRSTIQALKIIKDVVSIKGYAPQYFSIEVTRSDDEKRKGKETTSRVKEIDALIKSFKKEKEALFKEQSEKLNREYQNLLESNKLDKLNGKALYLYFKQCGIDLYTGQPINIEDVFDSTKYDIDHIVPKRLKKDDSLDNKVLVSREYNQKIKSGIYPVPERIRCNPEINKIWVMLHKKKYLTDKKYNALVRSSELTDDEIADFVNAQLNVVNQSNITLRNALKILYPESTLIFSKAQYPTFIREELNIPKLRDLNDTHHAVDAYLNIFTGVTLHKKYSSRFWYDQKYCSDKNNKTLSMETTLEESLKKDDLAKRIKLNCSKHDQLLTYRVEYAEDRFYKATINKHSDNKLNPIHENGALSDTTKYGGYNELINAYHLVVTIKGPKKTTKKFIGIPHIIAIKNNRDDIEKYIINNLSLKPNETYEFNDKFKIYAGQKIRFDGSYYLLYSKGEKVMNLKLFSPIFLNDTDVEYLKFYENHLEKIKNIDTKEIEFKTDKNEKNTFKLSSDLNIKLVNRIKEISKAKRLDSYGRVSFVRDYDISNFNNLSLYDQFFEIRKLYGCLTRRSRELSDGQIFTPTKSFITNSNIYIIFESASGLFSKEIKI

SEQ ID NO: 9955 - protein, 1177 aa, unidentified
  REGION 1..1177: note = Description of Unknown: Cas Enzyme sequence
MEYRLGIDLGSSSLGWCCLKLQDGKVVGILDMGVRIFPDGRNDKTKDPLCVARREARGSRVRLNRFKQRQKQLIIDLQESGLLPQSMEEFKALENLNPYELRANAVRKQVSLYELGRALFHLNQRRGFLSNRKEERDKKGNTKTQQAMDNLQMLISEKACATLGEYMYEVEEHRRFKNSTDANGKLKINWYPNRQMYKDEFTVIWDKQKEFYPNILTDKLKNKIENDIFFQRPLKKQQTGFCWLEPEQKRSPRSYNIAQQFRIMSEIANIRIGYPHDRELNKPEREALFEFLNNAPADSFDKDHYVSWEQILEVLHLGKDVVLNLMRQNKTGLLCNITNALLGNDKVFGDKWYSFSDDLQNQIIDILQDYSLQDGEAETKLKELNLGFSQSQLDNALEYSLFLPDGYTNLSAKAMRKLLEDMKLCGSDYATAVENVYHQTAADVGFFEKRDELPPYQELFTESLIGGDKELYDKELDYDNYMGRITNVSVHIALNQLRAVVNELIKKYGKPSGITIELGRELTKGKKALAEIDKKQKESAKIMEEARAEIRKAGATVTSFNIEKYKVWHNLNEDITKRIDLYTGKNISVSQLFSNEYEIEHILPYSWTYDDSYNNKIITRANINRQKSNQLPYVFFSDERQLKAVAKDDEELKEMSIDNVIRRAKEIDKSRKNIKKTFNFNALTWRFSKNARDIFNRNNKNMARDLTDMQYMSKLAKKYLTCICPPNKIVSAKGQMTDLLKAIWELSDVSPEDYRLWTPQEWQKRDITEWKKKQFILTNPEWNADEAEKEAKKFVQGLTDEEIHNMTHVGKNRTVHYHHALDAFVLANITTKVMQEMSTEAFANAVEEYAEAHNVTIREAQKSLLTQSSDISYKPYSTFDKKDLADKLRDIVVSYKNPIDKLKSIINKAEITGQNLAHFSFAPICEDTAFGLKKIIKISKNDIDIEFSVRKDGKKKAETHKLSTMVPVFRTKEQKQAFLDLYVQWQRAVMRQKFIGKGKYEEIEKAFIETFTRDKAFKWFASAGNYGAQIYQIQKNDKFAPNKNEDWSLEILPNYYAFERKGKFFWKDIYPTAKLITTLKINDVIEATFERNDNLESGFSKIRNWVKEQFENHPDKKQLRLLFRVKKMSGGSIFLRPLHIAQEDNGDVKSWQCTIGKFKQYQCRKVCITPTGKVLRG

SEQ ID NO: 9956 - protein, 1425 aa, unidentified
  REGION 1..1425: note = Description of Unknown: Cas Enzyme sequence
LHFILCNMKKILGLDLGTNSIGWAVVNEAEKANEKSSIVKIGVRVTPLTVDELSNFEKGKSITTNADRTLKRSMRRNLQRYKLRRENLIELLKEQGFIDDNTLLSENGNRTTFETCRLRAKAATDEISLRELARVLLMINKKRGYKSSRKAKSTEEGKLIDGMEIAKRLYEENLTPGQLSLRLLKEGKRHLPDFYRSDLQAEFDKIWEQQKYYYPDLLTDQLKDNLTGKNKTQTWAIFAKPAQLVGIKRTTKGLEQKIESYQWREDALTHKLGLEELAIVLQEVNSQISNASGYLGDISDRSKALYFNKMTVGQYQMAQLDKNPNYSLKNQVFYRQDYLNEFEAIWETQAKYHKELTPELKKEIRDIVIFYQRPLKSQKSLISFCEFESRQVEVVVDGKKKTKTIGLRVCPKSSPLFQEFKIWQKLNDVQVMFQNDKRSLDQEEKEKLFAELNYKEKLSKAEVLKLLFGNQKGLDMNFKELDGNRTQTELFKAYQTIIETSGHGDYDFSKMPAEKALELVSEVFGGLGFNTDILRFDSSLEGHAIEQQPMYKLWHLLYSYESDKSELGTDSLITKLHDWFGFNKESATILSNVVFQDDYSSLCSKAIRKILPHLKDGLDYSVACEYAGYRHSKNSLTKEEIENKELKDRLELLPRNCLRNPVVEKILNQMVNVVNAIIEEYGKPDEIRIELARELKKSAKEREEMTKSINETTRLHEEYVRLLQAEPFNLSHVSRNDIIRYKLYEELKVNGYKTLYSNTYIPKEKVFSKEFDIEHIIPQAKLFDDSFSNKTLEVRQVNLDKGNSTALDFVSDKYGENGVEEYKNRVESMFDKKAISKTKRDKLLMKEADIPSGFINRDLRDSQYIAKKAREILEEIVRFVVPTTGSITDRLREDWQLVDVMQELNWDKYNQLGLTEVIEGRDGQRIRRIKDWTKRNDHRHHAMDALTIAFTKRSYIQYLNNLNARVQKGVEDYIDLDMVELSLLDKDQRSAAIYGIEKKELHRDSHGKLRFNPPMPLDEFRAEAKRQLENTLVSIKAKNKVVTQNINTSKKKAGKNKKVQLTPRGQLHLETVYGSSKRYVTKEEKVNASFDTEKIMTVANKRYREALLLRLQQFAGDPKKAFTGKNTLEKNPVWLDEMHTQKVPEKVKLVGFESVYTIRKEVSPDLKLDKVVDVHIRQILQARLDEFGGDAKKAFTNLDDNPIWLNKEKDIAIKRVTITGISNAESLHDKRDKDGRLILDEKGKTQPVDFVNTGNNHHVAIYRKPKVDKNGQPIPDENGEIQYELDENIVSFYEATSRAILGLPIVDKDYRKDEGWQFLFTMKQNEYFVFPRYDEQGNMVFNPLDHDEAWYKNPENYDVISPNLFRVQKMATKDYYFRHHLETIVDENNLLRDITWKRLRNVNALETIVKVRVNHIGKIVSIGEY

SEQ ID NO: 9957 - protein, 1340 aa, unidentified
  REGION 1..1340: note = Description of Unknown: Cas Enzyme sequence
MKKVLGLDLGTTSIGWALVNQAESSEEESSIIRAGVRVNPLTTDEKDSFEKGKAVTTNADRRLKRGMRRNLQRYKLRRENLIQILKREGWVDSDTILNEVGNNSTFETYRLRAEAVSTPVTLEQFSRILLMLNKKRGYKSNRKVKGDESGALISGMEVAKVLYDNGVTPGQYCLDILRNGGKHLPDFYRSDLREELKRIWDFQKEFHSDILTEDSWNAIEGRSRAGASKYFRDTFGLLSSDNKGKDRKLQSYIWRSDALSKRLEKDVLVYVICDLCGAIESSSGLLGAISDRSKELFFNHQTVGQYLWNIIVTEPGVSLKNRTFYRQDYLDEFNTLWDKQAESRPELTGDLKKEIRDVVIFYQRRLKSQKGMISHCEFEKNHRVSPKSSPMFQEFKVWQMLNNVVITDKETGEERLLALDEMQTLAKELRYKDKMAVTVALKILFKKKANSYSMNYKVLEGNATIAALASKLMDIVNNLTDSENDCAKLLSEDIDHIILQAFSAEGFRTDILDFDTSLEKAVFENQVSFRLWHLIYSYEGDGSKTGDEGLVRKISEICGMPEWCGKILSTTIFPSDYGSLSNKAIRKIMPYLLEGNKYDKACYYAGYNHSHSLTKEENDARPLAERLENLPKNSLRNPVVEKILNQMVNVVNTLADEYGKPDEIHLEMARELKCNQKKRTEQYERQLEAQRDNERVEEILKKDFSFSYVRKSDIVRYKLYEELTSRGFKTLYSNQYIPRENLFSKEIDIEHIIPQSVLFDDSFSNKTLEYRSVNLEKSDMTAFDYVKGKYGEDGLLRYKADVEDLVKNGKISRTKGRNLLMTSSEIPEDFLNRELTDSQYIAKKAREVLESYVRVVVPTTGRITAKLREDWQLVDVMKEIDMPKYEKAGLTFTVVNQEGKSVRRIKDWTKRGDHRHHAMDALTIAFTKHSHIQYLNNLNARSDKSSSVYGIFRTETMKCGDRRIFIPPMPLDELRASFKKELESVLVSIKAKNKVVTKNANVSKKKDGVNIKGTLTPRGPLHKETIYGKKHVYETYEITVGGRIGREDLLNVANQEERDALLSRLEQYGGDPKKAFTGKNAPDKNPVFLDSFHTRQVGKKVKCVRFKDVYTVRKDIDASLNIDKVIDVGIRKVLKARLDKFDGNASKAFSNLDENPIWLNEAKGIAIKRVTIFENFDLVPIHGDKDYVNLRNNHHIAIYEDSEGNYVEKVVSFFEALDRVTHGFKAVDKDWKKDDGYRFVFSMKINEMFVFPNQATGFLPDDVDLTDRENYSIISPNLFRVQKLSSGYYCFRHHLETELDDTYALKDVTWKRITSINGLKGVVKVRINHIGEIVSVGEYD

SEQ ID NO: 9958 - protein, 1092 aa, unidentified
  REGION 1..1092: note = Description of Unknown: Cas Enzyme sequence
MKMTQKQANNVFQREAVITKWQGAPFYTKDVVLGIDIGIEGIGIAVRRGPELLYCKTLMMKLPEQAPLEARRVLRSSRRARKSRRVRMNRLKRLFQKHGLPWVDDEIMRRSDPFLLRDRAVNKNGLASKEALSICIRHLVAHRGYDFYALAEDEAPWGECSDFKGAKKWLSSTFVSEDFQKKLLQDAENFFAEKDLEVWGALVQERLDWSRQNSMEKNLREYASNKANWRRGRGISYPRPQIEAHLRQIIERHKHLIKSHKKFTDVLFKKCDDDNKDICIFHYNRKTKEECEKVYERKIRTCPFAKYWDGAAQKCASRGDHAVRKWNLLDFLSNRRFRFAEGSIQIMRTMPEDCVKLLIDSLEKSFDQKLTWSDHKQKLVESLKQHGLKIANPPKELSGKAKKSDAWKQLQDLLAPGKPLTSRAKLSSESAQKLFDTTTRNGTSFDPAQISARKKETDYYEILSHTSMDYGVYPQVQKLLGTLRKPKAGEAPSFGTKGFLQRLFETELKDQLKRKTIPDRCIIECIKDPPRNKKEQDARASLNVENREFIENLLKDYGYEGYHSRSLNTRLKLYRQQGGEAKDGKVTREAVCPFTGMPLGTNPLSSDLDLAHLFPDGRGGLAIEDNLVLTKRSVNQDMGQRTPREVAGTRMGKTSFLSWNEMLTRSKSFKWNDKKRELFAFEPAKGQPVPDFENLTRTAQLARQLRRMICFWMGIQEDSKETRERIGNPSGLHTAAARRGWKITKDRSDLTHHRMDAAVLSFIPPGAGLNSVMYGGIFEEIYSTKEINGNKFKVVQMRVAPELKPDLSALEKDSLIECPVINIRSKSKCKPLGDSTFWSVDEKGETWQRTTLIPLDKDALKDFTPEKIREKLLTEGIKESDIPSDRKLEAWLQNPKHSLHLNDGQPVRFVHKKGSKGDFKNPVGWSGIWHPNGKIDQLRKLDLVNDRLELWVGYDPKKGWQYYKRVISSKDSMRGLKRLGIPWRGQKGLPEYTAQLLGKKCKDLKEYYCGTLPKYSHKVGEFKKGDTFLLDKWFEVSAITTDKRIELKPIITDGKKTLEGNTVNLAQLLKLPASPEECARKNGWKAPSNKKG

SEQ ID NO: 9959 - protein, 1434 aa, unidentified
  REGION 1..1434: note = Description of Unknown: Cas Enzyme sequence
MNKTIGLDLGTNSIGISVRDTDKGSEIIDQLEYFSSVIFKSGVGNGKSGEFSYAAERTKKRSTRRLYMARKYRIWATLKLLIENDYCPLKIEDLEKWSKYDKAKGLKRIYPIEAEKFKQWVCLDFDGDGIADYSSPFQLRAELMGRQFDFTQEVERYKLGRALYHIAQRRGFKSSKGETIKEQEKDESTNIGNADFDVVDALKKSEEKKSGRLVEFMKKSDISTIGCAFYELEKSGIRVRNSEYQAVRSQYKDEIRQIFEFQKGLSVESGFYKRIVSEKKGEGTIFYKRPLRSQKGLVGKCTMEPDKSRCPISHPEFEKFRAWCLINNIRFGEGLIDTLSLEQKNRLYNDRFLLTRANFKFEDIRKWIEKEIGKHLDFKDKTINYKDNTNVSGCPVSGRLKNLLGDDWETWSYESSETRTNRKTGEVKRVAYNAYDLWHICFSFDEPDFVEEFAQKKLGSDKEQTKQLVRIYGAIQQGYGMLSLKAIKYINRFLEKGLIYSDAVLLAKLPEIFGEKWASVEEGIIDHLDSLIKENRQQKLVYGIVNSLIANYKTLEIEEQFANKNTDYKLDESDCNDVRKATIDGIGEKTWEKKEEKEKEEILSKVTELYQSFFASSKRDYYKLPKVSESLSDYLRNKYPYLNEKDLRKIYHPSMIEFYAPSKLERVEDGRYLRLLGSPVIGALKNPMAMRVLHTLRKQVNALLKVIDEDGNALIDEDTRVVVETARELNDANMRWAIEAYQREREKENKEYKEILKEYYPNREIKDNDVDEIRLICDQHEITEKGTEQEKGKKHKEANKEVYYKKDVTKYRLWLEQGCRCIYTGKMINITNLFDDNAFDIEHTIPRSISFDDSLANLTVCDTFFNRTVKKNQIPAQLSNYDEIMRRIQPWIEKVEQLKDNVEYWKAQSKRALDKDRKDQCIRQRHLWQMELDYWQNKVNRFTMTEVTSGFRNSQLVDTRIITKYAYHYLKTVFNKVEVQKGSVTANFRKMLGIQSMDEKKSRDKHSHHAVDATVLTLVPTAAKRDKILELFYKIQEKEKLNEETAYLEKELKKEISSCGLGGNISEIVPFIENNILINHVSKDQTLVPSHRRKRIRGKVVYKTDEKGQVIYDENGRMEPKEWITGDSIRGQLHGETFYGAITQGEKDERGKIRRDEKGNVVVGDKVYYVVRRELRYKASSVDSGFKDWTELENAVVDKDLFAIMKGQFPEGTSFKEACSSGIFMYKNNKDGVIDFAEDCKVNRIRHIRCFTSVKNPLKVKKQTYFSKKPYKQYFYAEMGDLYVMCKYENAERSEKEYRIWSLFDISNNRKTGIEDIPVVLLSKKNTTLQLTQQIKTGDMLLLYKETPLELMDLDREFLSQRLYVVKGFENPSLIKLVRHINAQPDKDLGKGESIKDYSRMPEKIRCGINTLKYLVKDVDFCLTSEGVVFKKSI

SEQ ID NO: 9960 - protein, 1341 aa, unidentified
  REGION 1..1341: note = Description of Unknown: Cas Enzyme sequence
MSKILVFDPGTNSLGMVCRDTMNDNLMDQITAGVDIIRDNTESDRRGRHSSAASQRRSFRTARTRYRSVKRRKQATLKLLIKYKCCPLDVESLNKWRFDDDDKGYDRTFPVHNEAFMRWINFKFVIDGEVVESVYRLREILATKPLDYTKPESWLMLGRAIYSIAVRRGFKSSRLANVSDIEDDEQPELQASEQELSKGLNQYMQEHNCPTVGAAFSRMERVDKIRIRANNDYKPIRKQLKEEIEVVFKVQQLDTDSELYNGLMSEKKHEGTIFYKNPLKSQKGKVEYCTLEPRKRKCAKSHPANEFNVAWQLLNNIKIKNENGWENIPLDVRKAIYDKLFLRNKKHFDFVEIRDLLQDEYHIQLEYKESINYSDKKSVPGCPVTYYLQKILGPSWKTEKIQGNKKHLTHAQRRKNLSADADGHLTEYNYQDIWHICYESDEKQFVKDFAKDVLGLTPAKVISMGALWEAIQDGYANLSLCALKKINPFLSKGYKYSDAVMLANLPSIMGGVFFKQNEQDIVNLIDEEKAVISNTNRFYDIANKLISDYKALKMEGYAFAEHADHDHILQEDDIADVKKACEENYGKVWNTMTDDLQSSVITRVADLYQEFFFSKERDYYKRINLADTLKTALAEKYPFLTKNKLKKLYHHSDNAYYPSAKVNEDGILQLGSPARGNLRNPTVLKVLYKIKQNVNKLLESGDIDSDTIVVVENAREALNDFNMRWAIEEYNSKRERENKAIEDALKDLAKEYHLTLPKESVTMARLALYQNENFTPYNPNESRRLYDKLFEKYKLWLKQGFFDFYTGRPISLSQLFSPDNLVEVDHILPISKSFDDSISNKVLSSSRYNSTIKGTKLPCELPNYSVDTAEGTAIIHRIDEIKEKVKYLEEKVFYWKGRSSRAADPDSKNSAIKQMHLWQMEYDEWNQRLTNLTAKEITPSFRNNQLNDTRTISKYAYHYLKSVFGRVVVQRGETTAVFRKMFGFQEAYEKKDRSRHTHHAIDALTLSLIPYGPKREKMMELWYQIQEAHRFKDYVLERQLKDRLEREKVLCGLGRYSPDEVVRYIEETTLVKNDATNHALTKNIKRYRVRGKVVPLRDEKGNIVYEKTAKGIKRVKAKYVSQGNSIRGAIHDQSFYGKIEKWKDDSSHEKEELFVIRRKIEFKAGSVGSGFKSWDDLEKQMVDKKLFKKFKAQYPEGTSFKDACAEGFYTYVVENGVRRKVKVRHVCCLAITAQPLKKHIFQSQHGGKEQFYYVSPGEAYGVFEYVGKDGERLYESDNLFTLSEKMKNGTLTETPCPKRITDKKGKEYVHTRTILKDATILIYPSSESAENQFKLDAETIS

SEQ ID NO: 9961 - protein, 920 aa, unidentified
  REGION 1..920: note = Description of Unknown: Cas Enzyme sequence
MTRGKIEKSELGIHLDVGHDSIGWCVTRTFPGNERFLAIPGTGVVLFPADDCLANSRRAFRRQRRHIRATRQRIARMKLMILALGVMTEAELSKNLTAAPWKLAAEALSCGKLLSWPELWSVLRWYAHNRGYDGNILASAKNRQEGDADDIKKNVASHDMMARFGTSTMAETMCRFLGVDPQGDKISSCEYFKGNKVSFDRRVVVNEVTRILEAHKGKLQGLTDDFIHTLVADPLTDRNFLRFQPGLPFRIQNRYWGGVLFGQLAPRFDNRIIGNCPVSGKKLPLKSSAEFLAFRWAMMLANVRVGDDGRGLSPDEIARLNKEVARVGGFSKGEFKKLLKDVTGELVGNVDALLTTPEADASLVRFPGVYALVKRGLRGMLDDKPFRKLANTLFRGKRLTIAKIAASVDDDATRNSILALADPKSQKGKGKKKSRDELLRDNISAELPKGRAPFAKDVMAEAVKAVYSGKDPREKGGVLYRDCTNEDVVKEQDIDAETNNHLIRHRVKILLRLLKDIVHDYAENNPAQVAQITIEMARDLKDLSGMTNKQIESDMRDRTRQHLLAAKKAAEHLGIDERLVSPGIIRKFRIAEDMGWTCPYTGTKYDKQAIVSKGDGEPGCVDKDHILPRSERATDSLDSLVLTYREVNEMKGARTGLQFIRDCAGMRVPGKENHVILSESLYRKFVDGLKIFGHDDDRKRQKRRKQNLLRMKSDDAGMTEGMLTRTSYITTLAIKAIRGYFAGCGRMPEIVAIPGRVTAMLRNQWNVMGILAEVDERVKDETGRLRLKQEIRGITHMHHAVDAITLGLAATFIPRNGAFWATMCKRRVRNDEKEMLGSTGIFRFSAHSEPQLVELPLYLRSAIRDALAEQRVVVHQPRKKAGLKIEQNTWGVERVEGKWAFVHKRERDEKTSVIKNEHKK

SEQ ID NO: 9962 - protein, 1372 aa, unidentified
  REGION 1..1372: note = Description of Unknown: Cas Enzyme sequence
MKKIVGLDLGTASIGWAAVNVAEKEGEKTEILACGSRVIPLSTDEKGNFEKGKAITTNADRRLKRSMRRNLQRRKQRRDNLKSLFVEEGWVSSSFSFSENGKGSTHETLALRAKSAQEEITLEEFARVLLSINGKRGYKSSRKTDSEDEGQIVDGMNVAIELEKNNLTPAEYVKKLLSTNKAARVEFYRSDLEKELDRIWRFQQTFYPQILTDELRRQLSHQGKNGTSKIFLAKHNIFTADNKGKDRRFVAIEWRVEALNKQLEESVLAYVISDLRGAIQNSSGYLGDISNRSKELYFNNETIGQYLYRHIQEDAHYSTRNQVFYRQDYIDEFNRIWNVQSKFHPELSQELKRRISDRILFYQRPLKSQKRLISFCEFESHQIEVVVDGKKKTKLTGSRVAPRSSLLFQEFKIWQTLNNIEVFDHSTEEIRALSQEEKELLANELTIRPAMRASEVFKILGLSSRRYGLNYKEVSGNATMAALFAGYFSIVEASGHGEFDLSKLNYLEAIQMLKEILPVLGCTKDIFHFDSQLEKDAYEQQPVFKLWHLLYSYEGDNSPSGKEALYGRISDITGLSRDYARILGSISFLDDYASISHKAICKIFPYLKQGFKYDEACSLAGYNHSHSRTKEENDSRTLQDKLDQLKQGELRNPVVEKILNQMINVVNAISDTYGKPDEIHIELARELKQNAKDRERTASDIEANNKRNQAITQILQKEFGINSVRKTDILRYRLYEELRENGYKTLYSDKYIPRDRVFSKDVDIEHIIPQALLFDDSFSNKTLEFKDINIEKGRRTANDYVKDKYGEDGYTRYRLRVDDLCNRGVLSERKKKYLLMAEADIPSGFVDRDLRNSQYIARKAYELLDKYVRVVVATTGSVTARLREDWQLVDVMKELNFTKYEKAGRTTIIEDVDGRHIPKILDWSKRDDHRHHAMDAITIAFTKPEHIQILNNLNARNGQDAAFHQLFLKETTKNGTKSIFVPPMPLDVLRGEVKKHLDSALVSIKAKNKVVTKNVNRTLSASGVNKTVEFTPRGALHKEQVYGQRKQYEVFEVPVNAKMDIDAIATVASPTIREALYRRLESFGGDPQKAFSGKNSLEKNPIFLDLAHTSVVPQKVKCVRFKTFFCIRKDVAPDLSVEKVLDAKARSRIQERITAYNGDVRAALSNLDENPIWLDDEKAIPIKRVTIAENFNLCAIHNKRDKEGRILLDAKGYPVPNDFVNLRSNHHVALYLDENGKVQEMVVPLFEALNRVNQGSPIIDRAFHSDLGWRFLYSMKVNEMFVFPDEENGFDPREIDLCDEGNAAIISPHLFRVQKLSKGFYNFRHHVETTIEEDKELRDVTWKRIQNPQLMHNVIKVRVDHLGRIVGVGEYD

SEQ ID NO: 9963 - protein, 1428 aa, unidentified
  REGION 1..1428: note = Description of Unknown: Cas Enzyme sequence
MGKVLGLDLGTNSIGISLRNEDKGGTIINQLDFFSSVIFKSGVGRGKSGEFSYAAQRTSKRSIRRLYQSRKYRIWTTLKLLIENGYCPLSMENLEKWSKYDKAKGLKRQYPIDDIQFEQWVRLDFDRDGIADYSSPYQLRAELVEKQFDFTNQTNKYKLGRALYHIAQRRGFKSSKGETLQEQENTSTTDIQEIDISDALKKSEEKKSGKLVEYMQFHHLKTVGAAFAHLERNGIRVRDSEYQAVRTQYKEEIKQIFDFQNGLNIDSDFYKHLVCETKNEGTIFYKRPLRSQKGSQGNCTLEPNKPRCPISHPEFEKFRAWCFINNIRFGDGLNESLTLEQKEQLYQDKFLLTRNSFRFEDIRVWIEKRIGRHLDYNNKSINYKDKTTVSGCPISGRFKNLLGDDWERWEHISTEEKTNKKTGEIKRIRYTTNDLWHICFSFDEPEYVEEFAANKLSFDESQVKQMVRIYGAIQQGYGMLSLKATNNINRFLQKGLKYTDAVLLAKLPDIFKEKWLESEEYIISQIDGLIKSNRDQKLIISIVNALIADYKSRGYSEQFAYKNYGYVLNDDDLNDIRNKAIDVIGSKTWESKDAIQQEQILEQVTKLYQDFFASVKRDYFKTPKVSDALATFLHDKYHFLSNNDLLKIYHPTMIEFYSPADYTPIEDGRLLKQLSSPVIGALKNPMAMRVLHTLRKQVNSLLKTIDENGNALIDEETRVVVETARELNDANMRWAIEAYQRERESENKEYENIIKEFFPNREIKDDDIEQVRLTCEQHDIPEKGIQNEQPKSKENRSVPIFKKDITKYRLWLEQGCRCLYTGKMINIKNLFDDNAYDIEHTIPRSQSFDDSLANLTVCEAHFNRSIKKNQLPTQLANYEEIRLRLQPWFDKVDKLKDNVDFWKSQSKRAQTKERKDYCIRQRHLWQMELDYWQNKVNRFTMTEVTTGFRNNQLNDTRIITKYAFHYLKTVFGKVEVQKGCVTANFRKMLGVQSLDEKKSRDKHSHHAIDATVLTLIPVAAKRDRMIELFYKIQEKKKQNQDCSILENELLNYRNSCKLDGNISDIATFIEDHILINHISKNQVLTPAHRRKRVHGKVLWKKDMSGNMYFDENGKPIPNQWITGDCIRGQIHGETYYGAIKQAKKDDKGTLLRGKEGNIIVGDETYYVVRKELLFKKDANSPGFKDWTELENAIVDKDLFKIMKGQFEEGTSFKDASSKGIYMFKKRPDGTIDFSDECRVNKIRHIRCFTSIKNPLKIKRQTYVSPKEYKQYYYAEMGDLYSMCKYENENGTEKEYHIWSLYDITQNRKAGIEDIPKVILSKRKNALYLTQIITVGDMLLLYKETKQELFEMDIDYLSNRLYVVRGFENPSLIKLVKHINAQSDKDLGKGESIKDYKNMPDKIRCGVNTIKFLKKDTDFILSSKGIEFK

SEQ ID NO: 9964 - protein, 1448 aa, unidentified
  REGION 1..1448: note = Description of Unknown: Cas Enzyme sequence
MKKILGLDLGTNSIGWAVVNEAENADEKSSIEKLGVRVNPLTVDELTNFEKGKSITTNADRTLKRSMRRNLQRYKLRREHLIVILKEHGFISDETILSENGNRTTFETYRLRAKAATDKISLSEFARVLLMINKKRGYKSSRKAKNTEEGQLIDGMEIAKRLYDENITPGQLSLELLKSNKRYLPDFYRSDLQAEFDKIWSVQKKFYPELLTNELKENLYGKNKTQTWAICQKPFALVGIKRSTKGDEQRRENYFWRVKSLSEKMALEELAVVLQEINGQINNASGYLGDISDRSKELYFNHQTVGQYQMTRLDKNPNYSLKNQVFYRQDYLNEFEQIWDTQAKFHKELTPELKKEIRDMVIFYQRSLKSQKGLISFCEFESRQVEVEVDGKKKLKTIGCRVCPKSSPLFQEFKIWQRLNDVEVSGIIIPNKQQDLFGHSKDNTYGKRRLLQEEKELLFSELNYKEKLTKAETLKMLFPRQKEVDMNFKELDGNRTQAELFKAYQTIAEISGHDVGDLSRKTAKEMLSCISEIFSTIGIDTNILTFNSDLEGKEFEQQSMFRLWHLLYSFEGDNSALGNEKLIEKLHNTFGFEKEYAAILANVVFKESGDYSSLSTKAIHKILPHLKDGNDYSVACEYAGYRHSKQSLTKEEIQKKVLKDKLNLLPRNSLRNPVVEKILNQMINVVNGIVVEFGKPDEIRIELARELKKSAKEREELSKSINETTRIHEEYIKLLQKEFGLAHVSRNDIIRYKLYLELAGNGYKTLYTNTYIPHEKLFSKEFDIEHIIPQAKLFDDSFSNKTLESRQANLDKSNATAFDFVASKFGDDYANGEYKTRIDKLLSDKVISKTKHDKLLMKESEIPSGFINRDLRDSQYIAKKAREILEELVHFVVPTTGSITDRLRDDWQLVDVMQELNWGKYNQLGMTEIIEGRDGQRIRRIKDWTKRNDHRHHAMDALTIAFTKRSFIQYLNNLNARVQKGADEWIDLDMVEIADLNKEDKTKAIYAIERKELYRDNHGKLRFNPPMPLDEFRAEAKRQLENTLISIKAKNKVVTRNINKAKNNVTSEIIDKNGNKKTVKGQVVKTPRAQLHLETIYGSSKRYESKEEKINASFDVSKIQTVASKRYREALLARLNQFGGDAKKAFTGKNSLDRNPIWLNTLHTDKVPEKVKTVSFETIYTIRKEVAPDLKLDKVVDVHIRKVLEDRLKEFSGDSKKAFSNLSENPIWLNKFKGIAIKRVTITGISNGEPLHDKHDKDGNPIFDSEGKKQPSDFVNTGNNHHVAIYRKPKLDKNGQPVLDKNGNIQYELDEKIVSFYEATSRAMQHLPIIDKTYKQEEGWQFMFTMKQNEYFIFPRYDADGNMLFNPLDHDEDWYCNPDNYAEISPNLFRVQKVTNKDYFFRHHLETTVQDNAILKGITWKRCSLNNITGIIKVRINHIGKIVSIGEY

SEQ ID NO: 9965 - protein, 1534 aa, unidentified
  REGION 1..1534: note = Description of Unknown: Cas Enzyme sequence
MKKILGLDLGTNSIGWAVVNAEEASRENETTYLKPTSISAAGSRIIPMSADILGNFDAGNSVSQTAERTGFRSVRRLHERNLQRRERMLRVLKTIGFLPQHFESQVDRFGKFINNSEPKLAWCKGIDGKMEFLFKDSFNEMLADFAVNQPQLVADGKKVPYDWTIYYLRKKALTRRLTKEELAWILLQFNQKRGYYQLRGEEEEQDGKLVEFLAQKVVSVEATDEKKGDEVWYNVHLENGMIYRRTSKEPLDWVGKVKEFIVTTDLEKDGTPKKDKEGNIKRSFRAPKEDDWTLVKKKTEADIENSQKTVGCYIYDTLLQNPNQKIIGKLVRTVERKFYKQELELILRKQQQLNPELQDDILYKRCIEELYPNNEAHRNNIAKPDFVNLFVNDILFYQRPLKSKKSLISNCPYESHFDKEGNEHPVKCIAKSNPLFQEFRLWQFVQNLRIYQRERLVNDGQLDLFGSASAGKLQTDVDVTNEFLKTEDDYVKLFDWLNDRASIKQDTLLNSYFKVKKQRGQEQYPYRWNYVEDKEYPCNETRATILSGLSKCNIESTFLSHETEMLLWHILYSVEDKIEIGKALKKFAEKNNLPDSFAEVFGKIKPFKKDYGSYSEKAIKKLLPLLRMGKYWDADGIDAKTKERIDKILTGEYDENIKNRVREKAINLSDIGHFKGLPVWLACYIVYDRHSEAKEIGKWKKPEDIDIYLKAFKQHSLRNPIVEQVITETLRTVRDIWKQEGQIDEIHLELGREMKNPADKRKKMTERILENENTNLRIKALLMEFMNDPEIENVRPYSPSQQDILRIYEENALDNLTKEDKDFDFVSKISKTAQPSKADIIRYKCWLEQKYRSPYTGEMIPLAKLFTSAYEIEHIIPQSRYFDDSFSNKVICEAEVNKLKDRLLGYEFIKTHHGEKVQLSQGKTVEILSVEAYEKFVKDHYSSNRTKMKKLLMEDIPDGFIERQLNDSRYISKVVKGLLSNIVREKLENGEYEQEAVSKNLISCNGAITDRLKKDWGMNDVWNSIILPRFQRLNELTGKDCFTTTSAEGHLIPQMPLELQKGFNKKRIDHRHHAMDAIVIACATRDHVNLLNNEAAHSKHNANRYQLQRKLRRFEKMEIDGKEREIAKEFLKPWDSFTTDAKQSLENIIVSFKQNLRVINKTTNFYQHYAETGKKVLIPQKKGDSWAVRKSMHKDTVFGEVNLRKTKAVSLNEALKKPERIVNKEFKQKIRELLAEGRDTKFIKKYLEENKDVWSDVNVSKIDVYYFTKETNERFFATRKALDTSFDKKKIEDSVTDTGIQKILLAHLEAKDGNPELAFSPDGIDEMNRNIVALNNGKFHQPILKVRVYEKADKFAVGQKGNKSTKFVEAAKGTNLFFAIFASEKLNKETGEMESVRSYCTIPLNVMIDCQKKYGSQWQNNIESLLKEKDLVANDAELLFILSPNDLVYLPTKEEMRNGIFEIDRKRIYKMVSSSGCQCFFIDEKVAKAIVDKVEFTSLNKAERAITGEMIKETCIPIKVDRLGNIIELNGKKI

SEQ ID NO: 9966 - protein, 996 aa, unidentified
  REGION 1..996: note = Description of Unknown: Cas Enzyme sequence
LEWFSVTTFDSGTGMSQTGEYTLASDRRSHVQSRRLKEHSRYKRWATLALLIEYDMCPMSIESLEKWRIYDKTRNLKRKYPVDDLAFNQWIKLDFNGDDIPEYASPFQLRRELVEKQLDFSQPENRYRLGRAIYHIALHRGFKSSKGETLAELEEGSKDSQISTDDLEGAMKKSEEKKSKDLTEYMESHQLRTVGQAFACLEDEGVRIRNSRYQAVRSQNVDEINEYFQFQQGLSNYQDFHKRLISTKKGFGTLFYKLPLRPQKSHIGKCIFEKNKRRCPISHPEYEKYRAWAFINNIRYKLSTEDVWQELPLDIKNQLYEEVFISKVRKDFNFEVIRKFLEKRLGLTFTNTEKTKTINYKDNTLVAGCPVTARLQNIADYFGTNIEHFEQKGTKTRDTHTKRPEREKHTVVYHAMDLWNICFDIDEKEDVTAFAHNSLEWDELATDRLCKLWNAMDQGYATLSLKALRNINRMLVYGLKTSDAVFLAKVPDITGMTEESVKELIDIYLGRVKGQVNQEVRICRIVNTLIANYKSMPIRDRFADHNYDYQLSDDDKEAVVKCIVDNDNEFSLLDANEQQEMIDRVMSLYQSFFADIHRDFVKAPRIVDALREELYKRYPGIDDSKWEKLYHPSMLSDFPRDKENANHLGSPNIGAIRNPTVMRTLNVLRSIINKMIDEGLIDPQETRLVVETTRVNNDINKRWAIQKYNEERRDENKAIKDILQEYYPEKDINDDDVDAARYVLEQSGENLYGESDRFQHLIKKYKLWLEQGCQCLYTGHIISISNLLNGDMFDAEHTVPRSISFDSSDKNLTMCDSYYNRHVKKNMIPSQLPNYEHDVEIDGHTYTAIKPRLQMWEEKVERLSKNVTFWKNKAKRAQTESYKNTCTRQKLLWKMEFEYWRSKLDRFKMKTSDLTDGFRNSQLVDTGIITKYALLYLKTLFKSVEVQNGQSTSAFRKIFGIPEKDRSTHYHHAVDAAILTLIPASAQRSRMLKLFY

SEQ ID NO: 9967 - protein, 1436 aa, unidentified
  REGION 1..1436: note = Description of Unknown: Cas Enzyme sequence
MKTIGLDLGTNSIGIAIRNRDNGKEIIEQLEYFSSVIFKSGVGSGKTGEFSYAAERTKKRRTRRLYQARKYRIWATLKLLIENDCCPLSMEDLEQWSRYDKALGLKRQYPIHATRFEQWVRLDFDGDGVADYSSPFQLRAELMEKQFDFSNQVDRYKLGRALYHIAQRRGFKSSKGETIKEQEKNESKDILETDISTALKKSEEKKSGKLSEYMELNNLPTVGCAFYHLEKRGVRVRNSEYQAVRSQYKDEIKQIFEFQNGLDKESLFYKRLVSEKKGEGTIFYKRPLRSQKGHVGNCTLEPDKPRCPISHPEFEKFRAWCLINNIKFGDELKETLSIEQKEQLYKDKFLLTHSSFKFQEIREWIQKKVGKSLDYGAKTINYNDKVSVSGCPISGRLRNLLGENWENWKYVSEETKTNKRNGEIKPISYDAIDLWHICFSFDEPEYVEEFAKSKLLFDESQTKQLVRIFGAIQQGYGMLSLKAIKNINRFLQKGFIYTDAVLLAKLPDIFKDKWEFAGETIISELNRIIENNRKQKQLCNIVNTLIANYKSLEINEQFASKNYDYKLDASDLKDVRETTIKAIGEKTWAKKNEEEQNQLLEDVATLYQNFFSSEKRDYYKIPKVADALAEYLHNKYEFLSEKDLRKIYHPSMIEFYAPAKYKQIEDGRSLKLLGSPVIGALKNPMAMRVLHTLRKQVNALLKATDEYGNALIDEDTRVVVETARELNDANMRWAIEAYQREREAENKEYEKLIREFYPNRLPNKDDVDIVRLVCDQHDIPENGGILNDAPKTKKQTDSIPVYKKDITKYRLWLEQGCRCIYTGRMINITGLFDENEFDIEHTIPRSLSFDDSLANLTICDAYFNRTKKKNQIPAQLSNYHEILNRIQPWFDKVEQLKDNVEFWKAQSRRAQDKDRKDYCIRQRHLWQMELDYWQDKVSRFTMTEVTTGFRNNQLNDTRIITKYAYHYLKTVFNKVEVQKGSVTSNFRKMLGVQSVDEKKSRDKHSHHAIDATVLTLIPTAARRDRMLELFYKIQERKRFVEDTAELERELDKEIKNCGLSGNVSDIVPFIESNILVNHVSKDQTLTPAKRKARVRGKEVFVTNAQDELVNKWITGDSIRGQLHKDSFFGAVKYPKTDENGMPITKDGRFEFEKDKEGNEVVSMVMRVPISSFTKEDELKKIIDPHVRKSIEINIRNRKAEGKTFKAALEEPMWLLDSNGNEIKQDKKGRALSPIRHVRCRVAAGRGYFTKDKAIEVKKQTYPSKYDYKERYYAQNDGNYLCLLYEGVKKGKVERRFKFLNYFDVVNIGIHDTDILWEEPYFQVINEKNIQLNLTAIIKVGTRVLMWSDGPEELIGMSDNDLSGRLYVVYKFNLKGANCIYIQSHIDARNEISNDEDYTIFDKTKYQARLTMVANSFNCLIENRDFIVTEMGKIKFL

SEQ ID NO: 9968 - protein, 904 aa, unidentified
  REGION 1..904: note = Description of Unknown: Cas Enzyme sequence
MKKILGLDLGTNSIGWAVVNEAEKVGEKSSIVKLGVRTISYDNFVSTETGKESKDPVKDFSGGKGISCNAGRTMKRSARRNLQRYKLRRENLIEILKEHGFIDDEAILSENGNRTTFETYRLRAKAATEEISLVEFSRVLLMINKKRGYKSSRKAKSTEEGQLIDGMEIAKRLYDEGKTPGQLSLELLKQDKKYLPDFYRSDLQAEFDKVWNFQSQFYSDVLTEALKEKLKGKNKTQTWVICQEPFAIVGIKRITKGNELKIENYSWRVKALFEKMELEELAVVLQEINGQINNASGYLGDISDRSKELYFNNQTVGQYQMAELDKNPNYSLKNQVFYRQDYLNEFETIWETQAKFHKELTIELKKEIRDVVIFYQRPLKSQKGLISFCEFESKQVEKEIDGKKKTITIGCRVCSKSSPLFQEFKIWQRLNDVEVSCANGKRRLFPEEKDMLFAELTYKEKLSKADALKLLFPKQNGVDMNFKELDGNRTQFELFKAYQSIAERSGHDVGDLQKKSAKEVLRCISEIFDTIGVNTGILTFDSGLDGKAFEQQPMYKLWHLLYSFEGDNSAIGNEKLIDKLKSAFGFDKEYATILANVVFKDVGEYSSLSTKAIRKILPHLKDGNDYSVACEYAGYRHSKQSLTKEEIQNKVLKDKLELLPRNSLRNPVVEKILNQMVNVVNGVIDAYGKPDEIRIEMARELKKSAKEREELSKSINETSRQHEEYVKILQAAPFNLSHVSRNDIIRYKLYKELEATGYRTLYTNTYIPCEKLFSKEFDIEHIIPQAKLFDDSFSNKTLEARQANLDKSNTTAFDFVATKYGDDFANGEYKTRIDKLLADKVISKTKHDKLLMKEADIPSGFINRDLRDSQYIAKKAREILEGLVRFVVPTTGSITDRLREDWQL

SEQ ID NO: 9969 - protein, 1393 aa, unidentified
  REGION 1..1393: note = Description of Unknown: Cas Enzyme sequence
MEKILGLDLGTNSIGLAVRDFDNTVPITEQIELVGTNIFPSGVGKDKSGEFSYATARTKKRTVRRMYQARKYRIWATLELLINNNCCPLSIEDLDKWRKYDKNNGLKREYPINAVKFEQWVRCDFGDGIETNPYKLRYELMNRQFDLNDETERMKLGRALYHIAQRRGFKSSKGETISDKDDDKVVEKDDVDVSDMMKKSEEKTSSNLVKYMTDNNLPTVGWAFYRLISDGIRVRNSDYKAVRSQYKDEIKKIFEFQNQLDTNSEFYKHLVSEKKSEGTIFYKRPLRSQKGLVGKCTLEPGKDRCPVSHPDFEKFRAWCFINTIKFGQDCQQELTIEQKKKLFNEKFMLLKSDFKFEEIRQWITKETRISLDYNAKTINYKDRTSVSGCPVSARLKKLLGDNWQSWKYEKTFKKKNGETKHACYDAYDLWHVCFSFDDVEYVEEFAKNKLNFNDDQTKLLVKVFGAIKQGYAMLSLKAIRNINRFLEKGYLYSYSALMAKLPEIFGEERWAENESKIVSLLQNATVENRKQKTIYYIVNSLIANYKSLEPNEQFARNNPDYLLGESDKKDVAAMAQKTFGEKSWQSKSAEERNEIIATAEKLYQEFFASSDCDYYKLPKLAEALADCIKKKYDFIDPKQLKKIYHPSMIEFYAPAKEQTIEDGRVMKLLGSPVIGALKNPMAMRVLHSLRCMINKLLTTNDENGNPIIDENTRIVVETARDLNDANMRWAIETYQRERENENKKFAEIINEFLPNREVSDEDKDRMRLFMEQLETPETKQEKQKFERYKKDVTKYRLWIEQGGFCIYTGRPINITNLFAENAFDIEHTIPRSKCFDDSLANLTICDAHFNRTVKKNQIPSQLNNYDKILSRIQPWKDKVERLKDNVEFWKSQSKKAMTKERKDDCIRQKHLWQMELDYWKNKVERFEMKEVTDGFRNSQLVDTRIITKYAFHYLKTVFNKVEVQKGSVTANFRKMLGIQSMDDKKSRDKHSHHAIDAAMLTIIPTAAQRDKMLELFFKISEGKHAGENVSDLEAQLNIERRKCGLYGDISPIVPYIENNILINHQSKDQTLTPAHRRKRIRGKIVPNVWLTGDCLRGQLHGESFYGAIKLGKKDANGKSLLRNPDGSIVQEEDTKYVIRRELKFKKNDQDSGFKNWDELEKVIVDKALLSKIKSQFPDGTSFKDAYETGIKDPQGNKIRHIRCFAPLVKNPLQIKKQTYLSKYPYKQNYYAAMGDLYVMCKYENISKTKTEYKIWSLFDISQNRKMKTSDVEDIPSSLTVKDKKNNTFVLNLICKIRKGDMVLLYENSPDELVEADKTLLSQRLYVVTGFENPGLIKLVKHINAQKDSDLGKGESIKTFDIMPDKIRQSISKLNFLLQNKDFDFSADFGIVFK

SEQ ID NO: 9970 - protein, 1524 aa, unidentified
  REGION 1..1524: note = Description of Unknown: Cas Enzyme sequence
MKKILGLDLGTNSIGWAVVNADEIARDNDTSYLKPTSISSAGSRIIPMSADILGDFEKGNSISQTAERTRLRMARRIHERNLLRRERMLRVLKTLGFLPTHFTNKIDDFGKFIDESEPKLAWIKRENGGYNFLFQDSFKEMLKDFAIHQPQLVADGKKVPYDWTIYYLRKKALNERISKEELAWLLLQFNQKRGYYQLRGEEEEEDNTKQVEFLAQKVVRVEATNEKKGDDIWYNVYLENGMIYRRPSRYELDWVGKVKEFIVTTDLEKDGTPQKDKEGNVKRSFRMPKEDDWTLIKKKTEFDIENSNKTVGCYIYDNLLQRPNQKIIGKLVRTVERKYYKDELIQILSIQQELIPELKDTELYKRCIEELYPNNEAHRKNLAKPDFVNLFVNDILFYQRPLKSKKTLIDNCPYEYRKDKDGNVYPIKCVAKSNPLFQEFRLWQFVQNLRIIQRERFVSGGQLDLFSNVATGKLETDVDVTSEFLKTEDDYVNLFDWLNDRSSIKQDTLLNSYFKIKKEKGKDHYPYRWNYVEDKEYPCNETRAAMINGLEKCNISSDILTHETEMALWHILYSVEDKIEIGKALRTFAEKNHIGNAFIEVFCKMKPYKKDYGSYSEKAINKLLPLIRMGKYWKEDNIDTKTLERIDKIITGEYDETIKNRVREKAISLTSIEQFKGLPIWLACYIVYNRHSEAKEIEKWEKPEDIDCYLNTFKQHSLRNPIVEQVITETLRTVRDIWRKEGQIDEIHVELGREMKNPADKRKQMTERIQQNENTNLRIKALLMEFLNPELGIENVRPYSPSQQDILRIYEENALDNLTKEDTEYEFVSKMSKTAQPSKSDVIRYKCWLEQKYRSPYTGKMIPLAKLFTPAYEIEHVIPQSRYFDDSFSNKVICEAEVNKLKDRQLGYEFIKNCAGQIVQLSQGDSVTILSVDQYEKLVKDFYASNRQKMKKLLMEDIPDGFIERQMNDSRYISKVVKGLLSNIVRVKESNGEYEQEAVSKNLISCNGSVTDRLKKDWGMNDVWNSIILPRFQRLNELTGTKNFTTLNREGHEIPNMPLELQKGFNKKRIDHRHHAMDAIVIACATRDHVNLLNNEAAHSKHNANRYQLQKKLRRFEKVVNGYGKEIEVAQEFLMPWQTFTTDAKQVLQNIIVSFKQNLRVINRTTNSYLHYDENGKKKYQKQTIGDSWAIRKSMHKDTVFGEVNLRRKKSVSLNEALMKPDSIVNKDFKQKVKELLNEGQNHKFIKKYVDDNKDIWSDIDTKKIEVYYFTKDEKKRNGEPKERYFATRKPLDVSFDQKKIRESVTDTGIQKILLAHLEAKDNNPELAFSPDGIDEMNRNIVALNNGKFHQPIIKVRVYEKADKFAIGQRGNKSKKFVEAAKGTNLFFAIYVNADKVRSYYTIPLNIVIDRLKKNLSPVPEFNEKGESLLFYLSPGDLVYIPNDENDKSYKDFDITRIYKFVSGSSYQGFFIPYNIANPLMPTRELGSNNKSERAWSANGWSSEMIKEVCIPLSVSRLGKIELR

SEQ ID NO: 9971 - protein, 1246 aa, unidentified
  REGION 1..1246: note = Description of Unknown: Cas Enzyme sequence
MGKVLGLDLGTNSIGISLRNEDRDGDIINQLEYFTSVIFKSGVGKGKSGEFSYAAQRTNKRSTRRLYQSRKYRIWATLKLLIENGCCPLSMEDLEKWSKYDKAKGLKRQYPIEAIQFEQWVRLDFNGDGIADYSSPYQLRAELVDKQLDFTNQTNRYKLGRAMYHIAQRRGFKSSKGETIQEQENASSTDSQDIDIADALKKSEEKKSEKLVEYMQIHQLKTVGAAFAHLERNGIRVRNSEYQAVRSQYKEEIRQIFDFQNGLDTNSDLFKRLVCETKKEGTIFYKRPLRSQKGLLGNCTLEPNKPRCPISHPEFEKFRAWCFINNIRFGEGLNESLSLEQKEQLYQEKFLLTRTSFKFEDIRVWIEKRIGKHLDYSKKSINYKDKTTVSGCPISGRFKKLLGDNWEKWQYYSGIPKTIIKKNGNETIKRTKEIEYHTNDLWHICFYCSTFDSDTSYVRNFAKDKLHFDDNQTDELIRICDNIQQGYGMLSLKATKNINRFLQKGLIYTDAVLLAKLPEIFNNKWSEIEGSIISQIDGIISTNRKQKLIYGIANALIADYKSRDFTDQFAYKNYSYELKNNDYNDIRKKAVAVIGSKTWTSKDEVEQEEIIAQVAKLYQVFFASTKRDYFIVPKLADALSTFLNNTFKCISEKDLRKIYHPSMIEFYSPADYTQIEDGRSLKLLGSPVIGALKNPMAMRVLHTLRKQVNSLLKTIDENGNALIDEETRVVVETAQELNDANMRWAIEVYQREREAENKEYEKIIKEYFPNRDINDDDIEQVRLTCEQHDIPENGIPNKQSKTKENKNAPIFKKDVTKYRLWLEQGCRCLYTGNIINIKNLFDDNAYDIEHTIPRSQSFDDSLANLTVCEAHFNRSVKKNQLPTQLANYQDIRLRLQPWFDKVEKLKDNVDFWKSQSKRAQTKDRKDQCIRQRHLWQMELDYWQNKVNRFTMTEVTNGFRNNQLNDTRIITKYAYHYLKTVFNKVEVQKGSITANFRKMLGIQSLDVKKNRDKHSHHAIDATVLTLIPTTTKRDKMLELFYQAQEEKLPKEGITKYVIDLEKEKKSCGLSGNVSNIVPYIESNILVNHISKDQTLTPAHKRKRIRGKIVPNRDLNGRILFEKNEDGTFKYDNYGHKIPQAKEWITGDSIRCKLHKESYLGAINYPLTDDTGFPMRDNGKFVYKKDKNGANVISMVENTPLDSFKKEDDFNRIIDPYVRQSITETIRKRMADGMSFKNALNEPIWLTD

SEQ ID NO: 9972 - protein, 1453 aa, unidentified
  REGION 1..1453: note = Description of Unknown: Cas Enzyme sequence
MKKILGLDLGTNSIGWAVVNADDNGNPQSIEGMGSRIIPMGNDKIDYEKGATITKNADRRAKRSARRMGKRYKMRRNKLLFILNKLGMLPDQIQFKNNFPEANKLQNLELLPIRKKTLQLDSLQHYELREKALSQKIELKEFGSILFQYNRLRGYSGGGDDNNETDMKKNQSEDDQDENKKYETRIQKFIIKSVEQSDTTFKVKGGKDKGKELPIYNIVVLDDDEEIYGTSQLQNLQEKIDSEIELEIRIKRTKNSEKIQFALPQKTNWRKQMEETEKTLKEKNFLPCQLFAEELRKNKWVKIRNRVILRQQYMKEFDAVWEMQSGEHPILKDCPKKKLQEILDYIFPGKSETQKQLRETGLKNGLKYVIKEQVIYYQRPLKPQTELISKCQFEKDERVISISHPLFQTFRCWDQINRLFITSKKSVWNERKQKEILQYTNRYLTDEQKLSIYRKLQVQKQMGFKDVAKIVNLKDDNSEYLNGLNVKAKLKGCDTSIAIKKILGELQADDILVENIWQAIYDNVHEGSEYDENSKRVQSIASALPKQLDNVFRTKLALKLAQSLKFQRKYASLSKKAIENILPLMQLNPQNISEELKSKFNNIKNLIETGEIGDDALPQDYIIDFVKNNPQALEQGGLMYAFAASLVYGRHTKENIKPQITDYHDIVYVPRNLRNPIVEQISNETMQVVKAVWKQFKLNPEELEIRVELARDLKNSAQERDKIYKGQINNRKTNEAIKKRLIELKQEVNDRNIELYKLWSKQENPFDNDGNPIARPKFANEKSPTKEEIEKMRLWEEQHYVSPYTKQPIPLSKLFSPERLYDIDHIIPKSRYFDDSLANKVVCETNINEEKDNRTAWEYMSQQDSKIGISKLEDYLDYVNKNFHGQKKRNLLAEKIPSNPVNRQLKDTQYISIAIKDELAKIVGSENVKTTTGGVTDYLRSHWGLKKLFMELTESRFRQMELWNLDGNGEPKESWITKYFDKENGKNVYEIKGWSKRYDHRHHAIDALVVALSNEKLIKRLNDLNKYFQDELAKRKSSIPQGDEETLEEAFFKLSKENRDKIMTEIESSRKFNAPLDNIVSEAKKYLETMIVSQKPKDKLAIKEDEKGKKQLKIRAALHQETYYGKTNNRDTKTMGISELKAKDIPQIVDEVLKNEIDTHRKKYDTMKEAFSGEGLIAFNESRFQTKNKSKLKPPVYTVKLWYSKKDSEDSELQRLYDTNPSKSVITGDNYMFVVMEKDGKRVFDIASLFDSVALAKEEIKGKLYDLESIKRKICEAKRLENKKDKKGNVLPNADKVLFYLQHNDLVYMPSSEDDEIIKYNVKELKNWFSDIKNKKDFAKRIYKVVKITGKDCFFIPNNYAKEISIPKNLSDEETVKLKEKYADKKVPKQETNYIEFGSYSNCTPFEKNELFTNSMREGKKYKGKKPRKIQDYCVKIKSDWLGTIIEFNGKQL

SEQ ID NO: 9973 - protein, 1420 aa, unidentified
  REGION 1..1420: note = Description of Unknown: Cas Enzyme sequence
MTKILAFDPGTNSLGIICRDSSKDNLIKQITSGVDIIRDNTEREKSGRHSSAASQRRSFRNSRTRYRSVKRRKQATLNLLIKHNCCPLDVESLNKWRFDDDNKGYDRTFPIHNKKFMKWINFEFVIDNEIVRSVYRLREILATKPLDYSKSETRFMLGRAIYSIAVRRGFKSSRLVNSEACEDKDDEDDERVELQKSEEELFAGLNQYMQAHNCPTVGAAFSRMERIDKIRIRANYDYKPIRSELKKEIKKIFEVQKLDIKGEYSELYEGLMSEKKHEGTIFYKNPLKSQKGKVEYCTLEPHKRRCPKSHPDNEFSVAWQLLNNIRIKRNGLWENIALDMRFKIFNDLFVSNKKHFEFAKIREMLQELYHIKFEYRENINYNDKKSVPGCPIIYYLQRILGPSWRTEKIKGTKKHLTHAQRRKKLSVKEKGHLTGYTYEDIWHICYESDEKQFVKDFAKDILALSPSKVLSMGALWEAIQDGYANLSLCALRKINPFLAKGYKYSDAVMLANLPTIMGNDFFLQNEQKIVDMIDKERAAVSETNKIYDITNKLISDYKSLKMEDLAFAEHDFDYTLKEDDIADVKNACAENYGKEWDAMTNDQQSEVVTRVAQLYQEFFFSSKRDYCKRINLSDTLKKDLAEKFPFLTKDKLKKLYHHSDNAYYPSVQANESGILQLGNPARGNLKNPTVLKVLYKIKENVNKLLRNGDIDSDTIVVVENARDALNDFNMRWAIEEYNSKRERENKAIEDALTDFAKEFHFALPKESVQLARLALYQNTNFTPYNPAESRRRYDKLCEKYKLWLRQGFFDFYTGKSISIRELFSPDNLVEVDHILPISKSFDDSISNKVLSSSKYNSSVKGTKLPCELPNYLVDTAEGTAIIHRIHDIEEKVKYLEEKVIYWQGRSSRATDPNLKNSAIKQKHLWQMEYDEWNQRLINLTTKEITPKFRHNQLNDTRTISKYAYHYLKSVFGRVVVQRGETTAVFRKIFGFQEAYEKKDRSRHTHHAIDALTLSLIPYGPKREKMMELWYQIQEAHRFKDYDSERLLKDKIDREIRLCGLGHYSPNEVVKYIEDTTLVRNDATNHALTKNIKRYRVRGKVVPLRDENGNIVYEQTSKGNRRVKAKDVSQGNSIRGAIHDQSFYGKIEKWKDDGSHEKEELFVIRKKIEFKSGNIGNGFKSWEDLEKQMVDKQLFKKFKKQYPGGTSFKEACSGGFYTFVVENGVRRKVKVRHVRCIAMTAQPLKKHIFQPQHSDKEQYYYVSPGEGYGIFEYKNNDGTLHYTLDNLFTLSEKMKNGNLRETPCPQNIMVKGVEFFHTRTILKESTILIYPSTECPEDQYKLKSTTISRRLFRINSIQQDKRIKLTRHNLAKSWTEINTIKDSDFDNLPDGMRMPIAKLHFLLLGTDFDIIDGRIVPIKHD

SEQ ID NO: 9974 - protein, 1252 aa, unidentified
  REGION 1..1252: note = Description of Unknown: Cas Enzyme sequence
MKKILGLDLGTNSIGWAVVNADEVGRDNETTCLKPTSISAAGSRIIPMSADILGDFDKGNSVSQTAKRTSYRSIRRLHERNIQRRERLLRVLNLMNFLPEHFANQVNRYGKYADNVEPKLAWKVDEQGGCKFLFMDSYYEMLADFAQNQPQLVTDGRKVPYDWTIYYLRKKALCQRLTKEELAWVLLQFNQKRGYYQLRGEDEEEKTASKTRQYFDKQVIANIVDTGRVYKGLKILNVVLQNGDTGKVFKKEIPDWVGLEKSIIVTVDIDKDGNDKYDEDGQISRRFKIPTEAEWDSEWKLIKLKTEDDLDNSHKTVGCYIYDTLLQSPNQKIIGKLVRTVERKYYKEELNQILEVQKALIPELRDENLYKACIEELYQYNEAHRNTISAPDFGSLFINDIIFYQRPLKSKKSLIRDCPYEERCYIDSTTGEKKKTPIKCIAKSNPLFQEFRLWQFIQNLRLYQREKVVDGKLQTDVDVTAAFLKSDEDYVSLFDWLNERTSIKQETLLNSYFKIKKEKGKEQYPYRWNYVEDKEYPCNETRADILKSLDKCAISHDFLTHDVEMSLWHILYSVEDKIEIGKALKKFTEKNNLPETFADVFAKIKPFKKDYGSYSEKAIKKLLPLMRMGKYWSLDNIDANTKERIGKIITGEYDENIKNRVREKAMNLTEFYHFSGLPVWLACYIVYGSHSEAKEIDKWGKPEDIDDYLKQFKQHSLRNPIVEQVVTETLRVVRDIWKQEGQIDEIHLELGREMKNPADKRKRMTERILQNENTNLRIKAMLMEFQNPEMGIENVRPYSPSQQDILRIYEENALENLSKDDDDFVFVSKMSKTAQPSKSDIIRYKCWLEQKYRSPYTGEMIPLAKLFTSAYEIEHIIPQSRYFDDSFSNKVICEAEVNKLKDRLLGFEFIQNHKGEKVQISQGKTVEILSVEAYEKFVKEHYANNRAKMKKLLMDDIPDGFIERQLNDSRYISKLVKGLLSNIVREKLDNGEYEQEAVSKNLISCNGSITDRLKMDWGMNDVWNSIILPRFQRLNELTGKDCFTTLNAEGHEIPAMPLELQRGFNKKRIDHRHHAMDAIVIACTTRDHVNLLNNEAAHSKYNANRYQLQRKLRRFEKKIVDGKEREIAREFMKPWDTFAIDAKRTLENIIVSFKQNLRVINKTTNHYQHYDANGKKVLVKQKKGDSWAIRKSMHKDTVFGEVNLRFVKQVSLNEAIKRPKSIVHKEFKKKVLKLLEEGRDAKYIKKYVDDNK

SEQ ID NO: 9975 - protein, 1275 aa, unidentified
  REGION 1..1275: note = Description of Unknown: Cas Enzyme sequence
MKYILGLDPGIASIGWALVLEAETNDEESEIIASGVIKANFDNFTYLNSKGVPKEGNPVEMFRKGFAVSPNLVRRISRGAHRNLQHYKLRRAELINIMRKNGLMDDDTLLYEDGNNTTHETYQLRAKAATEEIPLKDLARVLLMINKKRGYKSSKNDDFDSEDEKGEYLAAIIGRSKMLNDTHQTIGQYLMSQLKQHPLQSIKNQTFYRKDYEDEFEQIWKTQIQFHTELTRKLKKELKNRVIFYQRPIKSKKQELSYCELESHQIEIEKNGKKHIVTTGSKVCPISSPLFQEFRMWQRLNDVILTNQITLEKRHLTQDESRLLATELSIRKEMTKRDAIKLLVGKQSKNYDLNFDKLIGNDTQARLVNAYLKIMELTGHDKVEVKKMKVRDVLDAIYQVFDNLGYHTEAIKGEVTTDQEIYIQPYYRLWHLLYSFPGDNTRSGNAKLIQRVKEFFGFDNDECAKIIAGIKFADGYGNLSAKAIQNILPKLKEGYQYSDACALAGYNHSKRSITKAENEKRDLQKHLQLIPHNSLRNPLVERILNQMALLVNDLIEKYGETYGDFDEIRIELPRELSGNAEKRQRDSKNIDDNQKAKDTCREELMEKLKEQGINVTYVSENDVLKYRLYKELAMNGYKTLYSNSKVNLIDLILGRGFDKEHIIPKALRFDNSFSNLTIEKTDINLDKSKATAIDFVRDTYGEEAVQQYIAKVNDLYKKGAFSKTKKDNLLRTAAEIPEEPLNRDLGLTGYINKKAMELLLPVTRKVVPTTGKITSLLRDDWQLVNVLQELVWDKYKKLGKVISYVDKNNKKVERIDKEAWTKRTDHRNHAMDAITVAFTKPAFIFYLNSLNSQGEDREQLIRMRHNYLHRDNQGNWVFNPPMQLGKLRSEVRQQLEQMIIFHQSSSKVATPNLNITKSKKSKGGHKQIVLTPRGKLHDDTYYGCVRLPQTEMLTIDKSFDAEKIATVTKEKYRRALFERLHQFGDNPKDAFTGKNALDKNPIWQDDQHTRAIPLKVKCLQMKTVYTKRVAVNEDLNVENIINDEIKQILRNRLAEFDGKSKEAFANLEENPIWFNEEKGICIKSVIVKANDVKDPIPLHKQRDRNGQFVSDSKGDNVSVDFVKSNNNHHADIYVDANGNLHEKLVSFYEAVRKTSKQKPIIDESYKAEEGWRYLFSVQRYDYFILPDKENGFNPLNIDVCSPDNYSIICPHLFRVQAISSLDYRLRLHIDATNNSLNVLKGHTFERIRSLQDFIGCVKVSINRLGNIIAAQAITI

SEQ ID NO: 9976 - protein, 1015 aa, unidentified
  REGION 1..1015: note = Description of Unknown: Cas Enzyme sequence
RTAILNGLTKCGVSADFLTKEQEMALWHILYSVEDKIEIGKALKKYAEKNHLPESFAEVFGKIKPFAKDYGSYSEKAIKKLLPLMRIGKYWSIDAIDTKTKERIEKIITGEYDENIKNRVREKAINLTDETHFKGLPVWLACYIVYDRHSEAKEIDKWNKPEDIDNYLKEFKQHSLRNPIVEQVVTETLRTVRDIWRKEGQIDEIHVELGRKMKNPADKRRRMTENILQNENTNLRIKAMLMEFMNPEMGIENVRPYSPSQQDILRIYEENALDNLTKEDPEFDFVSKISKTAQPSKSDIVRYKLWLEQKYRSPYTGEMIPLAKLFTSAYEIEHVIPQSRYFDDSFSNKVICEAEVNKLKNRQLGFEFIKNYKGEKVQISQGNTVEILSVEAYEKFVKDHYNNNRAKMKKLLMDDIPDGFIERQLNDSRYISKLVKGLLSNIVREKLPNGEYEQEAVSKNLISCSGSITDHLKKDWGMSDVWNSIILPRFKRLNELTGKNCFTAISSEGHEIPAMPLELQRGFNKKRIDHRHHAMDAIVIACATRDHINLLNNEAAHSKHNANRYQLQRKLRRFETKLIDGKEIEVAKEFLKPWDNFTVDAKEKLENIIVSFKQNLRVINKTTNQYQHYDSEGKKVFVKQKKGDSWAIRKSMHKDTVFGEVNLRFKKTVSLNEALKNPKAIVNKDFKAKILELLKAGRDAKYIKKYVEDNKDVWSDIDVKKIDVYYFTKNTNERFFATRKPLDTSFNKAKIEDSVTDTGIQKILLAHLEAKGNDPELVFSPDGIDEMNRNIVTLNDGKFHQPILKVRVYEKAEKFAVGQSGNKSSKFVEAAKGTNLFFAVFATNVEDKETGETKVVRSYLTIPLNVMIDCQKKFGSKWKSNMESYLKDNELVSNNVTLLFILSPNDLVYLPTNEELKDGIKVIDRNRIYKFVNSGGIQANFIPEYSANTLFTMNKKTQKERFGAETYYTIQDEYGLGSPQSKNERAVTGEMVKEICVPLKVDRLGNIIELNGKKQ

SEQ ID NO: 9977 - protein, 952 aa, unidentified
  REGION 1..952: note = Description of Unknown: Cas Enzyme sequence
MKKILGLDLGTNSIGWAVVNADEKKRDDGSRDLKPNSISAAGSRIIPMSADILGNFEKGNSISQTAERTRMRMARRLHERALLRRERLLRVLSLLGFLPKHFADKIDRYGKFTDESEPKLAWRKNTEGEYEFIFQDAFNEMLADFKENQPNLVSFNKKGKPRKIPYDWTIYYLRKKALVKALSKEELSWLLLQFNQKRGYYQLRGEEEDIPQDKKIEYLAQKVVKVEATDQKKGDDVWYNVYLENGMIYRRTSKAPLDWEGKIKEFIVTTDLEKDGSPKKDKEGNIKRSFKAPQEDDWTLLKKKTEAEIEKSTKTVGCYIYDSLLNNPKQKIIGKLVRTVERKFYKKELTQILKKQVELIPELRDDNLYKQCIEELYPINEAHRNTIAKTDFANLFINDILFYQRPLKSKKSQIDNCPYESHVYINPKTGETKTAPVKCIAKSNPLFQEFRLWQFIHNLRIYQREKEINGKLLTDVDITSECLKSEEDYVKLFDWLNDRETIDQEELLKYLFNTKKSKNKENPYRWNYVEDKVYPSNETRATILKGLSKCGINPSVLSPEMEMALWHILYSVEDKKEIETALTHFAQKQDWNGEFAAVFSKLKPFKKDYGSYSEKAIKKLLSLMRMGKYWNQENIDKNTLDRIDKIINGEYDEKISNRVRDNAINLKDISDFRGLPVWLACYIVYGETKDCTKWNTPEDIDAYLKEFKQHSLRNPIVEQVVTETLRTVRDIWKQEGQIDEIHLELGRDLKNPADKRKKMSENILKNENTNLRIKAMLMEFMNPAMGIENVRPYSPSQQDILRIYEENALDNLTKEDKDFDFISKISKQAQPSKSDIVRYKCWLEQKYRSPYTGKTISLSKLFTSAYEIEHIIPQSRYFDDSFSNKVICEAEVNKLKDRQLGYEFIAEHHGEKVQLSQGEVVEIFSVEAYEKFVKENYANNRVKMKKLLMENI

SEQ ID NO: 9978 - protein, 1064 aa, unidentified
  REGION 1..1064: note = Description of Unknown: Cas Enzyme sequence
MKTKILGLDLGVGSIGWALIETEDNQPKQILGMGSRIVPISKDDGDQFSKGQAITKNADRTARRTARKGYNRYQMRRALLTQALRNNNMLPERMDENVIDLWKLRSDAATEGHQLTLPQIGRVLYHINQKRGYKHSKADENGDSKQTKYVEEVNRRYKDIQEAHQTIGQHFYLELLRSKIERANGPYYTYRIKDQVFPRAAYIAEFDQIMNVQRIYYPEVLTDEFIDTLRNRIIFYQRPLKSCKHLVSLCEFEARPYKTKDGKIVYGGPKCAPRTSPLAQLCAIWETANNITLTNRNNERFEFTLEQRRQIVDFLCHNKEMKVSHLQKILGISKKDGWYGGKAIGKGIKGNATLNQLRDALQGKYDQWLEMPIKHIDVVDATTSEVFWAVSPDVEETPLFRLWHAVYSLQNADELAKTLREKFQITDEAVIEALCKIDFVKPGYANKSHKFIRRLLPYLMEGMMYSEACERININHSNSMTREEREQRPLSARIQLLQKNQLRQPVVEKVLNQMINIVNSLKDQYGEIDEARVELARELKQSRDERESAYKAMGQNERRNKEIAAKIAEFGIRSSRSRIQKYKMWEESLHQCFYCGKTIDLSEFLNGADVEIEHIIPRSILFDDSFSNKVCACRRCNQEKGNQTAMEYMETKSASEQEAYKQRVDEAFTTKRISLTKRDHLLWHKADIPSDFIDRQERLSQYIAVKAVDLLQQGIRQVWASSGTVTFFMRHQWGYDEILHTLNLPRYRRVEGMTEFVDFEHAGQKHTEERIKNWSKRIDHRHHAIDALTIALTRQAYIQSLNTLSSEITREEMIEIIKETGKVYKEKTSLLDKWARELPHFSVEDVTNAVDGILVSFRAGKRVTTPARRAIYKGGKRVIAQRGIEVPRGALTKDTIYGKQGESYVVKYPLTHQSMKADNIVDPTIRALVKARLAAYNNNANEAFKTPLYSAEGMEIKSVRCVARLTENGVIPIKYNKQGMAIGYAEKGNNHHVAIYKEKDKKTFDITVSFYDAVERKRYGVPVVITNPHEVWDSVLNKDLPQEFLAKLPNDNWQFILSMQENEM

SEQ ID NO: 9979 - protein, 1008 aa, unidentified
  REGION 1..1008: note = Description of Unknown: Cas Enzyme sequence
MKKILGLDLGTNSIGWAVVEIDDEKRIVRIIALGSRILPMDAGEMSKFENGAKLKSSASERTGYKSIRKNISRFILRRNRLHCVLNLLEMLPEHYKLDIEFINKKGNRSGKIKEGKEPKLAYYIDEKDKSQFLFKKSYLEMKNEFRKVHPEMFYQKENGKETNIPYDWTLYYLRKKALNQELTNEELAWVIMSFLQKRGYEKVMGQDEKEQKAGELSEVINAKVESIEELNTTSDDGLKKYRIKLADSFGNIVFTYDEEASHQISEINEFKQIEKISKLDNDGNIKSVEISISEIKNLQIVNIVNTHEREKDKTKFILQLSSGWEQKYLSSYEPNLKDTKKDFIIKSIYDQNGILKKRNIGMPKDEDWELEKLKTETSIQDYNAKNNSIGVASYIYNSLLNNPNQKIKAGLVTTIERRFYEEELKAILESQKNYHPYLKDEQKYQNALLLLYPNNETHRNTLAKQNFSSLLADDIIMYQRDLKTKKSLIADCKYEYREYIRNGKTIKEPLKCVPKSNPFYQEFRLWQFIKRLRIIQLECENSSGEKLVNQDVTEQILTNSAKESLFSFLNDRKEVSQDAILKKIGLSKSEYKWNFEDDHIEPCNETRYDFVLRLKRIKKFDYEKFLSAKSKVRQSKETNNYVDGCTNEYQLWHFFYSVKKREERIKGLPKLIEKLLNNAGMESTWKNPIVEMLSSISTYKNDYGTYSEKAIKKLLPFLRLGKYWSQEDVERIKTVDVIKPEVLTKENINGEITDLQGLWLSSACYLVYGRYAEVGDAKKWTQPHDIIKYLKKEFQHNSLNNPVVEKVVRETLMVVHDIWTTFGETDGTYYNEDNEEVQKYKKYFDRIHIEIGTSLKKNNKAKENDSRKNKENKLANERAIAMLKELKYAYKDIEIRENSPFQQEKFRIFESDIIDSIKYDKDDTKYGWENSNTTEKEFTKKEIKDLLKKEVYKISAKDIERYRLWLDQRYISPYTGKPIKLSELLDRKKYQIEHIFPQERVTLNSLDN

SEQ ID NO: 9980 - protein, 935 aa, unidentified
  REGION 1..935: note = Description of Unknown: Cas Enzyme sequence
RRRMRKVELLRVLVREGLCPHLSDADLKKWQNEKVYPLNEEFMRWQRSYADLDRNPYHDRHRSLTEKLDLTDIRDRYVLGRALYHINQRRGFLSNRKDEADDAESGKVKESINRLSEEMTRTGFRYLGEYFYHLFQKGDKIRCKYTAREEHYRAEFDAICEKQGLSARLKTDLERAIFFQRPLRSQKGSVGTCSFEKGKPRCPVSHPRYEEFRMLQFINSVRVQRPFETEASPLNDEEIQSVKSLFFRKSKPDFPFEEIAKKIAGKGNYAYRENGRDDRYRFNYRMSVSVSACPVSAAIISALGLQGPDGWKEELCSVYTKADGKTQDGILNDVWHALFFYDDGKKLSEWLSAALQLDEEKADVLAKFRLSQGYAALSLKAINKILPWLRRGHIYSDAVFYANLPAVLPSSVTEDTAKMADVVENVRTLLEDFSRDPLSRESSKVKNISDYLLGVADNVHPEKLYHPSMIETYHAVMPDGKGRIHLGSPRTDAFKNPMAMRALFRLRALLNRLLDEGVIDPSTKINIEFARELNDTNMRKAIADWQKDLEEQRKKDAEAIRSIMGDGYVPSEDELLKYRLYEEQNHICLYTGRQISPRMFLGGVSEFDIEHTIPRSRGGDDSQANKTLCENKFNREIKKTQIPSELVDNDVTLERIAGWKETIEDLSNQISSQRRKARTAQTKEAKDAAIRRMHYLKMKLNYWKGKYERFTMTKVPEGFSNRQGVDIGIIGRYARLYLKTLFRKIYVVKGATTAAFRKEWGLQNEYSKKERVNHAHHCIDAVTIACIGKNEYDRWAQYLRKEEDYQFGKGPKPRFEKPWPTFTEDVLAIPSNLIVSHYTPDNLPKLDKKKVRVRGVIQRNVNGEPMYAQGHTARALLHKDTFYGAIQKDDEIKYVTRKPLDKLDENDIPRIVDEAVRGKIKAAIAIHGNLKKAVS

SEQ ID NO: 9981 - protein, 963 aa, unidentified
  REGION 1..963: note = Description of Unknown: Cas Enzyme sequence
MISANSAHFVLGLDIGAESIGWALLTCRQGEPSGVLAAGVRCFDAGVEGDYESGRDESRATPRRQARLSRRQHWRRARRLRKLLRLLQRHGLLPEGDIRTPQEIHEFLLRLDETLRRKHLSPGDRRAAHTMPYRLRTLALDKKLEPHELGRALYHLAQRRGFLSNRKIRKKADEDKEDERSKVKAGINELAGKIAQSGARTLGEYFASLDPEEERIRKRWTSRPMYEAEFEAIWSSQARFHEGLDDTLKKSVHDAIFFQRPLKSQKGLIGECMLRPGKKVAPMALRVAQRFRMLQKVNDLLVYMPDGRQRALTREERDKLIEALDRKRDLTFAAIRSKRVLGLPKETGFNLQEGGEKKLPGNRTDAKLREIFENRWDTLTEQQRDAVVEDVLSIDKDETLARRAQRVWGLDREKAGKLSQIELEAGYAPHCRTALRILVDRMEEGAHYATARKEEFPEQFDTHDPLDALPPVYKALSALRNPAVCRTLTELRKLVNAIVRKYGKPDMIRIELARDLKQPRKIREKRSKENRQRQGIREAAIAEMLRQIPGLQPKGDDIEKWLLAEECGWKCPYTGKVIDARSLLGDAPQFDVEHIWPMCRSMDNSFFNKTLCYHEENRHGKCNRTPFEAYGANTARWEEILQRVRKFKGDAARTKLKRFEATEIPEGFVARHLNDTRIASKWSGDYLALLYGGRSDADGKMRIQVCTGGLTHHLRNGWMLNDILNSDGRKERKDHREHAIDAIVTALSEPRTVKMLADAAEHPEQHRRKLFASIPYPWNGFHDDVRKAIQDIRVSRHVNRKLSGALHEDTNYSKAHHYKNDKGRVMEYRHVRKPLSGMSSAEIDSIVDPVVRKHVKEKMHELKGTDGKVFTSPQDHPVMKTRDGRYVPIKKARIRMVKSVIAVGEDPRTRYVAPGANHHMVIVAVLDRNGHDSRWEGHIVTRYEAAQRHQHKLPVVQKEWGEG

SEQ ID NO: 9982 - protein, 1660 aa, unidentified
  REGION 1..1660: note = Description of Unknown: Cas Enzyme sequence
MENETYISPIAIDLGAAHTGVYSLIYKAGSTLADVEEKSGVVYELDPQNNTLLMVSRRQKRHQRRNLDRRQMAKRLFRLIWEKHFGLQWDADAAQSIGFLFNRRGFSFITEHYDIQALANFPEEAWQELPRAFTDLIPVDLRNSSGLAEFIMALPRDEPLSNSCLCELYKETNKIKKELVFTQKSIALAKACEAIGQGRGVPVERRKKESPLASVSKWIVERWRDEGVCGLEAVEPTGPVYNIAGFLTEHPSLAETVTATLPDYRAAQNESKQSMWNFAIDKFKLEEAEFERTGETTSEKQDFIRTHLHHLAFAIYTISDELRSGARHRARYFEEVEKVLTGITHRHGYLQRFCGSLQQEHFAGLTPAKLTRLISHISNLELKPLRKYFNDKKHQGGFYWDEERLKRCFSDWVLGQWRVDLAKNRDKGAGKPQDYQKLRTVLQNYEGGIIEFWIGHDPQLSIPPYQDNNNRNPPRCQSLLLNACFLDHAYPSWRRWLEALKDNAADHLGDLETRLLGLESGKKNSYFNQAKSGDQRKDSQKLGMADLDARLFQFILDRRKDSDPLRLADIYGHAKRLRQLGWRTELTEPEKMEQARHQQKLAQTVLESGLPPDLKTSPQFNQQDIFPAGSFLHLVCRYFKNRLRAREGRLFIHPDYQRTAHRGYQFRNRFISENNLLRYCNLKPRQKRYQMVNDVAGVLQVSPDRLVLVARQNHNDGSQSEAVFAWLKDFRGLQTACKNAADSQKEHRGLLKTKLLAGDRALQRLQDRCTQLSRLIAREICSGDEDPEARAQKFSSIFSFAQLYAIAFSDRAGNASTCPVCSLDNSRRMEMVGEDQRAKARRLPAISTRVIDGAVKRMARILGRKIANDRWPLLKQKLVQGTPVRVPIITESNRFEFEPALSRLKPGVKEKSIGKDTSYEDKRNRIAEQGGGICPYTGQPVGENGEIDHIIPRSSSFGTLNDEANLIFATEQGNKAKGGQFYSLKNLSRTYKQGLFGTNTDEQIAAWIRETLWDERRGRFRFGNYLSFINLGSDEQKAFRHALFLEDGDHVREQVVAAISNRSRAFVNGTQRYFAEVLANEFYKEALDIGKERLISFDYFGVEATSTSRGDGVRDWRRHYEEFYPGEFAPYRKKDGISQHPYSHLLDAQIAFAINADKHRGDGGLRLRIPDHMGLDALNMDTGEILHDNIFHAIRVLPEQMTAVHVQRRRPSDNRCTHRAFTRDLFYADRYLPILLKQEENGVILKAGFTWKNAEVFNKNQRRLLPQLLPLLTQAPHYPARLSQELDKGSTAGTAFEQRLYQLLINTDYFKEQIDRTGAIYLTINRKTLHELWLERHNTKNGTPFENKDHATLFEFCWGKLGYRTEKKHIATEDDLKKLEAKEGNFYTTFNRTKIMLPFKHDWVKLRRRWNVAKSEGQDFDDFLRDFFLKKTKEPAPHHRVRKQFSLPVKSTQSKFMLSRTGWDNTQTFQIINESLAQGQINNKAEAMLRPHKGDAKQKKTLTPWARSASFVKLTKEDYFQGQPVDPNQWYLVTDTGLYPRDEHGELVVDRVWLRVDDVTSPSVAIRLARDADDITRPEIILDDRLCGRKFEKKTEKKPTGGKPGEPAMTADQVMREYWETDIKHQRAGAIITYKASKQYNRERLQALTAECSIAVDRLE

SEQ ID NO: 9983 - protein, 922 aa, unidentified
  REGION 1..922: note = Description of Unknown: Cas Enzyme sequence
MSKQSKVRILGLDLGPNSVGWAIVDQSKDKKYNLIDTGVRVFQAGLDGLETDGKGKSRNMVRREARGRRRLLERRKRRMIKLANALKRVGLLPDADYKDSQIRHFTLESLDQELRSPYELRAMALDEKLELYELGRAIYHLGQRRGFLSNRKSIVTDEAEEKGIKAEINGLSGNIEKSKCRTLGEYLFSISAKDRRVRDRYTSRKMYETEFEAIWTAQKIHNPELLTDDLKKTIHKIIFHQRPLKSQKGLVGRCELEWGSKRAPQALLISQRFRYLITVNNLKVMDDTVPTGRELIDEERDALIIALENEGDQTFAKIRKLLGLSRFTKFNLELGGEKRIPGNRTALKLKEVFGAERWNALTEGDKNAIIADIRCIVKDDVLKKRSINIWGLNEKQAERLAQVRLDDSYFGFSQKAIKKLMPLIEKGVSLQTAIKECYPERWERDIETLESLPPVDCDEMPDLRNPIVFRTLTELRRVVNAIIKKYGKPDIIRIELARDLRQSSKQRERTWKKMRTNERNREKAAQRIIKEANIKDPSRTDILKVVLADECDWTCPYSGERITIPSLLGDHPQFDIEHIIPFDRCLDDSFVNKTLCLAKENRSAKRNQTPFEAYGSTAKWQDILTRIKGFKSDIAREKLRRFILKGKALEEFLGEYTSRQLNDTRWASKWAKQFLGLLYGGVQSDGIEASGKKRVQAISGPVTAYIRNLSNMNSILGDGPGKSRDDHRHHAVDAIVVAITNSHTVSLINKAAKSASEHYRNRLFDKIPPINFELIEQANKDIKEIVTSHRVSNRIRGSLHKDTIYGKLREDESGKTYVHQRKPLVEMSKSDIDNIVDPVIREIVQKILNRNSSDPKKIFSDEKYLPEITTGNGKKVKIRKARIKINMASGIIVGNENHNHRHVYSDSNHHIEYFEVYGTNGE

SEQ ID NO: 9984 - protein, 1217 aa, unidentified
  REGION 1..1217: note = Description of Unknown: Cas Enzyme sequence
MRKRILGLDTGTNSLGWAVVDKNNDGTYTLIDKGSLIFQEGVKDEKGNGNEVSRAAERTSYRALRRQYFRRRLRKIELLKVLVKHGLCPTLSEEDLNLWHTKKIYPKRDVFMEWQRTNENSESNPYYYRHVCLTEELDLSDEQERFILGRALYHLAQRRGFLSNRLDQSEGESEDGDVKSGISNLTKEMAAKGCEYLGDFFYKLYREKGNTERIRTRYTDRNAHYKKEFYAICKKQNLEAELVGELERALYFQRPLKSQRFGVGKCTFEPKKQRCADSHPAYERFRMWAFINNVKVKCSADPDLRPLNEEERKIAEQVFYVKGGRKSKTTFDFEDIAKAIAGKGKYQYINDAGDKEYKFNYRMSQGVAGCQTIAALRSVFGDDYLHSIAETYTKADNKSLDDIENDIWNVLYFFSSEEKLKEFAVKNLQLDDDLAAKFSKIRLSRGFASLSLKAIRRILPFLEQGYRYGSAVLLANVPYVMGDRWNIVKDEVMAKMNEVIYNYNPKDINLNRTLECCIKDILEDDFNVEASDVCRLYHPSMIDVYPDAKEKDGVLQLGSPKTNSVRNPMAMRSLHEMRKVINTLLRNKIIDQNTEVHVEYARELNDANKRKALFAWNKSQNKLHDKYRDDIIRLFKEATGKTIEPTKRDILKFKLWEEQNHICIYTGEEIGIADFLCKNPKFDIEHTVPQSAGGDSTEINLTLCNSRFNREVKRTKLPTQLAEHEEIINRISEWKDKIDELSKKIDRLHTNGSMTKEKKDAIIQKRHLLKIEKDYWKGKYSRFTMTEVPEGFSLRQGAGIGLISKYAALFLKSLFHKPNDRNRSNVRTIKGQITAEFRRLWGIQDEYEAKSRDNHVHHCIDAVTIACIGAEEYSRMASFYHDEETYNWDKSGSKPTFPKPWATFAEDMKKLKDEVVVVHSTTDNMPKQGKRRIKTSVGMAYAQGDSARAALHKDTNYGAIERDGKIKYVVRKQLADLKESDIENIVDEVVKEKVRQAVKEKGLNQAVVDGIYMNEKKRILIKKVRCIVPTVTNPLSIRHHRDESKKEYKQQYHVALDSNYCMAIYEGRVNGKIQRKYEVVNMLDAARFYRKSSKKVGHSSMVQEEKNGLKYRCKVMSGTHVLLLQNDDEVIDVTDKKVVAARLYYVAIISADGRLLLRNHQEARRAGDLKSETNANDFCPTSGYRSQIRWSLSNFHALVENSDFTIDKLGNVRLIKK

SEQ ID NO: 9985 - protein, 1380 aa, unidentified
  REGION 1..1380: note = Description of Unknown: Cas Enzyme sequence
MSSEKKEIGEYYLGLDIGTDSVGWCATDPNYKVLKAKGKATWGVRLFDAANSAADRRGFRTARRRLHRRNQRVKLVQELLDSEVSKVDPLFFMRLKESKFHFGDKKPEVRQRYTLFADQLYTDKDYHREFPTIYHLRLALMKHERKYDIRLYYLAISHFMKHRGHFLFEGELSEKPEFEEVFQELREYVSEQMEFSLDAEDLTAVKTVLCDRKKGLNDKKKEMNRLFNASSDLQKEALAALCGSTVQLAKLFGDDDLKGGEIEKFSFRDGVGEEDFDKLSSLLGDRFEYFQRLKAVYDWMILDSIMGKHASISEAQVARYEKHRDDLKDLKAVFRLCLSKEQYDAFFSGKGRDPKATDVVGYDAYSGRRSFGDVDTWKKRPEQIEFCEGIKKILKNVAPLEDARLSATLERIKSEAEEGVFMPKQVSKGNSVIPYQIHQKDLNAILDALCEDYHVFAEKGADGLSVREKLSEIFKFRIPYFVGPLNTYHSDKGGNSWMKRKEGEEKGEIRPWNFDSKVDRAETAERFMRRLTSKCTYLHGEDVLPKNSLLYSKFMVLNELNNVRIEGERLSPALKQKIFKEIFETRSGKFTLAKLCGWLKKEGFEFDENQVGGVDGTFQGTLKSYQDFVRILGGEKQGKARVDADPSMVETIVQNILVFGEDKKMLRERILAKYGDKLNTDEIKRIAKLSYSGWGRLSEKFLNGIKDYDPRTGRELTIVEAMWEGQENMMELLSDRHGYTKKINALNAEFDGTSTSLTYDLVRESYASPAVKRGVWQTLLIVDELRKVFGADPARVFIEVAREKEKNPQRKASKKQRLLDLYKNIKDEERDWSAEINEKDERQFNSKKLYLYYAQMGRDIYTGERISLSELFSKDAGGDVYDVDHIIPQSKTKDDSLLNNLVLTRSSCNKSKGDRYPVPENFKTQECKKLWNLLFDKGLITKEKYERLTRNHAMTEDELAGFISRQLVETRQSTKLVADILKKVVPQSKIVYSKATVVSDFRRDAEFWKSRSINDFHHAKDAYLNIVVGNVYYTKFTDDPRRFFRENHGGDYNLKRLFDFDVERGGKVAWTRGKDGSIATVREQMAKNNILFTRYATEKRGGFWDQMPLDKSGTLKPLKSTDPRLDPKKYGGYDKVGANYFMLVESDDNKGRMRTLEWIPVHLCGVSRTKQLEFLQNEAGSALKNPVILIPEIKINSLLKIDGVPMHISGKSNESILMKYAVQLVLSQEDEKTVHAIDLFLERRKENKNATIDESHDKISKDAIARLYDSLIIKACDRIFRKRLEAQKDKIIHGRETLLAQSLEEQCLGISEIMKLFNCIYGTADLRCIGGSKRAGAFMISKKLIGDPSKRSSYPQSAKLIHQSITGLFEQEIDLLTVGK

SEQ ID NO: 9986 - protein, 1363 aa, unidentified
  REGION 1..1363: note = Description of Unknown: Cas Enzyme sequence
EYYLGLDIGTDSVGWAVTDNQYNVLKFNGKSMWGIRLFDAAQTAAERRMFRTARRRVERRRWRLELLQELFQNEIEKKDPDFFQRMKDSALYPEDSKTGKPFALFCDKDLNDKLYYKQYPTIYHLRKALLTENSKFDIRLVYLAIHHILKHRGHFLFNGDFSNVTRFSFAFEQLQTCLCNELDMDFECNNVQKLSEILKDTHMSKNDKVKASVALFENSGDKKQLQAVIGLFCGAKKKLADVFLDETLNDTEMPSISIADKPYEELRPELESILAEKCCVIDYIKAVYDWAILADMLDGGEYGNRTYISVARVRQYEKHHDDLKKLKKLVRRYCKSEYKSFFSFAGTDNYCAYIGDDIETDDRKSVKKCKQEDFYKRIKGLLKKAIENGCPKDEVVEIIKDIDAQVFLPLQVTKDNGVIPHQVHEMELKQILKNAEKYYPFLCKKDEEGIVTSNKILQLFKFRIPYYVGPLNSRIGKNSWIVRRAEGKIYPWNFEEKVDLDKSEEGFIRRMTNPCTYMAGADVLPKYSLLYSEFMVLNELNNVRICGDKLSVEIKQIIIKDLFQRTRRVTVRKLCDKLKAEGVISRNSNQKDIDIKGIDQDLKSSMVSYIDFKNIFGKEIEKYSVQQMCERIIFLLTIHHDDKRRLQKRIRAEFTETQITDDQLQKVLRLNYQGWGRFSAEFLKELKGVDTETGEVFSIINALRKTDDNLMQLLSNRYTFSEELEKYNSNKRKKIEALTYDNIMEGIVASPAIKRSAWQAISIVMELSKIMGREPKRIFVEMARGPEEKKHTISRKNQLLELYKSVKDESRDWKTELETKTESDFRSIKLFLYYTQMGRCMYTGEPIDLDQLANTTIYDRDHIYPQSLTKDDSLNNLVLVKKVENANKGNGLISADIQKKMRGFWAELKKKGLISDEKFSRLTRTTPLSDDELAGFINRQLVETRQSSKIVADLFHQLYPTTQVVYVKAKIVSDFRHETLDMVKVRSLNDLHHAKDAYLNIVTGNVYYEKFSGNPLTWLRKNPDRNYSLNQMFNYDIVKKTKEGTSYVWKKGKDGSIAVVRRTMERNDILYTRQATENKNGGLFDQNIVSSKNKPFIPVKKGLDVNKYGGYKGITPAYFALIEFTDKKGSRHRLIEAVPLYLRADIDNDSNVLRDFYKNVLGLENPVVILNRIKKNSLLKVNGFLIHLRGTTGFSASQLKVQNAVEFSLPHHMEDYVKKLENYEKHIIAERGSTKNSQIKITEWDGISKEKNLQLYDMFINKMENTIYKFRPANQVSNLKENREVFNSLAVEDQCSVLNQILMLFVCKPVTANLSLIKGSKNAGNMALSKIISNMRSAYLIHQSVTGLFEQKIDLLKVSSQKD

SEQ ID NO: 9987 - protein, 1030 aa, unidentified
  REGION 1..1030: note = Description of Unknown: Cas Enzyme sequence
ERRSFRAPDANDWNLQKKRTEADIESSGLTVGSYIYRHILANPSEKVQGKLVRTVERKYYKEELRAILQKQAEYIPELTNSSMLEVSIRELYAKNLAHQDSLRKKDFVYLLIEDLIFYQRPLKSKKSLISNCPYEQYEYIDKETGEIKIQNIKCIAKSNPYYQEFRLWQFIQNLRIFSRDGIEEKEVTKDYLQTEEDYVHLFNYLNDRKDISQEIFLKEFLGLKKSKGKDTQYACRWNYVEDKVYPCNDTRYTILKALKRANLSSNLLNRDVEYRLWHLLYSVEDKNEILKALGKVAEQKGYGSEFVEAFKNIPSFKKEYGAYSEKAIKKLLSVMRMGSLWRKEDLPQDILENYQTYTSEESDINILERIANQGKTLASISDFRGLPVWMACYVIYGRHSESKDITIWKSPNDIKVFLNEFKQYSLRNPIVEQCVLETLRTVQDIWEQYGKIDEIHVELGRSMKSSADQRKRMSQTIQDNENTNLRIRQLLLELKNDDNIKEVRPFSPIQQEILRIYEEGALMELKRDDPDFTEISRISSLAMPTQSELLRYKLWLEQKYRSPYTGKTISLTKLFTPAYQIEHIIPKARFFDDSFSNKVICEAEVNQLKSNQLGYEFILSQGGRIVSCPTLGDVRIFTKDEYKSFVADHYSGNKSKARKLMMDDIPEEFVQRQMNDSRYISRIIIGLLSNIVREDGEVEANSKNVIPCTGGITDKLKKDWGLNDIWNTIVAPRFMRMNELTESDSFGHWENKDGKRVFQTSMPIELQKGFSKKRIDHRHHAMDALVIALASRNIVSYLNNESARDTKRREDLKRLLCDKGSSIRIPWNGFTKDALQALSEIVISFKHYVRVINKASNYYEHYDENGVKKLIAQKGKDLWAIRKPLHKETVFGHVNLLRKKEVSFNIALNQVKNIVNKDLRKQILLLQAEGKDKKKIKAWFAERNDEFQGQSVKKVAIYYFTDKETPMAATRKMLDDTFDEKRIQSITDTGIQKILLNYLKAKGGDIKMAFSPEGIAQMNLDITQYNDGKP

SEQ ID NO: 9988 - protein, 1337 aa, unidentified
  REGION 1..1337: note = Description of Unknown: Cas Enzyme sequence
MNKQTLKNEPYYIGLDIGTSSVGWCCTDSSYKWLRYHGKNMCGVHLFPEAKTAEDRRLHRSNRRRLQRRRKRIEYLREIFADEINKVEPQFYSALDDSQFKKTSLAGLMKQYPTIFHLRKALIEQPDIKFDIRYIYLVCANILKHRGNFLYPSLSVDNVVNGAFEQNLNDFVDTVKNVYNIDINSKGLDEIKDALLRGDSEALQIAFWGNSDKKDKLHEALCATVTGKTPRLQVLLSSARYEIDPEQLESVKKIKLSDANLEEKLPELEAITGEVYDVFLAAKRLYDWSKMGQIIGEHKKYSDAMIAKYNAHKKNLILLKQFIKQKAPDKYDEVFNKRESNDSYDAWIGRSVAKPNKSTCDWEEFTKAIKKVLNIGKDEPQDPALAKLKQDLENDDFLGKQRTGKNGIIPYQLHEYELNIILENAAKHYPFLKHVDSDGYSNLDKIKALVTFKRPYYAGTGFMTPKKGLEKKQIYPWNFFDIVDLPKSAEKFIVSMTKQCRFIPTCKVLPKQSLLYSDYIALDHINSLSILGKKLSSGQKAKIWELCHQQLVVTFSRIAKAINIDKNDLGGLDKEASISLKSYHDFKRILGDNLCEHNKDFIEACIYDITIFKEEKAEICKRIKAHADEYSLNLSEEQIQKISRLNYKDWGSFSWELFTEIKDDNISIIEALTNGTDNFMQLLSKRYSYSKAIEIYNQQHEVTKTITRADIVSSLCASAPVKRAVKVTLNILDDIIRRSKGLPKKIFVEVPRESSEKNASKKGKKTVSRKARLTKIYNIKGNPELKELYEELETCDESMLKKDKIYLYFLQLGRDMYTGEKIHFAALRDSNSKWDVDHIYAQSRVIDDSLDNKVLTLKSINNDLKKDKWLFEVCQSINGFEQARELWNKLYKLELLSSKKREKLYRTTPLSPDELAEFNSRQLVETRQSAKAICDILKEIYTDTKVEIVYVNADRVSDFRTYFSYAKCRAVNDLHHARDAYLNIIVGNIWYTRLTSNPAYVFGHEKINVQLHTNNNTGLIDKPVARGGVTAWTYDSRQIVDKWMSCNQIQVTRKMIERTGEFYSQNPIKGIKCNNKVQIPRKTSEPRLADTSKYGGYDNQKIAYFAFIEYTKEASRRRTFVPIPVRLIKKTTLDKYISSLGYKDVRVILPKVLIGTKIYIDGYPTWITGKTEDKFTVDQCVQLILTQEQERYIEKIIRYLKTQQKNKKESDDSQEQTEKDPGIIDSDTLYKLVKELVRKFADENGIFSKRPNNFFKGKVETVLNEFKTNSVAKQYVVVKNIVQFCQGSGIADFSGIGGKKNAGSISIKMDITDCKSAYILLESSTGLGVEKIDLQKR

SEQ ID NO: 9989 - protein, 1015 aa, unidentified
  REGION 1..1015: note = Description of Unknown: Cas Enzyme sequence
MKKFFAFDIGKKGLGYCCREGSKIHCAGSLTIEPDHSSVEDIRNNRKAIKTRIFHKAREEYFNKLWHDEAGLEILDKDDERFKIEFSKQDDERIYNSTLLRIALLQNRELEKWQIYKALHNAFQRRGYDSELPWKNSGTKADEENEKLAKNYTQKNGQKLIKKEKFQYPCYYDALALGMWKERNPSDLQRIVSKNPQKIRTGRRVAPRKLVIKELTDLWTAAQKQIPELQKISADKFLYGEYREPYASYTNPDWHKNMGKEKDWQGVLGQKIPRFNNRIISKCKLLPKRNVCSADTIENIVFTLLYQLKNFRYTNSNGEVGCRLAPIEIKEIYDNNIQNWMKNLYDNKKNNKSHTFTVSKTEIEKVIGKGQIYTTKNEKFKSFQANTSGRSSFCRRALQIMNEIILTGTDPKDVNISKFVDKSTTNNPITEDEIKEMLTKVGDWNELYIPYNSTRMAEFAQNPDIQSDLMIGSITNPIIRNRLQIFKNLLNDMIKKYGKPDEVIFEFVKDGKDNSLFGAEKAKATEQMMRINEKKNEEIRNNLSDDYSAINFLKYKLAEMQDWTCIYSGRKIEITDFDACEIDHIFPRTDDTNDALYNKVICYKEEIADKHGRTPYEWMNNNTARWQEYIMRVKSLSQKSGKTKTALLTLSPTQSEKFLEKRKALNETTQIAKIVQSVTASVLEWDLQVKDKNRHIFISDGSSTHKIRQQYKLDRLLDDNAKKNRENGKHRALDAICISYSKDFQYNTEQHKYEIENIDIPHIEDVINHVVPYPYTNDKPLKSALAPAGTIYGKKVKNGKTYITKRIALLDIKKDSKSINKISDNDIKSDLLNKSGKNLSDDNWVKILSKYTHPKRGTKVKKVIVLEEFKGQITFDSNGRERLGEYCDFGNKGTKGQFKHSKQHRGQILYFNEKGKIKVMPVYANKKVQDVKDELINMGCKLYHGGEMFYSGCLIEIPNDFKAGGNIQPKGIYKVSTITTAGLVKIENNSGNIVHTNSTHITEADFRKFIKRSNS

SEQ ID NO: 9990 - protein, 1523 aa, unidentified
  REGION 1..1523: note = Description of Unknown: Cas Enzyme sequence
MKKILGLDLGTNSIGWAVVNAETATRNDETTFLKPVGISAAGSRIIPMSADILGDFDKGNSVSQTAVRTGYRSIRRLHERNLLRRERLLRVLRIIGFLPKHFDDQIDRYGKFAKNSEPKLPWRKTEDGKMEFLFQDSIKEMLADFAVNQPQLVADGKKVPYDWTIYFLRKKALSQKITKEELAWILLQFNQKRGYYQLRGEEEEQEDKLVEYLAQKVVSVEATNEKKGDEVWYNVHMENGMIYRRTSKEPLDWVGKMKEFIVTTELDKDGLPKKDKEGNIKRSFRAPKEDDWTLMKKKTEADLENSHKTVGCYIYDTLLQKPDQKIIGKLVRTVERKFYKDELIQILRKQQEFIPELQDEALYLSCIEELYPNNEAHRNNIAKPDFVNLFVNDILFYQRPLKSKKSLISDCPYETRYDADGNGHPVKCIAKSNPLFQEFRLWQFMQNLRIFEREKEIGGKLQTDVDVTNEFLKTEDDYVNLFDWLNDRAGIKQDTLLNSYFKIKKQKGQEQYAYRWNYVEDKPYPCNETRAGILNGLDKCNVNHEFLSHETEMHLWHILYSVEDKIEISKALKSFAEKHGLTDDFVELFSKIKPFPKDYGSYSEKAIKKLLPLMRMGKYWDESSIDAKTKKRIDKMLTGEYDETIKNRVREKVINLTEITHFRGLPVWLACYIVYNRHSEAKEIEKWETPEAIDDYLKAFKQHSLRNPIVEQVITETLRTVRDIWKHEGRIDEIHVELGREMKNPADKRKKMTERILENENTNLRIKTMLMEFMDPEMGIENVRPYSPSQQDILRIYEENALDNLSKDDKDYDFISKISQKAQPSKTEIIKYKCWLEQKYRSPYTGEMIPLGKLFTSTYEIEHVIPQSRYFDDSFSNKVICEAEVNKLKDRQLGYEFIKAHHGEKVQLSQGKVVEILSVEAYEKFVKDHYTNNRTKMKKLLMDDIPDGFIERQMNDSRYISKVVKGLLSNIVREKLENGEYEQEAVSKNLIACNGTITDRLKKDWGMSEVWNSIILPRFQRLNELTGKGCFTTTSAEGHLIPQMPLELQRGFRKKRIDHRHHAMDAIVIACATRDHVNLLNNEAAHSRHNANRYQLQRKLRRFEKTVIDGKEREIAKEFIKPWDSFTTDTKQTLEDIVVSFKQNLRVINKTTNHYQHYDENGKKVLMPQQKGDSWAVRKSMHKDTVFGEVNLRMKKTVSLNEAIKNTERIVNKDFKAKVKELLRDGRDAKYIKKYVEENKDIWSDVNLSKIEVYYFTKETNERYFATRKPIDTSFDKKKILESLTDTGIQKILLAHLASKGGDSELAFSPDGIDEMNRNIITLSGGKFHKPIAKVRVYEKADKFAVGQKGNKSAKFVEAAKGTNLFFAVFSSEKLNKETGETNKVRSYLTIPLNVMIDCQKKYGKQWRYNIEMYLKEESLVATGAKLLFILSPNDLVYLPTNEELKEGIKKVDKKRIYKMVSCTGNEGHFVPEIIANPILQTTELGSNNKAQRSWTGEMIKEICVPIKVGRLGNIIELNGQKL

SEQ ID NO: 9991 - protein, 1520 aa, unidentified
  REGION 1..1520: note = Description of Unknown: Cas Enzyme sequence
MKKILGLDLGTNSIGWAVVNAEETKRDNETTYLKPVNISSAGSRIIPMSADILGDFDKGNSISQTADRTHFRATRRLLERNLQRRERLLRILKKMGFLPEHFANKIDEIGNFLDYSEPKLAWHKSSDGGLDFLFKDSFNEMLADFAMNQPQLVANGKKVPYDWTIYYLRKKALTQRISKEELSWILLQFNQKRGYYQLRGEEEEQDGKSVEFLAQKVIRVEATDEKKGDDIWYNVYLENGMVYRRSSRIPLDWEGKIKEFIVTTELEKDGTPKIDKEGNVKRSFRAPKEDDWTLLKKKTEHDIDASNKTVGYYIYDTLLSNPNQKIIGKLVRTVERKYYKEELRLILTKQSELIPELQDELLYKACINELYPNNDAHRNNIAKPNFINLFIDDILFYQRPLKTKKSLISNCPYESRCDNDGNEYPIKCIAKSNPLFQEFRLWQFVQNLRIYQREKAIVGEQNKLITDFDVTNEILRTEDDYVRLFEWLNDRATIKQDTLLSSFFKYKKEKGKDKYPFRWNYVEDKEYPCNETRALILNGLDKCGLNQAILTNEFETSLWHILYSVEDKGEICKALRTFAQKNNLPDTFADVFSTIKPFKKEYGSYSEKAIKKLIPLMRIGKYWSPNLIDANVKERIDKIINGEYDETIKNRVREKSINLYDINQFKGLPLWLACYIVYNRHSESKDNDKWNKPEDIDNFLNGFSQHSLRNPIVEQVVTETLRTVRDIWKQEGSIDEIHLELGREMKNPADKRRKMTDNILQNENTNLRIKAMLIEFMNPELGIKNVRPYSPSQQEILRIYEENALDNLTKDDKDFEFVSKISKTAQPSKSDIVKYKCWLEQKYRSPYTGEMIPLAKLFTSAYEIEHVIPQSRYFDDSFSNKVICESEVNKLKDRQLGYEFIKNHKGEKVQISLGHTVEILSVEDYEKFVKDHYSSNHLKMKKLLMEDIPDSFIERQMNDSRYISKYIKGLLSNIVREKETDGNYEPEAVSKNLISCNGSITDRLKKDWGMNDVWNSIILPRFQRLNDITGRDCFTTLNAQGHLIPQMPLELQKGFNKKRIDHRHHAMDAIVIACATRDHVNLLNNEAAHSKHNANRYQLQRKLRRYEKLIIDSKEKEIAREFLKPWETFSSDAKKVLSNIIVSFKQNLRIINKSTNHYQHYDNGKKVFAKQEKGENWAIRKSMHKDTVFGEVNLRFIKTVSLNEALKNPKRIVNKDFKEKVLELLATGRDAKYIKKYVEDNKDIWSDIDVKKIEVYYYTKETNDRFFATRKPIDSSFDRKKIEESITDTGIQKILLAHLEAKGSNPEIAFSPDGIEEMNQNIIQLNDGKFHQPIQKVRVYEKAEKFAVGQVGNKSSKFVEAAKGTNLFFAVLASEQVDKQTGEKNMVRSYLTIPLNVMIDCQKKYGSNWRNNIESYLKEQKLIATNLELLFILSPNDLVYLPTEKLTETNVARIYKLVSCTGNEGHFVPASIASPIIPTTELGSNNKAQKAWTGEMIKEICIPIKVDRLGNIIELNNKKL

SEQ ID NO: 9992 - protein, 1211 aa, unidentified
  REGION 1..1211: note = Description of Unknown: Cas Enzyme sequence
MEKILGLDLGTNSIGWAVIERGDNNVCKLLDRGVNIFQDGVAHDKSGEKPAVQERTAARSSRRHYFRRRLRKIELLKVLIDNKLCPALPVDALLEWKRKKLFPLQEDFINWQRTDENKDKNPYHDRYLSLFTTLDLNKQEDRYVLGRALYHLNQRRGFLSNRKEAADGSDGKVAESISSLSKEISAAGCKYVGEYFYKMYSEGKKIRNRYTAREEHYKKEFYAVCERQNLPESLIHQLERAIFYQRQLKSQKGNVGHCKFEPDKPCCPVSHPRFEEFRMLQFINSIRLQSPADDVFRPINNDELAKIMHLFYRKSKPDFEFEELAKAIAGKGNYCSKDDSGMFAYRFNYSMSTDVPGCPVSAAIISAINSSPALDWEEDLCSIYTKGNGKTQEQIVNDVWHALFSFGNDEKLTEWLSGALQIDEKAAGTLSKFNIPQGYASLSLKAINKIIPWLKRGLVYSDAVFFANLAEVLPKNVIENKDRLSDVEENIRILLDGQTVDGKDSLTSKYKNIYDYLLGVDANVNANRLYHPSQIDLYKPALPDENGQIRLGSPRTNAFKNPMAMRALFRLRKLINALLSEGVIDPKTKINIEFARGLNDTNKRKAIQDYQKNQEALRSQDRQAIIALFKSEGIEYEPSAMDLLKYRLYEEQNHRCIYTDKQITPRMFLGSATEFDIEHTIPRSRGGDDSQMNKTLCDSRFNRDVKKSCIPSELENHAILLDRVSEWKNKVEELDKQIAFCRRKSKHASSKEEKDNAIRRAHFLTMERDYWRGKYDRFVMDKVPEGFSNRQGVDIGIIGRYARMYLKTVFNKIYVVKGATTADFRKAWGLQSDYEKKERVNHSHHCIDAVTIACIGKNEYDAWAKFMKQDEEYRYGRGKRPIFEKPWPTFTEDVLAITSELTVPHYTPDNMSKYAKKKLRVRGVIQRNDAGEIKYARGDSARGSLHLDTFYGSIKVNDEVKYVVRKSLDSLKDSDIDKIVDETVRDKVKAAVEKHGSLKKAVAEGVWMNETLRIPINKVRIFVPSVTNPISLKKQRFKSTKDYKQNYYVANDSNYCMAVYGMKKPSFKLLNALEAAKMINGKREILIPQSDDKDNPLRFVLKMGTMVLFYDNSPAELLECDMSELSRRLYKVTGMSVNIVQSNRYGMVELTHHLEARPYSELKRKNGKWQIGEDIRPKVVLTHHQLNIWVEGVDFDISETGKITFKPHPVW

SEQ ID NO: 9993 - protein, 947 aa, unidentified
  REGION 1..947: note = Description of Unknown: Cas Enzyme sequence
ENNKLPDCFSETFAKIKPFKKDYGSYSEKAIKKLLPLMSMGKYWDENNIDKHTLERIDKIITGEYDENIKNRVREKAINLTDINHFKGLPVWLACYIVYNRHSEAKEIAKWEHPEDIDTYLKTFKQHSLRNPIVEQVITETLRTVRDIWKQEGKIDEIHVELGREMKNPADKRRAMTERIQQNENTNLRIKAMLAEFMNPDMGIENVRPHSPSQQDILRIYEENALENLSKDDKEYDFVSKISKSAQPSKSDIIRYKCWLEQKYRSPYTGEVIPLGKLFTPAYEIEHIIPQSRYFDDSFSNKVICEAEVNKLKDRQLGYEFISSHNGEKVQLSQGKVVEIFSVEAYEKFVKDHYSNNRPKMKKLLMDDIPDGFIERQLNDSRYISKVVKGLLSNIVREKTDNGEYEQEAVSKNLISCNGSITDRLKKDWGMNDVWSQIILPRFQRLIQITGKTCFTTHNSEGHERPNMPLELQKGFNKKRIDHRHHAMDAIVIACATRDHINLLNNEAAHSKNNANRYQLQRKLRRFEKITINGNEKEIAREFLKPWETFTVDAQHTLENIIVSFKQNLRVINKTTNYYQHYDENGKKVLRPQQKGDSWAVRKSMHKETVFGEVNLRFIKTVSLADAVKKPECIVNKDFKKKVYEFLSEGRDAKYIKKYLEDNKDVWSDINISKIEVYYYTKDTKERYFATRKPLDTSFNKKTIEESVTDTGIQKILLRHLEAKNNNPELAFSPDGIDEMNKNIVALNNGKFHQPILKVRKYEKAEKFAVGQTGNKSKKFVEAAKGTNLFFAVFATEKQNKETGETESVRSYLTIPLNVMIDCQKQFGTQWKKNIEHFLKEKNIVDNDASLLFILSPNDLVYLPSFEEMKNGIKNVDKNRIYKMVSSSGSQCFFIDEKVAKTIVDKVEFSSLNKAERAITGEMVKETCIPIKVDRLGNIIELNGQKL

SEQ ID NO: 9994 - protein, 1199 aa, unidentified
  REGION 1..1199: note = Description of Unknown: Cas Enzyme sequence
MEIGNKQRILGLDTGTNSLGWAVVDRLPEGGYELVDKGVHIFPEGVNVEKGTQEKSRAAERTEHRSLRKQYWRRKVRKIRLLAVLSNAGLCPPLTSEELHMWRVDSTYPLANEAFMRWQRTDENKGVNPYAARCQCIERELDMENKNDRYLLGRALYHIAQRRGFLSNRKDQADDKETGVVKEGIQELTKKIHDAGCEFLCQYFYQLYQRGERIRNFYTDRKEHYEKEFEAICKKQHLNEALVAELHKIIFVQRPLKSQRRGIAKCPFEPSKHCAPISHPLFEEFRMWSFIRNIKVQTPVDTDLRALSADEIIKIQHLWFRKSKPNFHFEDIAKTLAGKANYCYYKSAEAKPYRFNYYLDSNVAGCPVSAQLKDIFGEDILQKRETIDKIWQALDFYTDDLKLREWGIKHFNLSDEQADALVKIRFPQGYASLSLKAIENIVPLMRDHAMSYTNATLIAKLRDLLKGYDFDEEVDAYLINDIEDYLTIPTDKNGKPQITREERKQILENKWKEHYHLSDKDLQKFYHPSMIEEYSKVENKTNGVYQLGSPRTSAFKNPMAMRALFRIKAVVNQLLKEGTIDENTIVHIEFARSLNDANRRAALRDYQRNLRAERENAIETIKDLVPNPSETDILKYLLWKEQDKKSIYTGEDIPLPALYKTKDYEIEHTIPRCMGGATIRENLTVCEASFNHDIKKTLLPSQLPESRQAIILERIQPWKEKYESLAKQVRRMETSPRKRLLEMQRDYWRDKYEAFIKEEKDIQGFTRRQGTDISVISRYGRLYLLSLFNRVDVVKGAMTAEFREAWGIQEAYQKKDRTNHVHHCIDAITIACMGKREYDEYTAICRTNEEHNTKLIIPKPWIGFTEDIKNIEQEILVAHYTANPMGKQTRKKLRNPQGRIIRDQQGKPLYTTGDTARVVLHNDMIYGKIMNSHDIDSKHPSGKICTVKRIPLVDVKIEEVVDPVVKQVIASAIAKYGNIKAAIEAEQENNDGSIWLNKEKNVKLKTVRCFQDFASGAASIRALRDISAKEYKRFHYSRPDGNYVAAIYEGTDNKGNKKRTSVIVTNFDAAKAFNKHQPIVPETSEEGYALLCTIKKGDLVLLYENSSEELRNASQTELSKRLYRIVKMYDSGGLQITIRHHQEAREATKLKELYGNPKTGLFDSSQEVFPQRRLSYNQLNAFVQGQHFELTETGKIIFK

SEQ ID NO: 9995 - protein, 1049 aa, unidentified
  REGION 1..1049: note = Description of Unknown: Cas Enzyme sequence
HYSTKNVVFYRQDYLDEFERIWESQKKYHKELTDSLKAEIRDVVIFYQRRLKSQKGLISFCEFEKKKIPVNVDGTIKYKIRGCRVAPRSSILFQEFKIWQTLNNIVIIDRGDESARSLSQEEKELLAKELKIKRKLSSINVLKLLKLNARQKEMNFKEIEGNATICSFFEKFIDIVNVSGHGEYNLVKMLYDDAYTVISEVFSGLGFNTDFLDFDSTLEKEAYEQQPMFKLWHLIYSYEGDDSPTGNASLIDKISQICGLPKEYASIVSEVKLLQDYASLSHKAIRNILPYLKEGNTYDLACLLAGYNHSHSVTAEEREKMELVDVLPIIPKGELRNPVVEKILNQMVNVVNQVSNTYGKPDDIHIELARELKQSQKEREAATQSIESNSKRNAAISKILMDEYGLPYVSRKDIIRYKLFEELKDNGYKTLYSNKYIPKELLFSPNIDIEHIIPQALFFDDSFANKTLEYRDVNLEKGSMTAHDYVLTKGADAYEEYKARVDDLYARNVISKTKRRYLLMSRSEIPEDFINRDLRDSQYIAKKAKEMLESYVRTVVSTSGSITKELREQWQLVDIMKELNLPKYEQLGKVTIRERGDGNKVKLIDDWTKRNDHRHHAMDAITIAFTKPQHINILNHLNATKDESSQYYGYSRNIAPPMPVAEFRQACKKELENILVSIKAKNKVVTKNINKTKASGGSYKRTVALTPRGSLHKEQVYGLRMVPDITLVPINAKMGYEVVASVISPFERKALKARLDLFGGDAKLAFTGKNSLEKNPITVQSNGKEYTLPNKVMCRTYKRMYSIRKEIGPDLKVEKVLDPGIKAILSERLKEFGGDQRKAFSNLDENPIWLNYEKGISIKRVTIVENYDLSAIRDKRNKEGRKMLDSKNNTIPSDYVNLRNNHHVVIYEDAEGNYQEDVVPFFKALQRVTSEDPVIDKTYKKDQGWKYVMNLKVNEYFVFPDPDSGFFPEEVDLMDENNYSKISPNLFRVQNLSSKDYSFRHHLETESSSKDVLLKDITWKRITSINQLKGAVKVRINHIGQIVAVGDYD

SEQ ID NO: 9996 - protein, 995 aa, unidentified
  REGION 1..995: note = Description of Unknown: Cas Enzyme sequence
VDKIRIRANNDYNPIRNQLKKEIHIIFKVQNLDTEGELYKGLMSEKKHEGTIFYKNPLKSQKGKVEYCTLEPRKRKCAKSHPANEFNVAWQLLNNIKIKRENGWENISLDIRKAIFDKLFVRNKKHFDFVEIRDLLQDEYGIQLEYKESINYSDKKSVPGCPVTFYLQKILGSSWETEKIQGNKKHLKQAQRRKKQFDKDDNRNLKEYTEAEGHLTEYTYEDIWHICYESDEKQFVKDFAKDVLGLTPAIVISMGALWENIQDGYANLSLCALKKINPFLAKGYKYSDAVMLANLPTIMGGAFFKQNEQDIVNLIDEEKAAISDANRIYDIANKLISDYKALKMEGYAFAEHADHDHILQEDDIADVKKACEENYGKVWNAMTDELQSSVITRVADLYQEFFFSKERDYYKRINLADTLKTALAEKYPSLTKNKLKKLYHHSDNAYYPSAQINDAGVLQLGSPARGNLRNPTVLKVLYKIKQNVNKLLLSGDIDSETIIVVENAREALNDFNMRWAIEEYNSKRERENKAIEDALNDLAKEFHFTLPKECVPMARLALYQNANFTPYNPNESRRLYDKLCEKYKLWLKQGFFDFYTGRPISLSELFSPDNLVEVDHILPISKSFDDSISNKVLSSSRYNSNIKGIKLPCELPNYSVDTAEGTAIIHRIDEIREKVKYLEEKVFYWKGRSSRAADPDSKNSAIKQMHLWQMEYDEWNQRLTNLTAKEITPSFRNNQLNDTRTISKYAYHYLKSVFGRVVVQRGETTAVFRKMFGFQEAYEKKDRSRHTHHAIDALTLSLIPYGPKREKMMVLWYQIQEAHRFKDYVQERQLKDRLEREKALCGLGRYSPDEVVRYIEENTLVRNDATNHALTKNIKRYRVRGKVVPLRDENGNIVYEKTAKGIVRVKAKHVSQGNSIRGAIHDQSFYGKIEKWKDDGSHEKEELYVIRRKIEYKAGNVGSGFKSWDDLEKQMVDKKLFKKFKKQHQDKSFKDACAE

SEQ ID NO: 9997 - protein, 933 aa, unidentified
  REGION 1..933: note = Description of Unknown: Cas Enzyme sequence
IEVEVDGKKKTKTIGLRVCPKSSPLFQEFKIWQILNNVQVTGKIVPNEQTDLFGEVEVFKVGKRFLFQEEKEKLFAELNYKEKMSKAEVVKLLFGNEKGIDLNYKELEGNCTQAALFKAYQTIIEMSGHGEYDFSKIPSAKAVEIVSEVFAGLGFNTEILSFDSSLEGKALEQQPMFKLWHLLYSYEGDKSELGNHKLIEKLSDTYGFDKEYAIVLAGVVFPSDYGSLSSKAIRKILPHLKDGLDYSVACEYAGYRHSKHSLTKEEIENKILKDKLELLPRNSLRNPVVEKILNQMINVVNEIITEYGKPDEIRIELARELKKSAKEREEMTNDINKTTKLHEEYVKVLQGEPFYLEHVSRNDIIRYKLYEELKFNGYKTLYSNTYIPKEKLFSKEFDIEHIIPQAKLFDDSFSNKTLEVRQVNLDKGNATAYDFVAERYGEQGILEYENRVESLYNNKVISKTKRDKLLMKEADIPSGFINRDLRDSQYIAKKAREILEEIVRFVVPTTGSITDRLREDWQLVDVMQELNWDKYNQLGMTEIIEGRDGQRIRRIKDWTKRNDHRHHAMDALTIAFTNRSYIQYLNNLNARVQKGVDDYIDLDMVELSKLNPEERASAVYGIEKKELHRDSHGKLRFNSPMPLDEFRAEAKKHLEGTLVSIKAKNKVVTQNVNVSKMKVGKHKKVQLTPRGQLHLETVYGSSKCYVTKEEKVNASFNVEKIGMVANNQHREALMNRLQQFDNDPQKAFTGKNALEKNPIWLNESHTKKVPEKVKLVGFETIYTIRKEISPELKIDKVVDVHIRQILQLRLDEYGGDAKKAFSNLEENPIWLNKEKGIAIKRVTIKGISNAESLHDKRDKDGNLILDERGNTQPVDFVNTGNNHHVAIYRKPKLDKNGQQMADEDGELLYELDENIVSFYEATTRARMGVPVID

SEQ ID NO: 9998 - protein, 1417 aa, unidentified
  REGION 1..1417: note = Description of Unknown: Cas Enzyme sequence
MGQKILGIDLGTNSLGIAVRDMDKDGNIADQLEYYSSIIFQSGVGTGQSGEFSFAAERTKFRSARRLYQARKYRIWATLRLLIAHKCCPLTDNELDRWAKYDKSKGLKRQYPTDAIAFEQWVRLDFNGDGIADYRSPYQLRAELMEQELDWNNPSDRYKFGRAMYHIAQRRGFKSSKGETLQESKKVNDNSSLDIVNAMKKSEEEKSKLLTEFMEKNHLETVGQAFAKLEENGIRIRGSKYQTVQAQLRKEVEAICSHQHIDTLDSELFHGLLSTKQGEGTIFFRRPLRLQKGNIGHCTLERSHRRCPISHPDYEEFRALSFINNIKFRPESNDEWHTLSDTDRIALFNDIFTRTKTTFKFEDIRKWLEKKYHNNIFNYKERTINYPDHTTVAGCPVISRLKKILGAEWNTSSIETNKTRTHLGSGETHTITYNYIDLWHITFSADDYEELEEFAANKMSLTESQRNELIKLWDTIAQGYAPLSLKAIRNILPFLRKGMIYSDAVAFAKIPDIIGPDCWKRDADSLISKLQDLSHENNRLRREYKIANTLIADYKMQCLENHPAHRNTAYKLDNNDKADVLKCIKETLSEKQWENLSTEEQQTLTNDIEHLYQTFFASSKRDYYELPKQSDAFKKHLTSTYTDIPQKKWDKLYHHSQFDLFPKQQEQIIDMGDRMVCTPLLGTPDIGSIKNPVALRALHVLRHTINELLKQGIIEDKNTRVVVETAREMNDANWREAIKQYQNKREKENDAIIEAIKEFRPNYTDSDIEKGRLLFEQSEIPDLKKKQLKETDKTPRKEKETAKFFAVDMQKYKLWKEQEFRCIYTGDIIKLSDLFDDNTTQIEHTIPRSISFNNSLSNRTVCFTYANKQKNNRIPSELSNYSDIMERIKPWAEKVEHIKKQIELWKGNTKTAATIERKNECIQQRHMWELELDYWQAKLRTFTIQKDELNTGFLNSQLVDTRIITKYAFHYLKSVFDRVDVQKGSVTATFRKILGVQSTDDKKDRSKHSHHAVDAAILTLIPTADKRDRMLELFYRLQETPDAEKHTTHGELKKLIASCRIGSIDKLVDTIERNILVNHISKDQTLTPAKKKRYIGRRKNKDQWLQGDSIRGSLHKDTFYGAIETHKDEIIMVIRKPLDSLGLKSNKPIKEYADEHLESIIDPTVRESISIQVKKYMQTKGVIFAHALKEPMYMLNKNGEPITHDKNGHPISPIRHVRCRAKAGVGYIKKETVLPIKEQTYLSNKDYKNQYYVQTDDNYLCLFYKGIFKGENKRAFRIINYFDISKLNITDTNALFSISEFSEYKQNPLIHLKAIIKKGTRVLFYNTYPEEVQDLDNDALSKRLYIVQKFNAAPTAYLYLYQHIEARDETKMDSSEKGKEYSPGHIPAYIRCKADNFKALIEHYDFEVDTLGNIIFK

SEQ ID NO: 9999 - protein, 1518 aa, unidentified
  REGION 1..1518: note = Description of Unknown: Cas Enzyme sequence
MKKILGLDLGTNSIGWAVVNADEVTREDGSTYLKPNGISAAGSRIIPMSADILGDFEKGNTVSQTAERTRLRMARRLHERALLRRERLLRVLNLMGFLPKHFASKISRYGKFTDDSEPKLAWRKNADGKYEFVFQEAFNEMLEDFEKNQSELVADGNKIPYDWTIYYLRKKALSQRISKEELSWLLLQFNQKRGYYQLRGEEEEQSQDKKVEYFALKVVKVEATDQKKGDETWYNVYLENNFIYRRTSKYPLDWEGKIKEFIITTEVESDGVTPKKDKEGNAKRSFRAPKEDDWTLLKKKTEVDIEKSTKTVGSYIYDSLLNNPKQKIIGKLVRTVERKFYKDELTKILRKQIEFIPELHDENLYKKCIEELYSVNEAHRNNIAKPDFINLFINDTLFYQRPLKSKKSQIGNCPYEKHFYKENNEIKTAPIKCIAKSNPLFQEFRLWQFVQNLRIYQREKEIDGKLWTDVDVTNEFLKSEDDIVKLFEWLNDRGAIDQDGLLKSFFKIKKEKNKDKYPYRWNYVEDKQYPCNETRASILTGFSKCKIDSSILTKETEESLWHILYSIGDKIEITKALKKFAEKYGLDDCFVNVFSKIKPFDKEYGSYSEKAIKKLLPLMRMGKYWNQNNIDTNTLDRIDKIINGVYDEKISNKVRDFAINLKELNQFRGLPIWLACYIVYNRHSEAKDCAKWEKPADIDEYLKSFKQHSLRNPIVEQVVTETLRTVRDIWKQEEQIDEIHLELGRDLKNPADKRKKMSENILKNEKANLRIKAMLMEFKNPDMGIENVRPHSPSQQDILRIYEENALDNLSKDDKDFDFISKISKQAQPSKSDIVRYKCWLEQKYRSPYTGKTISLSKLFTSAYEIEHIIPQSRYFDDSFSNKVICEAEVNKLKDRQLGREFINNHHGEKVQLSQGEVVEIFSAEAYEKFVKEHYGNNHVKMKKLLMEDIPDSFIERQLNDSRYISKVIKGLLSNIVREKADEDGFEQEAVSKNLISCNGSITDRLKKDWGMNDVWNSIVLPRFIRMNEITHKDCFTTTNAEGHLIPQMPLELQKGFNKKRIDHRHHAMDAIVIACTTRDHVNLLNNEAAHSKSNANRYQLQRKLRRFEKAIIDGKERDVAKEFLKPWDSFTTDSKSVIENIIVSFKQNQRVINKTTNFYQHFDENGKKVLVKQEKGDSWAIRKSMHKDTVFGEINLRKTKSVSLSEAIKLPERILNKKIKEKILELKNNKVDVKNIKKYIEDYHIGGYGVEMSKIDVFYFTKETKERFFATRKALDTSFNQAKIEDSIADSGIQKILLAHLKRKKGDAEQAFSPDGIDEMNKNIVELNGGKFHQPILKVRVYEKADKFAVGQKGNKNVKFVEAAKGTNLFFAIFEKEGKRSYLTIPLNVMIDCQKKYGNQWKNNIESYLKENKLTGNDVKLLFVLSPNDLVYLPTTEELNNGLNNVNKNRIYKMVSCGQIQFMCLEHHVSALIADKIEFSTQNKMERAITGEMIKETCVPIKVDRLGNIKELDGRRL

SEQ ID NO: 10000 - protein, 1456 aa, unidentified
  REGION 1..1456: note = Description of Unknown: Cas Enzyme sequence
MKNILGLDLGTNSIGWALISFKEESDSTPAIRLGSRIIPMSQDVLGKFDSGVTESQTAIRTGFRGMRRLRERCLLRRERLFRILHTLGFLPQHFDQSIGWEKSITNTYGKFKDNSEPKIAWEKDENGKMHFIFMDSFKEMLEDFSHYHTIPKDQKIPLDWTLYYLRKKALTQPITKQELAWILLSFNQKRGYYQLRGEDEEEEKTLKKEEYFRLKVTDVEVTNEKKGNDTWYNIYLENGWVYRRSSRISLEDWKGKTKEFIVTTQYEEDGSQKLDRDGNPKRSFRAPSADDWTLQKKRIEADIESSGKTVGEFIYDAILDNPGEKVRGKLVRTIERRFYKQELHTILRKQAEFIPELKDKECLEKCIVELYASNKAHQDSLRRKDLIYLIAEDLLFYQRPLKSKKSLIADCPVEKYEYVDKKTGEIKIQHIKCIAKSNPYYNEFRLWQFVQNIRLFNREGIHEIDVTERYLASWEDRKKLFLFLNNLKEIKQDTLLKEFFHLKKPKGKDSKYPLRWNYVEDKAYPCNETRHLLLSSLKKANVNEDLIAEKSEEYRLWHLLYSVDDKEELLKALKSYAKQKGLPVTFVEVFKKLPPFKKEYGAYSEKAIKKLLRQLCEGVNVREACINEYGSIPDNQEVTRWSTPDNLQSFINGFKQYSLRNPIVEQVVLETLRTVHDLWNEYGHIDEIHVELGRSMKSTSDQRRRDTERILQNENTNLRIKMLLAEMKNDSTIKGVRPFSPMQQDILRIYEEGALQTLSREDADYAEISRISSIAMPTKSELQRYKLWLEQKYRSPYTGKTISLTHLFTSAYQIEHVIPQSRYFDDSFSNKVICEAEVNSRKSNMLGMEFIKKCGGEIIHCSALGDVKVFNENEYEAFVKKHYASNRAKARKLMMDDIPEEFSNRQMNDSRYISRVIMALLSNVVREEGEEEPTSKHLIPCTGGITDRLKKDWGLNDVWNNLVYPRFLRMNEITGSDAFGHWEDKDGKRVFQTSMPLELQRGFKKKRIDHRHHALDALAIALASRNIVNYLNNESARDTQRREDLRQQLCDKNRIIKKPWPTLTQDAERALREIVVSFKHSVRIINKASNYYEHYNDDGKKVMRKQHSADQWAVRKPLHKETVYGRVNLRRIKDVAFSKALDTPESIVDKSLRKAIITMMNAGLDKKKVNAKFKSQNYIYLGKDYSKVEIFYFTDNTEQLVATRKLLDDSFDEKKIMAITDTGIQKILLTYLAAKDNNPKLAFSPEGIMEMNENIRKYNGDKDHKPIVRVRVSEPKGEKYNIGISGNNSKKYVEAQSGTNLYFAIYEDQDGKRSYQTIPLNVVAERLKQGEAPVPETNENGIPLKFYLSPNDLVYVPTEEERPVPIEKLQIDRIYKFIDSSGTTANFIPNHSAAIIYHLPKELAKLYSNNGTTIQDEYGVGSPQSKNQKALTGEMIKSICWKLEVDRLGKITKVIR

SEQ ID NO: 10001 - protein, 1219 aa, unidentified
  REGION 1..1219: note = Description of Unknown: Cas Enzyme sequence
NNKSEHNPRLVYLAISYILAHRGHFLLDVGEDNVSQVTDFSVIYQELINWFESVGIQAPWSSSSEEFSKSLRECKGTSKKIESFKTVIFGGKFPSDIEFGDDEILNYISVKCLIELICGKKIKVSDLFKKEDYKQLEKDSITVSSAEFEDDLDVLSNEINDYEYDLLAIAKRMYDWSLLVDILKGNKYISQAKIEVYDKHRSDLRTIKYFIKKYAPNRYYEVFRKVGKDSNYTSYSYNVKNYGNEPLPKDFKMCTEEEFCKYIEGVVKTFESDVEEHDRDAYQCMKEDLATRTFCPKQMTSDNRVIPYQLYLVELKAILDNASDYLAFLNEEDEYGSIKNKIIDLMTFKIPYFVGPLNSNSEFAWIKRKSEGEIYPWNFEERVDLDASEEAFIKRMTGKCSYLAGEDVLPKSSLLYSKFMVLNEINNIRVNGIKISVEAKQGIYNDIFKKTSRVTVKKLKDYLISNGYMQQEDELSGIDITVNSNLKSYIDFKHYIESGLLKERDVEAIIARITSTTDRRRLYTWLETNYKLPEDVIKKIVKFKYSDYGRLSKTFLTEMLDLDVTTGEVRRSDNIISMLWDTNENLMMLLSSDYGYMDNVSKFNKEYYEVHPRSLDSRLKDMYISNSVKRPILRVVEIVDELRKIMGSDPNKVFVEMARGATEAQKNTRTKSRRDQIEELYDSYKNNPEYRSEVDRLRNELLNKSDGELRSEKLFLYFTQLGRCMYSGEPINIDDIGNNKIYDVDHIWPQSKIKDDSLDNKVLVLSKYNGEKGDNYPIKEEWRIKQYGFWKALREKNLISEEKYNRLKRNTRFTDEELASFINRQLVETRQTTKAVAAILEDRLKSSKIVYVKAGLVSNFRQIYKDEYFTLKCREVNDLHHAKDAYLNIVIGNVYHVRFTENPLSFIKSGEKYTLNLDKILEHDVVRGEEVAWKAKNDEWFNRVIATIHKNNIRFVRYSYCQKGSLFKVTPLRKGYGQVSIKKDKVIERYGGYDKPINTYLKLERREYKGSFETVLIPVPLHLKNSVVGNYNSDVIQGNRIIKYNTLLEIDGYRVHISSVTGNNIQVKGAMPLKISCEYEQYIKRIVSFLKSGLVGNVNDGFNGISSERNIELYDVFLTKLERGKYLTLNDRPGDLIRNKRGVFLNLSLEDQAKVLLNILQLFSSNPSGKDLSLIEGPSQAGTQKISMYSHNWDYKEVYVIDQSPTGLFEKKSTNLLEL

SEQ ID NO: 10002 - protein, 1477 aa, unidentified
  REGION 1..1477: note = Description of Unknown: Cas Enzyme sequence
MENILGIDLGTNSIGLSLRNPQVSRNIKDQLEYFTSIIFPSGVGKGKSGEFSFAAERTRHRSTRRRYQARKYRRWNTLKLLIKNGYCPLSLDDLKKWSKYYKSQGLKREYPIHATQFEQWIRLDFDGDGKADYSSPYELRAQLMKEQFDFSEIINKYKLGRALYHIALRRGFKSSKGETIKEQEAHEEYGIGNSDITKALKKSEKLKKEKLSEYMDRYHLPTVGCAYDHILKSGIRVRNSEYQAVRSQYKDEITKIFEFQNGLDSNSEFYQGLVSEKKIDGTIFYKRPLRSQKGLVGKCTLEPNKYRCPISHPDFEIFRAWCFINSIRFGKDLKESLTLEQKEQLFKEKFLRTYTFKFDEIRKWIQNRTYTALDFKNKTINYKDKTSVSGCPISGRLKNLLGDNWDKWVKTGEIKIIKKKKDGKEIERLVKTEYSAYDIWHICFSFDEPEYVEEFAKKKLHFDESQTKQVVQLFGAIQQGYSMLSLKAIRNINRFLQNGLIYSDAILLAKLPDIFKDKWSISKEDIINNIDTIIKQNKEQKQLFNIVNTLIANYKSLNYDDETQTYERFADHDYDYKLMESDYEDIEKVTINAIGEHTWSKKSFEERTHIKEEVARLYQNFFSSRERDYYRLPKVADALANYLHEHYEFLSKKDLNKIYHPSMIEFYAPAKEQRLEDGRWMKLLGSPVIGALKNPMAMRVLHTLRKQVNAMLKESLINAEETRIVVETARELNDANMRWAIETYQRERNAENGEYKIAIAELFNDSDFNGSADPNNKDDIDKLRLWAELINSDIVSKLDSKGKPMCNTEEQWKTFGKTTTKLLFDIAKCKGDAIKKYRLWKEQECRCIYTGKFISITKLFDNNAFDFEHTIPRSMSFDDSMANLTICDAHYNRTIKRNQIPTQLANYENNANGYGAIRPRLQPWIDKVERLKDNVDFWKAQSRRAQDKDRKDHCIRQCHLWKMELDYWKNKVERFTMTEVTTNFRNNQLNDTRIISKYAYHYLKTVFNKVDVQKGKVTSSFRKMLGVQSIDEKKDRGKHSHHAIDATILTMIPAAAQRDKMLELFYKIQEKERFNEDVSNLKKELIKERAKSNLTGNISEIVPFIEDNILVNHISKDQTLTPAHRRKRIRGRIIPKKDSNGNIIYETDKDGNIKKNRYGHPIPLAKEWITGDSIRGQLHQDSFYGAITQWKKDKEGRVIRNKDGMPIPDEENLLYVIKRELKYKASSIDSGFKSWEELENVIVDKALFQIMKKQFPEGTSFKDACNIGIYMYKKNNKDEFDYSEQYRVGKIRHIRCKTSIKNPLNIKKQTYLSNKTYKHQYYADMGDLYALCKYESTDKKEKEFHVYSLFEICENRRMGDEEIPTSIESKKKHILFLSHRLIKGDMLLIYKDSNEFLNEMDHTMLSQRLYIIKGFEKDGRIILQKHINAQADKELGKGESIKDFSNMPEKIRCSINTLNYLIQKKDFEITPQGIIFK

SEQ ID NO: 10003 - protein, 1337 aa, unidentified
  REGION 1..1337: note = Description of Unknown: Cas Enzyme sequence
LSRGIYMKTNGNDQTTGNYYLGLDVGTNSVGWAVTDKEYRLLRCRGNDMWGARLFEEAKGASARRAQRVSRHRLERRRQRLQLLELLFAEEIGKRDPGFFLRIEESAYWLDDKTDKLCRFALFNDPDFTDKDYHRRYPTVYHLRRELIESKEPHDIRLVYLALHHILKSRGHFLYETGEDGGEVRTAADTLRELKHYLETECQQPLEFRDEPGFIAALLQTGIGITAKKRLLRVAWNGTDGEEDMIRISALLDLLSGAKVKLALLFNDESLALAEPASISLKADLDEQFDALSTVLGERAELLVLAKNVFDAARLTQMLGGCKTISEAKVALYEKNGRDLRALKRYVRAVLPEQYKEVFSEKKEKLNNYAAYCGYKNRKGAYSCTQENFCKYLSAVLPKPDGNDETMTRIWQEIADASFLTKLRGTDNGVIPYQLQLQELRRILENASAYLPFLNERDQDGHTVRDKIEMIFIFRIPYYVGPLNPKAGHCWSVRFPGEEETRVFPWNFSRVIDTEASSKAFIENLIGRCTYTGEYVLPKDSLLYSEYMLLNELNPMRINGKPLPHEVKSSLIRDLFMGSRKKVTKKRIRDYLLCGGYMQAEDEITGIDDQIKTVLKSWHDFRHILENSGDRDMVEEIIRHLVIFGEDRNMFKSWLKRNCRTLGDEDVQYICRLKYTDWGRLSQTFLTEIFSADPDEGTGEAHSIMDMLRNTDCNLMQLLSDQYDFFQNAEAHRRELFGSGQTMTEMLNDLYIAPAVRRSIRQTIRIVDEIVDIRKSVPEKIFIEMARGSAQEMKGKRTESRKEKLLVLYAACREESASLLPQLEREDEERLRSDKLYLYYTQFGKCMYSGEPIDLDALMSGQGFDIDHIFPRSRIKDNSLDNRVVVKNTLNREKTNDYPIKSDIRNTMRPFWQLLKSRGMISEKKYDRLTRASELTDEELSSFIARQLVETQQSTKALTSILRKTYGDKTRIVFSKAGNVSDFRHDFDLLKCREVNDLHHAKDAYLNIVVGNVYCTRFTDRFFANIRSENYSLNRVFDYNIPGAWTVGETIKTVRRYMEKNNPIITRMPWEVKGQLYDLQLMKAGKGQLERKQGLPVERYGGYNKLTGSYYFVAEHTLKKIRVRTIEPVYLYREAAYRKDPVDYCKTVLHLQDPIIVCKEIRADSLLEIGGSRLYISGRTGDYYVCEHAYQLAVDKTTELYIRQLQKYTERCAARRTELPITPYDGIIEEQNLQLYDLLVNKMEANVYRDLLGNMKQDLVNSREAFCRKTPAQQARLLLEILKAFRCNAQNANLKELCGKGTVGRITISKRISGCGKAALVHQSVTGLYEVREDLLK

SEQ ID NO: 10004 - protein, 927 aa, unidentified
  REGION 1..927: note = Description of Unknown: Cas Enzyme sequence
MNKKVYAFDLGKASIGYCARDGFNILELGSLIINKDHAEVVSNRDRRRAYKTLQAHKSREEFFIKLWQDCGLPVLEKNDKRFTIEFSKEKDETLYNSTLLRITLLQEKPLEVWQIYKALHSAIQRRGYDANIRWANDSDDEKENQERVTKYTQDENGIQIITNDAYKYPCYYDAVRLGLWDEKNPLEYKKHIPLQGVTKVRTTGIVAPRSFVEKELTQLYINAQKQLPQLEKYSVNYFLYGKYGKAYATFHKQEQGKEKDYGVLGQKIPRFDNRIIAKCKLLPKRNVCNAGTIENVSFTLLMKLKNLRFTNANGERCMLDSSAIKEVYENWLKKANKDNEIKLDTTITKKEIENVIGFKIQDKIEPMKTNISGRSSFCRRACQIMNKIILEGIENPATMDVAEFTDNVDSPNGITEQEIREMLSKIGTWENLYIPDNRYEMAELSSDDRQKTDLLIGNITNPIVRNRLQILRDKLLELKAEHGTPDEVIFEFVRDGADNSLYGAKKANGYLKNIKENEKENNEIKKELEEANAYSPTNFEKLKLLRMQCGKCVYSGKNISINDFDSCEIDHVYPRTMGGNDALYNRVLCYSIENQNKAGRTPYEWLSSDKELWANYVARLNDIKGSLGKKKFELLTSKPEVCEKLIESYNGLAETAQIARVAQQLAAFIFGWGMQTEGDKRHLFINNGSTTAAIRRRYGLNKLLGDDIKKNRENDKHHALDAICISFSKDFKYDHKSKKDIIEGFTYDFVKNEIDKLIPYPYANDKPFKGNTRPLETIYGYRKYGDKNYLTNRVDITSIEQKEKKIKTIVDEVIKNDLLEKLNLSSGDWAAMLKNYKHPKKHTIVKKVLTIVSEGTITTDSNNKSRMGEYADFGNKGVKNQFKHSKGHKGQILYYNEKGAVKVMPIYANQKLSEVKEKLLAMNCKLY

SEQ ID NO: 10005 - protein, 1453 aa, unidentified
  REGION 1..1453: note = Description of Unknown: Cas Enzyme sequence
MKRILGLDLGTNSIGWALVNEAENTNEKSSIVKLGVRTISYDNYVSTENGKESKDPVKDFCGGKGISSNAGRTTKRGMRRNLQRYKLRREFLIAVLKEHGFINDKTILSENGNRTTFETFRLRAKAATEEITLSELARVLLQINKKRGYKSSRKAKSTDEGQLIDGMEVAVQLYERGLTPGQYSYQLLKQGKKKLPDYYRSDLRSEFNTIWAEQSLYYPELLTEQLKTELEGKNKSQTWAICAKTWKECGQSIVGEKRTTKGFEQRKENYKWRSAACSEQVTLEQLAIVLQDINGELSNSSNYLGDISDRSKELYFNKQTVGQYQMAKLDKDPNYSLKNKPFYRQDYMDEFETIWETQSKYHQELTPELKKELRDIVIFYQRPLKSQKEQIALCEFENRNIEVEIKGKKKTITIGLRVCPKSSPLFQEFKIWHTLNNVTVSGKIIPIQQRDLFGNAESFKQGKRFLTQEEKEKLFEELNYKARLSKEDILKLLFSNHKELSLNFTELKGNDTQAELFKAYQTIIAESGLGEYDFTKMLSKDALIIIKQKFKDLSINTDILNFDSSLEGKEFEHQPMFLLWHLLYSFEGDDSKMGNEKLINKLHELYGFSQNAARVLANIAFPLDYGNLSSKAMRKILPYMKEGNEYSVACQYAGYRHSQNSLTKEEIENKTRKAKLDLLPRNSLHNPVVEKILNQMINVVNAIINQYGKLDEIHIELARELKKSAKERKEMTDNINATSKLHEEYREILQKEFGLSHVSRNDIIRYKLYRELEGNGYKTLYSNTYIPQEKLFSKEFDIEHIIPQAKLFDDSFSNKTIEARQVNIDKGNMTAYDFIESKYGEDGLESYKIRIEKLFKSKAISQAKRNKLLMSEANIPSDFINRDLRDSQYIAKKAREILETIVKVVVPTTGTITDRLREDWQLVDIMQELNWEKYAKLGMTEIIEGRDGQRIRRIKDWTKRNDHRHHAMDALTIAFTKRSFIQYLNNLNARIQKGVDDYIDLDMVELQDLNKEERASAIYGIEKKELHRDNHGKLRFNPPIPLDEFRVEAKRQLESTLISIKARNKVVTRNLNVSKKGNDTNQIIQLTPRGQLHQETIYGRIQRYNKKQEKINGSFNKDKIRTVANKYYRAALFARLQQYGGDAKKAFTGKNSLEKNPIWLNETHTKRVPECVTTFETIYTIRKEISPELKIDKVVDKHIKTILEERLRKYGNDAKTAFSNLEKNPIWLNEEKGIQIKRVTITGISNAIALHDKKDKDGNLILDKEGNKQPVDFVSTGNNHHVAVYRKPRLDKNGVQIEIDGIPQYDLDEQVVSFYEATARVMENLPIIDKAYKKSEGWQFLFTMKQNEFFVFPRYDENGNMVFNPKDYDEEWYKNPDNYATISPNLFRVQSISRVAYGNNVIRDYIFRHHLETTVTVKIKGITYQQFKSLSFIPHIVKVRINHIGQIVSIGEY

SEQ ID NO: 10006 - protein, 1092 aa, unidentified
  REGION 1..1092: note = Description of Unknown: Cas Enzyme sequence
MAYGIGLDIGITSVGYAVVALDMDENPWGIIRMGSRIFDAAENPKDGASLALPRREARSARRRLRRHRHRIERIKNLILKSGLLTDTDMDCLYNGQLEDIYALRVKALDEPVGNKELARILLHLAQRRGFKSNRKAESQEKEAGLLKAAVSENEKRMAENHYRTVGEMFLKDPAFAQYKRNKGGVYLTTVQRSMIAEEAGMILEKQSALGNRTITQDFKEEYFAILLSQRQFDEGPGGDSPYGGNQIEKMIGTCTFEDGTNGSPAEPRAAKACYSFEYFNLLQKINHIRLLYKNETKSLDDGQRKKIIELAKTKADLNYSHIRKELGLGEEIKFNMLVYNATDVEKKSKFNFMPAYHQVKKALNAVTKGHIESYSTELLDDICRILSIYKGDEKRTEEFIKVGIAAADIDELLKIGGLSKFGHLSLKALRKIIPFLEQGMDYDKACDAAGYNYRAHNREKSMYLPATAEELQDITNPVVRRAVAQTIKVVNAIIREQGESPLYINIELAREMAKGFKERAKLTKENHENQAANEKLLDRIRTEFGKSNPTGMDLVKLKLWQEQDGISPYSRKAIEVARLFEPGYVDVDHIVPYSISFDDTYKNKVLVMSSENRDKGNKLPIQYLAAKYGKEAVEAYKVWVSNNVKNYRKRQRLLKEQITEEDITGFKERNLQDTKYMARVLYNYINDRLLFAASETGKKKRVRAVNGAVTSYLRKRWGINKVRENGDKHHAVDALVIACTTDKLIQEVSRYSRGQELEYAPMDKGSLLVDKSTGLILKRFPYPWEDFRKELMARLSDKPAEALQKLRLLYYQDKDITAIKPIFVSRMPRHKVTGAAHKATVKGARHLDEGIALYKTDLVNLKLDKNTGEIVDYYNPESDRLLYNALKTQLQKYNGDGKKAFAEPFYKPKADGTPGPLVKKVKCFEKTTLNVLVEDGTGAADNDSMVRVDVFKVEGDGYYLVPIYVADTLKETLPNKAIVAHKQYSQWKEMKEEDFLFSLYPNDLIRVQNKKDMVFTKSQKESNLPENYIAKDIIAYYKQTDISAGAIKIISNDDSYSLRGLGVKTLQRIEKYQVDVLGSYYKVKTEKRQLFH

SEQ ID NO: 10007 - protein, 1299 aa, unidentified
  REGION 1..1299: note = Description of Unknown: Cas Enzyme sequence
TNSIGWAVVNANEETRENGTKFLKPVGINAAGSRIIPMSQDILGSFDAGNSISQTAERTRLRMMRRLRERNLLRRERLLRTLKTMGFLPEHFAQQINRYGKFIDDSEPKLAWNKKEDGSSEFLFLDSFKEMLADFAINQPQLVSDDKKVPYDWTIYFLRKKALTERITKEELAWILLQFNQKRGYYQLRGEEEEEKENESVEIISAKILSVEKKEKDKKYEKYWYEMTLDNGMTYRASFYNDVSSWQGDTRDFVLKTTILKDGSAKNELSFLPTTDEIERMDSQRKARMYAKIKLRTEKEIVNSKKTVGSYIYDTLLQKPDQKIIGKLVRTIERKFYKEELILILNKQEEFILELRDTELYQRCIEELYPSNEAHRKNIAKPDFVNLFVNDILFYQRPLKSKKSLIDNCPYEYHSDKEGNIYPIKCTAKSNPLFQEFRLWQFVQNLRIYQRERMVNDGQLDLFSNAPKGKLQTDVDVTAELLKNEDDYVKLFEWLNDRNSIKQDTLLNSYFKIKKEKGKDKYPFRWNYVEDKEYPCNETRSALLSGLGKCNVNADFLTHEKEMALWHILYSVEDKIEIEKALQTFANKNTLENCFAEVFCKLKPFKKEYASYSEKAIKKLLPLMRMGKFWKVESIDKKTLDRIEKIITGEYDESIKNRVREKAINLTNVSHFKGLPVWLACYIVYDRHSEAKEIEKWNTPKDIDRYLSNFKQHSLRNPIVEQIVTETLRTVRDIWKQEEHIDEIHVELGREMKLPADKRKKKTEQILQNENTNLRIKTMLLEFMHSDVENVRPFSPSQQEILRIYEENALDNLTKEDAEYEFVTKISKTAQPSKSDIIRYRCWLEQKYRSPYTGEMIPLSKLFTPAYEIEHIIPQSRYFDDSLSNKVICESEVNKLKDRQLGFEFIKNHAGQIVQLTQGGTVKIQTVDAYERFVKDHYSTSGIKMKKLLMEDIPDDFIERQMNDSRYISKFVKGVLSNIVREKLENGEYEQEAVSKNLISCNGSITTYLKRDWGMEHVWNSIILPRFLRLNQLTETDCFTKTNKEGHIIPNVPLELSKGFNKKRIDHRHHAMDAIVIACATRDHVNLLNNEAAHSKHNANRYQLQRKLRRFEKIVINGKEREIAKEFIKPWDTFTTDAKQVLENIIVSFKQNLRVINKTTNSYQHFDENGKKEFTKQEKGNSWAIRKPMHKDTVFGEVNLRMKKFVSLNEALKTPNNIVNKDFKLKVKELLNHGHDAKYIKKYVEENKDIWSDIDSKKIEVYYFSKDEKKRNGEPKERYFATRKPLDTSFDKKKIKDSV

SEQ ID NO: 10008 - protein, 1085 aa, unidentified
  REGION 1..1085: note = Description of Unknown: Cas Enzyme sequence
MDAFNEMLADFRHNNPELVVDGRLVPLDWTIFYLRNKALRQPISKQELAWIILNFNQKRGYYQLRGEEEENDNSKVEEYYELKVVDVEATNEKRGDNVWYNLYLENGWIYRRQSKLPLDEWKGKVKEFIVTTEYNPDGTLKLDKEGQPKRSFRAPKEDDWALQKKRIEKTISDSGETVGSFIYQHLLSSPFDKIRGKLVRTIERDFYKAELEAILTKQAEYHQEFTDIDCLNKCVKELYAKNIAHQQSLMKKNMLYLLLNDIIFYQRPLKSKKSLISDCPYEAYSYVDKTTGEIKTQHIKCVAKSNPYFQEFRLWQFIQNLRLFDCSSIEETEVTNDYLKTEEDYVKLFLYLNDKKEITQDTLLKEFLGIKKTKGKDAKMPVRWNYVVDKSYPCNETRYTILSALNKANIPLSFLDDRQTEYRLWHLLYSVEDRKELTQALAAFAKQYNLDESFVDVFKKVAPFKKEYGAYSEKAIKKLLSVMRTGSMWNESQVPDSVSQIIQGNIDENIKSRMSHQGFGFADRSDFKFLPVWLACYVVYGRHSESQDITKWENPAALQSFINSFKQYSLRNPIVEQVVLETLRTVHDIWNECGHIDEIHVELGRSMKSTADQRKWMTDRNFENEKTNMRIKLMLLELKNDPSVSDVRPYSPIQQELLRIYEEGALQELSKDDEDYTDISYISHLATPTSAELTRYKLWLEQKYCSPYTGRPISLSKLFTPAYQIEHVIPQGRFFDDSLSNKVICEAEVNQRKTNMLGMEFIKKCGGEIIHCSTIGDVRVFKEEEYKQFIEDHYSLNKVKAQKLLMDDIPEEFIQRQMNDSRYISKVVIGLLSNVVREEGEIDAVSKNVIPCTGGITTRLKKDWGLIDKWNDIITPRFQRMNQLTQSDAFGHWENKDGKRVFQTTLPLELRIDKKRIDHRHHAMDALVIVLASRNIISYLNNEAARDTQRREDLRLLLCDKNRHIKKPWNTFTEDAYTALQNIVVSFKHYVRVINKASNYYEHYNEEGKKVFVPQHGDSQWAVRKPLHKETIFGQVNLRRKKMVPLAKAVECVENIVDQTLKKQILTLREDDWNNKQITGYLKKS

SEQ ID NO: 10009 - protein, 921 aa, unidentified
  REGION 1..921: note = Description of Unknown: Cas Enzyme sequence
NRCSQEDFCKFLKPYLAKITPTDDDKERFEELKKKCEDNELCPKQVTTDNRVIPYQLYYAELKKILENARKYLPFLNEKDEYGTVAEKILKIMEFRIPYYAGPLVGREKSDNAWMKRKAEGKIYPWNFIYMVDEDASENEFIRRMTCKCTYLAGEDVLPKYSLLYSRFMVLNEINNIKVNGEPISVEAKQKLYQEKFVESKARVTKKRIKEFLVSIGEYSGDVEVTGVDDTIKSSLRSYHDFKHFIECGLLKEFDVEKIIERITVTTDAKRLKNWLEQEYPQLSESDRKYISTRKYKDYGKISRRFLEEIIPVDADTSELLEEKNIITALWENNDNLMQLLSMGKGYSKAIEKFNNNYFDQHPDEKNISKRLKNMYVSPAVRRSIIRTLDIVKELRTILKKAPDKIFIEMARGEGDTPKGSRTKSRRDQITEYLDNSDAENIDELREHLEKTDDGRLRSEKIYLYFMQLGKCAYTGKNISFDELDDNTKWNIDHIWPQAKIKDDSIDNKVLVDSNANGAKGDKYPISSDIRSKMSGFWHALYKKNMMSEKKYQRLMRSTPFTEEELSGFIARQLVETRQSTKAVATILKEIFPESEIVYVKAGIVSEFRQEMDMLKCREINDLHHAKDAYLNIVMGNVYDTKFTKDPLNFIKSGERYSMKLFKKDQSGKESGLLTGVVKRGDNIAWDPETSFDIVRHMMSKNSIRYVRYTYRRKGGLFNQMPERKKPGLVPRKNGLDTEKYGGYNNTTVSSFAVIKCKTEVIIIPVELMCYDQFFSDIDFARKYSYEKLKYILPDKKYKGITKDDIDLPTIEYQNNAGIRTAELKINSIVEVNCYPISLCSKDSKGKYIIVASPISLIVDKESENYIKKIIGFFEKDPNRKITSYNCITKEQNLDIYDIIMHKCSEKPFKIWNKFADMADV

SEQ ID NO: 10010 - protein, 1333 aa, unidentified
  REGION 1..1333: note = Description of Unknown: Cas Enzyme sequence
MKTILGLDLGTNSIGWSVIENDFDKKEGKIINAGSRIIPMSQDILGKFDSGQSISQTAERTGYRGTRRLYQRDNLRRERLHRVLNILSFLPEHYKNEIDFEKKTGQFKTEVKLNYKKTEEDKYEFIFIDSFNDMVDEFKKTQPQLFYTKKNGEESQIPYDWTLYYLRKKALKEKISKEELAWILLNFNQKRGYYQLRGEEEEVKEGKEKTFEVLKVKDVVETDDIIKKTGDKLFDVYFENGWKYDKQITKTENWIDKTKEFIVTTSTTKSGDIKRTYKAVDSEKDWIAIKKKTEQDIEQSGKFICEYIYDTLLAKPNQKIRGKLIKTIERKYYKDELKAILKKQISFHEELNTNTEKGQSLYLKAINELYKHNEAHKNNISNRGFDYLFIDDIIFYQRPLKSQKSNIGGCQYEYRVFKKEVKNAVTGQIEKKEIKQPLQAISKSHPLFQEFRLWQFIHNLRIHQREKIVDGKTKIDFDVTNEIFTKDDDFVKLFDFLNNRKEIGQKQLIDFLVKEKYIEKAEKDNYRWNYVEEKTYPASDTRAQFLSRLKKVITNDTVITNEFITNLWHIIYSVTDKEQYLKALKTFAKKNKLNEDSFKKAFEKFPPFKSDYAAYSEKAIKKLLPLMRMGKYWNTDTITEEVKDRITNIMERVNLLNLSQNPTKKEISEAFEKQQVTDDDIQRQLVKSFIKFKNTIPLSGLNTYQAGYAVYDRHSEANDITKWETPEDIDLYLKNFKQHSLRNPIVEQVVTETLRTVRDIWKEYGNFSEIHLELGREMKNPASIREKLSKRNTENENTNQRIKLILKELMNDGVPDVRDFSPSHQEILKIYEEGVYQNIENIDDDIEKIRKNPKPSKNDITRYKLWLEQGYISPYTGKTILLSDLFSTKYQIEHIIPQSRYFDNSLSNKVICESQVNLEKSNKTAYEFIKEKGGSIIDGHKIFTLDEYETHCKRYFRKNRSKLQKLLSEEIPEGFIERQMNDSRYISKLIKGLLSNIVREENEQSETSKHLIPITGAITSKLKQDWGLNDKWNEIILPRFERLNKLTETKDFTYVNTEGTTVPTVPDELSKNFNKKRIDHRHHALDAIVIAATTRKHIQYLNSLNNEKEKYELQPSLLIKNKEGNYTKHFQLPWQSFPVDAKNSLDSIIVSFKQNLRVINKAANKYQKWVKDENGQYKKKFVEQKGQNWAIRKPMHKETVSGKISFEAPRGKIATAVRTSLTEIKNRKHLDKITDKGIVKILENHLKNYIDDKGKEDFENAFSPEGVEQLNKNIVELNGGKNHQPIYKVRLYEVGSKFALSENNNSAKSKKYVEAAKGTNLYFAVYETTDKTG

SEQ ID NO: 10011 - protein, 1217 aa, unidentified
  REGION 1..1217: note = Description of Unknown: Cas Enzyme sequence
MKRILGLDLGVGSIGWSLIQADEDGNPQSIIDIGCRIVPLSPDDTNEFSSGNAISKNRKRAQKRSVRKGYDRYQLRRQNLTDELRGLGMLPDERLIKLPILALWQLRANAATPGKRLTLPEIGRIFYHINQKRGYLHSKSDEEDKNQRDYVQAINNRYATIKAEGKTIGQYFAQKLADSEVTTDKGKVYAFRIKEQVFPRQAYQEEFDQIIACQRIHYPEVLTDDVIHRLRDEIIFYQRPLKSCKHLVSLCEFAMREYKTTDGRSIQAGPKVTPRSSPLFQVCKIWESVNNIELKNRDGESYPFSAEERLKLFNFLDNNEKMTVTDLKRILGLGTKDKWWGGKAIGKGLQGNITKMALKKALPYHEELLSFNLKSIESRHIDTETGDILLEIAPDFEQEPLYRLWHIIYSMKDPDEMASALNRQFGIDDPTILTNLTRIDFVKAGYGNKSARFIRQILPYLQKGMKYSEACDYISINHSNSLTTAENNSRELLPHMQQLQKNELRQPVIEKILNQMVNVVNALLDKYGSIDEVRVELGRELKQSRDERNSAFLNNNKRERDNKAISERIQEMGIRASRSRILKYRLWEEAKHICFYCGQTVGVKEFLEGTDVEIEHIIPRSLFFDDSFSNKVCACRKCNAEKGNRTAYDYMKQKSDNDFADYTRRIEDAYEKKEISKTKRERLLTTAKDIPEDFIDRQLRQSQYISKKAVEMLKQVCRNVWTTSGSVTDFIRHQWGYDNILHDLNFKRYKDAGQTEIIISDHLGQVHQEERIKNWTKRLDHRHHAIDALTIASTKQSYIQRLNHLNSSRDKMFQELEAQSKEVKEKYSLLESWMRCRPHIPVSVVSQAIDGILVSFKTGKRITTPGKRFIYKSGKREVAQYGIAVPRGALSEESVYGSISCLEANVPVKKLFEHPEIIFKPYIREKVEKRINEFSGDWKAALKSLKKTPIFLRADGTEPLEYATCWKREYVIRYPLASLLKKDLPFIVDRNIRRLVSERINAVGEKDAFKEPLFADKADINPIRSVRLFTGLTQDSLSPVKYFNGYPIGYSKPGNNHHFCYYRNKNGELFEHIVSFWHAVDRKKYGIPVIIEDTDVLWEDMANRDLPQDFLKNLPPAGLKLEVSLQQNEMFVLGMPEEDFQNAIKENDQRALNKYLFRVQKISGQYNVFRRNTDTGKDEDSKAQSLGQFVRISSVRGWIHCCPHKVRISVLGEISEI

SEQ ID NO: 10012 - protein, 1512 aa, unidentified
  REGION 1..1512: note = Description of Unknown: Cas Enzyme sequence
MKKILGLDLGTNSIGWAVVNADEITRNDGSRYLKPNSISAAGSRIIPMSADILGDFEKGNSISQTAERTRMRMARRLHERALLRRERLLRVLNLLDFLPKHFADKIDRYGKFTDDSEPKLAWRKNTEGKYEFIFQDAFNEMLAEFKDKQPEIVEEGKKIPYDWTIYYLRKKALEKALSKEELSWLLLQFNQKRGYYQLRGEEEEEKRDKRIEFFAQKVVKVEATDQKKGDDVWYNVFLENGMIYRRTSKTPLDWEGKIKEFIVTTEVESDGKTPKKDKEGNIKRSFRAPNEDDWTLLKKKTEADIEKSSKTVGCYIYDSLLSNPKQKIIGKLVRTVERKFYKEELAQIFKKQVELIPELRNDDLYKQCIEELYPINEAHRNIIAKTDFANLFINDILFYQRPLKSKKSLIDNCPYEERIFIDSKTGEKKKVPIKCIAKSNPLFQEFRLWQFIQNLRIYQREKEINGKLLTDIDITSECLKSEEDYVRLFDWLNDRESIEQEELLKHLFNTKKSKNKENPYRWNYVEDKIYPCNETRATILKGLSKSGIDSSVLSPEMEMALWHILYSVEDKKEIEKALTRFAQKQGWNGEFATIFSKLKPFKKDYGSYSEKAIKKLLSLMRMGKYWNQDNIDKNTLDRIDKIINGEYDEKISNRVRDNAINLKDISDFRGLPVWLACYIVYDRHSEAKDCTKWNTPEEINSYLKEFKQHSLRNPIVEQVVTETLRTVRDIWKQEGQIDEIHLELGRDLKNPADKRKKMSENILKNENTNLRIKAMLMEFMNPAMGIENVRPYSPSQQDILRIYEENALDNLTKEDKDFDFISKISKQAQPSKSDIVRYKCWLEQKYRSPYTGKTISLSKLFTSAYEIEHIIPQSRYFDDSFSNKVICEAEVNKLKDRQLGYEFIAEHHGEKVQLSQGEVVEILSVDAYEKFVKENYANNRVKMKKMLMENIPDEFIERQLNDSRYISKVVKGLLSNIVREKIDDENYEPEAVSKNLISCNGAVTDHLKKDWGMNDVWNSIILPRFIRMNQITGKDCFTTTNAEGHLIPQMPLELQKGFNKKRIDHRHHAMDAIVIACTTRDHVNLLNNEAAHSKYNTNRYQLQRKLRRFEKTVIDGKEREVAKEFLKPWDSFTMDSKNILENIIVSFKQNQRVINKTTNAFQHFDENGKKTFAKQGKGDSWAIRKPMHKDTVFGEINLRKVKSVSLNEAIKVPERILNKNIKEKILELKNNKIDAKNIKKYIEEYHIGGYGIDTSKIDVFYFTKETKERFFATRKSLDSSFNQAKIEDSIADSGIQKILLAHLKSKNGDAEQAFSPDGIDEMNKNIVELNNGKFHQPILKVRVYEKADKFAVGQKGNKKVKFVEAAKGTNLFFAIFEKDGKRSYLTIPLNVMIDCQKQYGNQWKNNIEAYLKEKELAEKDVKLQFILSPNDLVYLPTEGSIDKKRIYKVVSFTNNRLYAIPYAIAKSIVDKNEFTQLNKIEFTDNKESIKDACVPVIIDRLGNVIEFNGKRL

SEQ ID NO: 10013 - protein, 997 aa, unidentified
  REGION 1..997: note = Description of Unknown: Cas Enzyme sequence
EDHYKKEFYAICKKQNLPEKMIEELTRALYFQRPLKSQRQNVGKCTFEKGKPRCSDSHPMYEEYRMLSFLNNVRVQGPWDVNGYRPLNEEELKKIEPLFYRKSKSNFDFEDIAKKIAGPKHYQWKGDTMLDLPYKFNYRMTQGVSGCPTIAQLSEVFGDDWKQNIAETYTLNTKKDGSLKTADEMVNDVWNVLFSFDSKDKVKEFGQVHLQLDDEHAEKFSKIRLSHDYASLSLKAIRNILPFLQMGMLYSHAVFMANIPKIVGSTIWNNEQQRNHIIDEICKMAEMPIEKEKGLRQTLDICIKDLLSKEYGIEEDKLNEMYHPSMIETYPDARPNKDGVVLLGSPRTNAIKNPMAMRSLHEVRKVVNTLIKEGKIGPDTEVHVEYARELNNANMRAAINDLQREKDKKHKEYADEIRKLYKAETGNDIEPTETDILKFQLWREQGEICLYTGDSIGIADFIGAAPKYDIEHTIPQSVGGDSTQENMTLCDNHYNRYVKKAQLPTALAEYDAIKTRIEPWKERIDELTKLIDQIRTRNVVDKATKDARIRRKNRLKMELKYWKGKYDRFTMTEVPEGFARRQGAGIGLVSKYAALYLKSYFHDTLHPENRQVYSIKGTITKEFREMWGIQNEYEKKSRDNHTHHCIDAIVIACIGKNEFNKIGEFYRDIFNYYEGKREKPVFSKPWPTFTQDLKQITEELLVVHDTPDNMPKKASRVIDTKQGKKVAKGDCARGSLHQDTYYGAIERDGDIRYVVRKPLSSFTSIKDLDNIVDDAVRQTIIDAVDGKDFKKAIAEPIYMNKEKGVLIKKVRCYAPTVTKPLQIRESKRRDSSIKEYKRPYYVVNDENYMMAIYEGGKMQMITALDAVNFYKKSTDRNAYPTIVEEEYKGKKLKYLVRKGTQILMLEKDEEFISTANPKELFKRLYTITKLEKDGRLTLRHSAEARPATEVNKLLNAEPFMLKDATRPMIRISLSKFKFLVEGTDFRITPTGEIILKR

SEQ ID NO: 10014 - protein, 975 aa, unidentified
  REGION 1..975: note = Description of Unknown: Cas Enzyme sequence
DRTARRTTRKGYDRYQLRRSLLTQVLRQNGMLPERMDENVIDLWKLRSDAASEGHQLTLAQIGRVLYHINQKRGYKHAKADNNGDSKQTKYVEAVNQRYKEIQESKQTIGQHFYLELLRSKVDGVRGSYYTFRIKDKVFPRAAYMDEFDQIMRVQRDYYPDVLTEELIDTLRNRIIFYQRPLKSCKHLVGLCEFEMRPYKTQEGNIVYSGPRCAPRTSPLAQLCAMWESVNNITLTNRNNERYEFSLEERQQIVEHLCTHEVLKITDLYKLLDISKKDGWYGGKAIGKGLKGNTTLNQLRKAMNGKYQEWLEMPIERVDDVDNTTAEVFWVVSPKVEETPLFKLWHAVYSLQDTDELAKTLCSKFGITDQEVIEALCKIDFVKPGYANKSHKFIRRLLPYLMKGMMYSEACERIGINHSNSMTAAERNARPLAEHIELLQKNALRQPVIEKILNQMINLVNRLQQEYGPIDEARVELARELKQSREERESAYKAINKNEHENAERAAKIAEFGIRPSRSRVQKYKMWEESQHRCFYCGKMVDLAQFLNGADVEIEHIVPRSILFDDSFSNKVCACRECNKEKGNLTAMEYIETKPVGEQEAYKQRVAEAFDAHRISKTKRDHLLWRRADIPQDFIERQLRQSQYIAVKAVEILQKGIRTVWTSGGSVTDFLRHQWGYDEILHTLNLPRYRQVDELTEMVHYEHAGQEHDEERIKNWTKRIDHRHHAIDALTVALTRQSYIQRLNTLEASHDIMEKQVKETGTQYNEKKSILEKWVAEQPHFPVADVTENVDGILVSFRAGKRVTTPARRAIYKGGKRTIVQTGLQVPRGSLTEETVYGRLEDKFVVKYPLDHPSMKPENIVDPTIRALVQKRVEEKGKDAFKEPIYSAEGMEIKSVRCYTSLSENGVVPVKFDEKGQPIGFAKKGNNHHVAIYQDKDGQYQEMVVSFWDAVERKKYGVPSVITNPRELWNSIMDI

SEQ ID NO: 10015 - protein, 1047 aa, unidentified
  REGION 1..1047: note = Description of Unknown: Cas Enzyme sequence
MPAEKRSFSYILGLDLGSNSLGWAVIPLEQDKPARLEAAGSRIFEAGILGLETGRDEPLGQERRTARQMRRQTDRRARRQRRIFWTLQAWGLLPRFADPNQKRDPLARKAILDQLDSEIRQAIRPRFSEVKSFDHVWIYLLRSLAAKEPLPEFFVGRVFYNLAQRRGFLSNRKVKQRSDQPDKKTETPGEVRQQIDALTAQLDGRTLGEFFCQLNPGEPAQRIRNRRTGRLMHEDEFSRIWDAQAGALPNILTEKRKPILRHLLYDQRPLKPVDRLIGRCTHEPGEKRAPKADLLSQRFRILQTVNNLTLIGEEGISRPLTPEERQAVISQLESSAKVTFAKLKKALHLPLKSRFNLEYEDEKELKGDIINARLSKAGGERWNQLTWAERCAVVRLLLYDEYADEDKAAAACEEQFGFDHDSALKLALEPLPDGYVSLSLKAMERLLPHLKSGLTYMEAVCTEYGPPRAGEPSDSLPALIDWERKDEVRNPAVLRSLTELRKVVNALIREYGKPAYIHVELARELRRNKKERQRYIKEQNERRAERETAKREIELPAPSGRDIEKYLLWEECGRCCPYSGEPISHTDLFGDSPKFDIEHIIPLSISQDNSFANKTLCHNEWNRRKGNRTPYAAFGYTTEWPSMLKRVHDFKSRGGRNQKLERFQMKGDEDELREEFCSRQLNDTRYASRLACAYLSLLYGGLSDDLRTRRIHTVTGGLTAFLRNHWRLSTVAGEKTGDKRVDHRHHAVDALVIGLIGPALIQQVALAAQEEHRTRGRSRYGRIVGPWPDFTDSVRNVIENITVSHRLNHRLRGALHDATIYSRRETENSDRGETSVRKPLTSLSTNQVASIADPTVRNLVKEALERIGGDPKKFTEETYPRMSRKGNGTPIRSVRIRTNDVPIRIGRDVRSRHVVTGGNHHVVLFEKLDANGNPKGWGAEVVRLIEAYRRKASGEPVIDLGPWPGRRYLFHLQQGDCVRMEVDGGPPAIYQIKKFSQEQSGLVKIGYRSHADATIDGTIERRPSAFGQWNCQKVVVDPLGNWKVAND

SEQ ID NO: 10016 - protein, 1388 aa, unidentified
  REGION 1..1388: note = Description of Unknown: Cas Enzyme sequence
MKRILGLDLGTASIGWALVNEAEHPDEKSNVIKLGVRVNPISVDELSNFEKGKSITTNADRTLKRSMRRNLQRYKLRRANLIAILKEYGIINNDTKLTEDGSFTTLQTYKLRSTAAVEKISLEDFAKVLLMINKKRGYKSSRKVKNQEEGKLIDGMEIAKVLYADNITPGQYTLRLLNKGKHFIPDYYRSDLLLEFDKIWNFQKRLLPDILTDDFRIEVEGKPKRYSSIAFYKKYGFNTAELKGTREEKRLQAYKLRNNAINQPLSKEEVAFVIAEINNDINNSSGYLGAISDRSKELYFNKITVGQFLYKNLIDKPDEGIKNMVFYRQDYMDEFENIWETQAKYHSVLTNELKQQIRDVIIFFQRKLKSQKNLISLCEFENREIRRVIDGEEKKMTIGLRVCPRSSPVFQEFKIWQILNNVEIRNKQTGEIRNLFQEEKELLAEELTIRIKLSMTEVLKILFRDVRNLELNYKEIQGNSTIAELYNVYGKIVELTGHDEINYTLPALKIRELIEAVLSALNYDTRLLNFRSELPDKSFENQPMYRLWHLLYSFEGDDSNTGNEKLVKKLMSEYGFEKEYAVMLSNVSFLSDYGNLSTKALRKILPFMKNGNEYSIACAYAGYKHSKSSLTREEIDNKILKDKLEILPKNCLRNPVVEKILNQMINVVNKIVETYGKPDEIRIELARELKKNAKERERMTSSMNEIALDHEKYRNILRQEFGLTHISRNDIIRYKLYLELEPRGFKTLYSDTYISPTKLFSKEFDIEHIIPQAKLFDDSFSNKTLETRFVNINKGDMTAYDYIAEKYHEDGLKVYLQRVEDLYRTGKISVSKYRKLKLTGKDIPDGFIDRDIRNTQYIASKARMILEEIVKNVIPTSGSITDKLREDWQLVDVMQELNWEKYNKLGLTEIIENRDGHKIKRIKDWTKRNDHRHHAMDALTIAFTRKEFINYLNNLNARSDKSGIIYAIEQKYCERENGKLRFKAPIPLDEFRAIAKTHLEKVLVSYKSKNKVLTANINTSLKKNGVNRTKQFTPRGQLHLETIYGSLNQYKTWEEKIGASFDQAKIIQVANENYRNALNSRLELFGNNPKIAFTGKNSLSKNPLYVDTLQVHKVPEKVRLVCKEKIYTIRKPVSPELNVEKVIDIKIKKILQARLEEYSGDSKKAFSNLENNPIWLNKEKRIRIKRVKISGIANALALHDKKDQHGKLMPDNNGHKQGVDFVNTGNNHHVAIYRDCEGMLQEKVVSFYEAAIRKNQGLPVVDYNYNSDIGWEYLFDMKQNEYFIFPNKETGFKPDEIDLLDPLKYNLISPNLFRVQKLSTKYYVFNHHLETKAVDGEVFKNLKNLDGITYKSIRTPNGLAEAIKVRVDHLGFIIAIEKRHQLGAFAND

SEQ ID NO: 10017 - protein, 996 aa, unidentified
  REGION 1..996: note = Description of Unknown: Cas Enzyme sequence
MEGDISAGKGESRNAARRLARQQRRATDRRARRKKKLLGLLQRAGLLPPGPAGEVIPSLDATLRDRYPQAGAHVLPYWLRAQALDRKLELDELGRALYHLGQRRGFLSNRKAPERDEKEAGLVKKSIAEIAAAMEQIGARTLGEYFASLDPEEERIRTKWTARTMYADEFERIWQAQAEHHPGVLTDELKADLRQAVFYQRPLKSAAGLIGSCSLERGRKRAALALLISQRFRLIQQVNNCQVIEPNARRRPLTPQERECLIDALESKGDLSFSKAKKLIGINNRHKFGFEEGGEKRFVGNRTNAKLAAVFGDRWALFTTSEKAQIVEDVRTYEKAEALCRRAQRRWGLDAVGAERLSRVVLESGYANLSRKAMERLLPHMERGVAYATAVKEVYGEFHGTAEVLDSLPALDKVVDVRNPVVVRVLAELRKVVNAVIRRYGKPQQIRIELARDLRQSKAHRQRTSRKIRANERAREQAKGRVLDEMGLPDPKRDDVLKVLLAEECDWTCPYTGRPFNMAALLGDNPAFDIEHIIPFSRSLDDSFLNKTLCYHEENRNVKGNRTPLQAYGGTDRWEGILARVRAFKGEAGPEKLRRFQLTTEELESTADFTNRQLTDTRYASKLAMQYLGTLYGGLFEKGGRRRVQAGRGGITKYIRQAFHLNRVLGDGPGKSRDDHRHHAVDALATALTEPRIVQALSEAAVQAWERRGKRTHFEGIDEPWPGFYTDAWEAVEGVVTSHRVDHKVNGPLHKETHYARVQRPAPDGQTVTEFRVRKPLAALTKSEVEHIADPVVRRVVKDALAQSGLPPAKAFADPAKHPVIPPKAPGGRSTPIHRVRVRCRVNPQKLSQGPGERYVTAESNHHLEVLAVVDAEGNERRWTGCVVDRLEATRRLRAGRAVIQRDHGPGMRFVFSLAPGDTLQLPRATKEPRLAVVRSVSQARSGAMEVALVDVNEARKKADIRAAKQWFRPNPNALRKLSCRKVLVTPLGEVRPAND

SEQ ID NO: 10018 - protein, 1139 aa, unidentified
  REGION 1..1139: note = Description of Unknown: Cas Enzyme sequence
MKSISRNPSPIPRERKARIFIHFRIGTGGGFATARRVRSGSPLRKKAPIERARRSLDERCLARTNVPYYDLRDNRRSDTLKRRVTYRQCDCQGVSTMSNGAGCALGLDLGTESIGWAIIDASEGRQRAPVVAGVHRFDAGVEGDYESGRDESRAKHRRDARQPRRQHWRRAWRRKRILRLLQRNRLLPPGQIDSPADVHQYLSHFDAVLRERVNNDGDRVANHMLPYLLRRRALDEPLEPHDLGRALYHLAQRRGFLSNRKTAAREDDKGTVKTAIGELRTEMTRAGARTLGEYLAQLDPERERVRRRWTARDMFIDEFDAIWTAQTPHHPKLLTTELRDQLFHAMFYQRPLKSQHHLIGTCELVPGERRVPWALLLAQEFRLLQRVNDLTIIAPIQRNLTDDERAKLLAALDRNGDHTFATIRRLLKLRKDTHFNLQSEGEKEIPGNRTNAKLAEIFGDRWFSMSRDDRDQVVEDLLSFEREDALIRRGERHWKLSVEQAEKLAAVQLEPDYARHGRTALRRLVARMSDGTQYASARKAEFPEQFEARPALNQLPPVKEALSIVSPAVLRAMTELRKVLHALIRRYGKPDVIRIELARDLKRSRKQREVFSKRNAQNRRERERAKAKILEEMGNAEPSKTDTLKVLLAEECGWKCPFTGRSISMQSLVGANPEFDIEHIWPFSRSLDNGYPNKTLCYHEENRARKRNHTPWEAYGRTPDRWDEIVGRVQRFKGESARSKLHRFTATEIPDDIAARELQETRYISRMAGQYLALLYGGSSDEQHQQRIYVSTGRITAHLRNEWQLNAILGDGGTKSRDDHRHHAVDAVAIALASPAIVHQLARAAEKAPQHGRCLFAPVPVPWPGFLDDVRRVVLGDPNDPLSGILVSKRVSRKLNGPLHRDTLYSKPIPGYERDTRHVRKQLHKLTPAELKRDAIVDPIVRKLVQECYAQSSADKPKDAFADPSNHPLIHTRGGRDVPIHKVRLRAKVKPWSIAEDARKRWVTATAGSNHHTVIVALLDNHGNEKRWEDHPVSRFEVMERRRRGEPIVQRDWGPQRRFKFSLVQDDHILLDHGEAPRLYRVQKISKGDIEFRLHSDARTVDQIGKAGARVRASGDKLRRLHACKVHVTHLGEVHNAGG

SEQ ID NO: 10019 - protein, 1041 aa, unidentified
  REGION 1..1041: note = Description of Unknown: Cas Enzyme sequence
MKQRILGLDLGANSIGWALLDYQDGEPVGIVGSGVRIFEAGMEGDIESGQEESRGKKRRDARQVRRQIDRRGRRQKRLAHVLQLGGLLPEGDLGTGQQQHEFFLRLDRQLQKDGHFADAPADVALHHVFPYWLRAQALDTRLEPHVLGRALYQLGQRRGFLSNRKVPDKDEEKSVVKKGISDLQHAMEEAGARTLGEYFAQLDPTDAQQRRIRQRWVGRQMYIDEFEAIWTAQAVHHPDLLTDELRAKVYSAIFDQRPLKTQKHLIGRCELEFGRHRAPMALLDAQRFRLLQKVNDLKIVDPDFRELPLTSEQRAKLLDALDNQGELTFGKARKLMGIPARGYRFNFERGGEKKLVGNRTAGRLRKIFGDRWEAFSKQERDQVVEDVLTFEKEDALERRGRNHYDLDEQAAQALGQLELEPGYCSLSRQALAKILPHMEEGDHFITARDKAYEEDTETTRELIPEFLPPVFEAPLPDLRNPAVSRVLSELHKVVNAIIRKHGKPDVMRIELARDLKRNREDRKRIWKRNRQNQRDREGAVQEITDKMGNPSPRQGDVLRVLLAKECNWECPYTGKHISMAGLLGPASQFDIDHIIPFSRSLDDSFLNKVVCNNEINRSKGNRTPYEAFAQDEDRWAEILERVKRFKGEARDAKVRRFRMESLEELDDFTKRQLNDTRYASTLAAKYLAVLYGRDYRRHIQVSAGQVTAQLRKAWKLNSILGDGGVKSRDDHRHHAVDAIAIALTDRKMIKSVSDAAQKAQHHGQLRWWKTVPVPWDAFLEDAQAAIDAIVVSHRVSRKVNGPLHEETNYSPPRVDEKGKTYVHVRKPIEGLSPGEVEAIVDDTVRKAVKEKLAELAGPPAKAFANRENHPYIETRRGRPIPIHRVRIRKVLSPFPVGKDERERHVTSASNHHMEIIEVTDKKGNLTWDYCIVTQYQAMRRLRKGQGIVQRDHGAGKQFVFSLAPREVIELDNEQGDGRALYVIRSVWKNGQVEFVRLADGRKMADIRKTKEVGWKVPNIFRTLNCRKVAITPVGEVRRAND

SEQ ID NO: 10020 - protein, 1171 aa, unidentified
  REGION 1..1171: note = Description of Unknown: Cas Enzyme sequence
MYSTTLGLDIGSNSVGSAWIDLKSKRIKLGDSVFPAGVEESDTKRGTPKNQTRRGYRSQRKITNRRAERKHQLRRFLLEKGWMPKEKEAEKKWLEHLNPWILRKEGLSRALTPYEFGRVLLHLAQRRGAYGFDINEKDEDTGKIKEAISDTHKAMTDTGSETFGQLMAIKFEERTKNIGIKGKIIRGAIRNRKKATGEGTYEFCADRYLIWDEFDKLWEKQKSFGGELAKVLTQEYRRQLDNPEGDATWRYKGILFGQRKTYWDVGTMARCDLEPTDMKCPRADMYAQEFLVLETVNNIRIMPRGELKRSLTKEEREKVIASLEKQKTASEATIRRALGIDKGEKKAQYTLSLEKDPKRGLNTNWFKREVIGAIEKEEWGKFEEKKQNSINKGILKFDPQEKKDVEQLMKGCPKWWGFNEQQTEQFIEAWRKRPKIDDRVNYSRKAIMNLLPYMKEGYTVNEARKLFVEDATNGASDAQRERYSFTAQVENRRARQYLEKHPDMLPPAPEDISNPVVRKAIHEVRRHIQAYLRTFRAKPDRVVVELAREARQSAFVRNKQLAQNRAREKERKEIIKKFNLKEETKTQQRKAVDRVLLSREQRFRCAYCDNDEDAITEADAANGKGVEIDHIIPESRGGNSHLNNLVLCHTRCNRGKGNKTPMEWFTKDEFNLLERRLRHLLKENKVKWDNLHKEVPDLDKFVESQLTDTAYASRQVVGWLEKTLYGNIDGGSRHVFSTKGRYTSILRRDWGLFPDSKDREQQGKKNRADHRNHAIDAVVITLSGPERLSELAHAAEREELARSQGFEQAKRKPLNPPWGDFDSFRADVMREWKKLVVAHRPEKRKITGALHNDTQFGPVIDKHGNLTGEFTIRKSIAELTPNHLRVPKGWDELREKLERAQTKVEQRRIRSQMLKLTDIAGGKSGLVRDRWLREELRDALRREDLEPDKFTSKQIKELLKKKELVLDSGIPVRRVVLLRKPKVTPPIKRKRWNARTGKIESDPNPRSLRYYEPQNNHHIEIRENKKGKWIGEVITNFDAAKRVRVKRPKPMPKGWRSPSAVNREDTNEGRFVMSLSIGEMIYMKHPETGEADYFVVFKIDSTGTIHFTSHWDAGRDKETEKCPAREDIKLPGKKTGGLSAAQLENLGIEVGKPPQKVWVGPLGDVKVLVKD

SEQ ID NO: 10021 - protein, 1037 aa, unidentified
  REGION 1..1037: note = Description of Unknown: Cas Enzyme sequence
MGQCLRDFLRNLTCYDKHADTDQLQYHYSTDKLSTLSNRKRIFGEENMSSYTLGLDIGSKSIGWALVDYGNTPSIIGIGVRVYPEGVDRDTKGLEKSKNAGRREARGARRVHQRRRSRKKQLVRTLRTARLLPDSETVLLKLLQETDPYHLRSKGLDERLETYELGRVLYHLNQRRGFKSNRKSSKRKEEGQIAKAAGELQRQIEQSGTRTLGEYFARILSDGRRIRDHYTFRSMYEKEFDLLWAKQKKFHPEILSDELKKKIRDETIFFQRPIRWDTSTIGNCELEKDENGHPLSRCPRGDWYARRFRLLQDVNNLRICNSDGSVDCLEPEQREVLLDELSRKKEVKFTSIRKKLGLLETQQFNAEFEINDKGKKNDKLTGDVFNASMRNKKIFGAKMWDAMEKAEKIQLNEWIVTMEDDELREKLVSEYDLDEEQIKNVMNISLPQRYMSFSQKAIIQLLPLVEQGMRTDEALAQVYPDRNKDDIADEMDRLPLPSDLLNPIVNRALFEVRKVVNAIVREYGKPGKIKIEMARDVRGGPRERRDIHFKMIDNKKRNEQIHTRLVNDINISKPSRDDIIKYKLWEECGQVCPYTGKHISQSALFGPNPEFQIEHILPYSRSLDDSFMNKTLCCVNENRLKGNQAPYEYYGSDIEKFEQLKQRVNRTAMPYWKKRRFWQKEIDTDEIISRELNYTRYICREVIKYLKHICKDVSGTRGKITHELAYQWGFVKDRNDHRHHAIDAAVVAVTKPKHLRELGQSKYSVEGIKFAQPWPHFREELAEKAKHINVSHRATRKVSGALHEETAYGPTKQKGNQGQDIYVYRKPLEALTKPMIAKIVDPVVRDIVRQRLISFDVDPDGRGSIPKDVWKKPLYMLSKDGKGPKIKKVRIHDVFNNLVHIMDTHGNQYRGVKPGNNHHIVIFDFVDKKGKSKRGGEVVSLFEAVSRARAGAPIVRQRRDENEEFVCSLCKGDMFILEREPENAILCRVQEIWESTNIVFRPHNNAVEEGDINKSASRLRGHKVTVDPLGRIWTAND

SEQ ID NO: 10022 - protein, 1336 aa, unidentified
  REGION 1..1336: note = Description of Unknown: Cas Enzyme sequence
MKILGLDLGTNSIGWAVVEKDFDEFQLIDKGVRIFQEGVKIEKGVEGSKAAERTTFRSARRLKFRRKLRKINTLQVLIKFGYCPFLSDEQLNGWRYDKVYPDNLEFRNWWLTDEDSKKTPYYFRYLAVNQKMDLSDQNHRYMLGRAFYHMAQRRGFLSNRLEGTKESEGAVKQTIAQITEEKGTKTLGQFFFEKYMRGEKIRDTYTHRNEHYLEEFLRICNFQDLPDDLSKELQRAIFFQRPLKSQKGLVGKCVFEKNKSRCPVSRPEFEEFRMLCFINNIKIKTPDDEKLRPLGYEERNKVFPLFFRKSKDHFDFEDIAKILAPKNQYSYYKSSGKKPTDWLFNYSMKTSVSACPVSARFRILFGNDFYNLSVPYQREKDGMLSNIDMNDVWHVLFGFDSDSKLEAFARIRLGFSDEQVQEFLKINLKKDYAALSLKAINNILPFLRQGLIYSHSVFLANMYKIIPGEAWAQESNRKLIEDEVFKIISDQNIEKQIIDIVNGYLQNCRRELSAWSKEAEAIFQKDLISSIKEYYGPRTYDGFTEEKKIKIEEKSFNLFKNQMPMNFGRGEFVKIPTIDERVKDFLKENFSVTDDDLEKLYHPSAIEVYNPPVRGKDGYLYLGSPMVSSIRNPMAMRSLHQLRKVINELIRVGKIDQNTRIHIELARDLMNANERKALQSWQRDRERLRDEYSKKIKNDCGFGDDYVPSQEEILKYQLWEEQHHKCLYTGNEISLCEFLGANPRYDIEHTIPRSLSFDNSQENKSLCDNKFNRSVKRNKIPSELVNHDDILQRIDHWREKSEDLANLIQVATRQARAAVDKESKDSAIQKRHKLTFELNYWRNKYNRFIMKDVPAGFKNSQLVDTGIITKYARLYLNTYFDKVLTVKGSTVADFRTIWGLQEEYEKKERVNHIHHCIDAITMACMTKENYELLAKFYHDWEEAEYAGYDKKPKIDKPWPSFAEDMKEIENEVLISHYTPDVLPKKAKQKLKIRGKIKLNEKREVIYLKGDSVRGSLHKETNYGAIKRTMIDQDGNQTEKLLYVARKPLDSLSAADINNIVDGNIRNIVIEGKEKEEPLNKELEKFLRLEKDEDDPIRKAIFTDKVNELKQQLESLFRIENKDGSFTPIKKVRCVATTVTNPLDVKLHRDLSKHDYKHYTHFANDSNYVMGIYEGTDSKGKVKRDFILVNNLDAAKFYSGKTEENPLPEIHPKSKLNLKSILKTGTIVCVWENVPNEVWQLQKNEIVKRFYKIIKMKKDGRIALKHMQEARNDDGLIGSYLKTYGCKPSKSLTEGESQINFKFPHPKLLLSPFNFNFLVERFDFYISPIGELKKIEK

SEQ ID NO: 10023 - protein, 1022 aa, unidentified
  REGION 1..1022: note = Description of Unknown: Cas Enzyme sequence
MKKILGLDLGTNSIGWALIDQNFDEKCGTILGLGSRIIPMDQGTLGEFEKGNSVSQTAERTEFRGVRRLRERHLLRRERLHNVLNILGFLPEHYANQIDFEKHFGQFLNETEPKLTYKYNLDTEKFEFIFKTSFAEMLVDFAKYQPQLLENNKKIPFDWTLYFLRKKALTKPIEKEELAWILLNFNQKRGYYQLRGDDEDDQYNRLVEFHSLLVTDVIDSGDKKGKDEIWYNVILENGWVYRRTSKTPLEWNGKTKEFIVTTEINEDGSIRKDKEGKEKRSFRAPKPDDWTLIKKKTELQIDNSKMTVGCYIYDAILQNPNQKIKGKLVRTIERKFYKEELRLILESQKRFHPELNDRNLYTTCVEELYKTNENHRRSIGEKDFTHLFLNDIIFYQRPLKSKKSLISDCRYEVRFYNDKNGKTISVPIKCIAKSHPLFQEFRLWQFIHNLKIFQREKVVDGKLVLDVDVTNEFLKTAEDWANLFEWLNDRKEIDQKSFLKYPAFNLKRDYESYRWNYVEDKLYPANETHYQIGSRLSKVINVPAGFLTKDIEVKLWHILYSVEDKQEIEKALSTFSIKHNLGIDFIEQFKKFPTFPKEYGSYSAKAIKKLLPVMRQGKYWKEDEIPVETNYHLKSIIERLESIGYDKNRIEEIKDDEIPKQVLKSFVECKNPFQALNTYQACYAVYGRHSEEGEIVRWRTPADLEHYLKFTFKQHSLRNPIVEQVISETLRVVNEIWKHYGTGMENFFNEIHIELGREMKNPADQRKKMTMQISENENTNLRIKALLTELKNDTSIDNIRPNSPNQQEILKIYEEGVLNSSIEIPEDILKISKNAQPSQTELNRYKLWLEQKYRSPYTGQIIPLGKLFTSDFEIEHIIPQSRYFDDSLSNKVICEAEVNKDKDNSTAYEYIKDHSGKIIDLSFGKTVKLFTVEGYEDFVKTNYSKNRGKMRKLLMEDIPDSFINRQLNDTRYISKLVKNLLSNLVREDGEQETTSKNVSSSNGAITSILKQDWGLNDIWNDI

SEQ ID NO: 10024 - protein, 1095 aa, unidentified
  REGION 1..1095: note = Description of Unknown: Cas Enzyme sequence
MSYRIGLDIGITSIGWATIKTNEGEMTRIGEMGVRIFDKPENPKDGASLALPRRQARSMRRRLRRHKHRIERIKMLFENTGIMTKVQIDKMYNDFKIQPNVYRLRYEALDRLLAVDEFVRVLIHISQRRGFKSNRKAETSNEKSDTGKLLHAVEHNLHLMEEKGYRTVGEMFYLDFDFQKNKRNKADDYRHTISRQLLQNEISQIFKVQREYGNKYADEMIENEYSSIFASQRCFDQGPGGNSPYGGNQIEKMLGICTFEPEERRAVKASYTFERFMLINKVNTLRIRKTGEGYRQLSMDEKRKIINEAYNTNEIKYSKLRNLLSLASDESFKGLTYGMKSQHDIEKTNFVRLHAYHEIRKAVDLWEIGYIKKLSTEQLNEVGYALTVFKNDIQITEHLIHAGIQPKAIEQLLKLSFDKTGHLSIKAMTKILPYIEQGMDYDKACIEAGYDFRAHSSNIKSIKLPPLDFEHITNPVVKRALSQSIKVINAIVHQYGSPDGINIELAREMSKNFIERGEVQKSMEQNQAVNEKLCERLIHEFGLLSPKGEDIVKLKLYEEQDGWCLYSCKKLDLKRVFYEPGYADIDHIIPYSICFDDSYKNKVLVSGNENRQKGNQLPLEYLHDTPERLDQYLSLIDTMKLPYLKKQNLLKKNISKDEEEEFKDRNLNDTRYITKELANHIRDNLHFAETSDNRAKRVISVNGQVTAYMRRRWGLTKMREEGDLHHTLDAVVIACINDSIIQRVSNYHKHKESLFMGRPTWTDKSSGQIMTRNEYDNTSLVSDHHHFPEPWPNFRNELEARLSPFPEAAIRRRKLHSYDDNEEIKPIFVSRAPRHKSNGQGHLETIRSPKLVENGYTITKTALTNIKYRNGDIEGYYNPESDRLLYTALCNRLSEYGGDAHKAFAVPFYKPTSDGKQGPLVKKIKIIDKSSLGVEINNGKGYANNGSMVRIDVFCKDKKYYFVPIYTADTIKTKLPNRAVTAGKNYENWEVIDDSFGFLFSLYPNDLVRFEHKSGVEVTLVNGDKKMLKEGFMYYCKASISTASISVISHDNSYIIPSLGVKTLISFEKWQIGYLGKMQKVNHEKRLAYDNRKRK

SEQ ID NO: 10025 - protein, 1156 aa, unidentified
  REGION 1..1156: note = Description of Unknown: Cas Enzyme sequence
CEKAFQIVGIKRTTKGEGLKLENYEWRSKAISEKCDLERLTIVLQKINGQINNSSGYLGAISDRSKELYFNKVNKADGSVRAQTVGEYQLAVLDNNPNASLRNMVFYRQDYLDEFNAIWENQSAYHKELTNDLKEKIRDIIIFYQRKLKSQKGLISFCEFESKQIDILVENKKKTVRVGSRVCPRSSPLFQEFKIWQNLNIIKVSDKDLKTERFLELEEKEILFKELNFKRKLTKADVLKLLFPDNKDLDLNLKDFQGNITQASLFEAYQKIIFQSGHGEYDFSKIPSDEMVQIVKSIFEALKFNTEILLFNPLLEGKDLEKQEMYKLWHLLYSFEGDSSKIGNERLINKISENFGFDKEYASILANVVFDQDYASLSTKAIRNIIPFLIEGNVYSTACLYAGYKHSKSSLTTDERYNIILKDKLEILPKNSLRNPVVEKILNQMINVINSIADVYGKPDEIRIELARELKKSAKEREDLTISMNRATIEHQTYREVLKNEFGMSNVSRNDIIRYKLYLELEQRGYKTLYSNTYIPKEKLFSKEFDIEHIIPQSRLFDDSFSNKTLETRSVNIEKGNDTAFDYVQTKEDDSGLEDYLVRIEDLLKSGKISKSKFNKLKMKGKDIPDDFIARDLRDTQYIAKMAKTILESFVREVNSTTGSVTDRLREDWQLIDVMQELNWDKYNSLGMTEIIENREGKKIRRIRDWTKRNDHRHHAMDALTIAFTKRSYIQYLNNLNARSDRGGSIYGIESKELYRDEKGKLKFKPPIPLNEFRAEAKKQLEKVLVSIKAKNKVATININSTRTKEKGNIKKTKQLTPRGQLHLETVYGSRLQYISKEEKIGTGFDKEKIETVAKPAYRLALLKRLTEFDNDPKKAFTGKNSLDKNPIFLDNNKTLKIPEKVKTVTQETLYTIRKEISPDLKVEKVIDQKIKTILEDRLKEFNGDSKKAFTNLDENPIWINKEKGILMKRVTISGIKNVQSLHEKKDKEGNLIIDKDGNTQPVDFVNTGNNHHVAIYRDENNNLQENVVSFFDAITRINLGLPVVEKDFRKSDGWKFQFSIKQNEYFVIPDGRGVFNPLDLDLLNVENYYLISPYLFRVQKIATKDYFFRHHLETNVDCNNVLKGITWQRLSLTGIKEIIKVRVNHIGQIVSVGEY

SEQ ID NO: 10026 - protein, 978 aa, unidentified
  REGION 1..978: note = Description of Unknown: Cas Enzyme sequence
IGRALFHIAQRRGFKSSRKNGTNEKTAVYKGSNETKTIGHNDYENLIIEKGSLGAAFAFLENQNIRIRNRYTLRVDYQNEVKKIIEFQEIEDKTFCDLINKAIFYQRPLRSQKGLIGKCTLEPNKSRCPISHPKFEEYRAWSFINNIKYKNSETNQFEPIPLTLKEKIYKEKFFYKSKRDFAFKEIRKIIQLNGGKDWELNYGIKFDEISVPSCYVSARLKSVFGDNWETYQKQINRTNKKGENETINYSIEDIWHILFNFEDEENFIEFLTNVIVLEEEQIKELTTLFNAFPVGYANLSLKAINNILPFLREGIIYSESVILAKIPEIIGTKLFEDNKTEVLNEIQDKVEEIRYQKTVITITNNLIFKYYALDYDQRFAWKDYEYKLAESDLIEIETASKEHFGDKTWNKLDLKLKENILSEVSVLYQDFFASIKREHFTQPHLVNSVKDFLYQNFATSTKILNKIYHPSQIDIYPKTEGQQFLLSPKTAAFKNPMAYKSLYRLKDVMNYLIEKGIIDNETRLVVEIARELNDSNKRWAIEKYQRDREAENIEFANAITELIKDPEFSGTADPNSNSDTDKLRLWIEQTENPEEIFKVVQNINKDKQLSVSQKDIQKYRLWKEQNCRCMYTGNTINLTDLFDINKVDFEHTIPRSKSFDNSLANLTVCYADYNRRIKNNQLPTELLNYSEEWNGYKAIKPWLEPWEKKIDTLKNQIETQKRNSRLAIDKETKDTAIRLKHVLSMQYDYWRNKVERFKQTEISQGFINSQLTDTQIITKYAFHYLKTVFNKVDVIKGSNTASFRKIYGVQSKEESKDRSVHSHHAVDAAVLTLIPSSKKREEILRKSYEYEEKNFGKQYHEKPFVGFHYAMIEELKKNILINNIADKDQTLTLGRKIVRQRGKVVWIDKENRIPKVAQGDSIRGELHLQTYYGKIKIAAKDENGTLRRDDKMNIVYNQVDGKDEIWMVIRKPIDKVNF

SEQ ID NO: 10027 - protein, 951 aa, unidentified
  REGION 1..951: note = Description of Unknown: Cas Enzyme sequence
KRDYESYRWNYVEDKLYPANETHYQIGSRLSKVINVPAGFLTKDIEVKLWHILYSVEDKQEIEKALSTFSIKHNLGVDFIEQFKKFPTFPKEYGSYSAKAFKKLLPVMRQGKYWKEDEISVETNHHLKSIIERLESIGYDKNRIEEIKDDEIPKQVLKSFVECKNPFQALNTYQACYAVYGRHSEEGEIVRWRTPADLEHYLKFTFKQHSLRNPIVEQVISETLRVVNEIWKHYGTGMENFFNEIHIELGREMKNPADQRKKMTMQISENENTNLRIKALLTELKNDTSIDNIRPNSPNQQEILKIYEEGVLNSSIEIPEDILKISKNAQPSQTELNRYKLWLEQKYRSPYTGQIIPLGKLFTSDFEIEHIIPQSRYFDDSLSNKVICEAEVNKDKDNSTAYEYIKDHSGKIIDLSFGKTVKLFTVEGYEDFVKTNYSKNRGKMRKLLMEDIPDSFINRQLNDTRYISKLVKNLLSNLVREDGEQETTSKNVSSSNGAITSILKQDWGLNDIWNDIITPRFERLNTLSNSTQFGDWINKDGKNVFQVRMPLELQKGFNKKRIDHRHHALDALVIACATKNHINYLNNEYAKSNKRYDLRANLCFKDKSDASGNYKWTFLKPWDYFTQDAKSNLQTTLISFKQNLRVINKTTNWYQKWQKDENDKLKKVFVKQENGDHWAVRKPIHKDTIAGKVNLRFKKTVQLSIGIDNWEMLVDKSLKKQIRRLIEKENYDKKKLVRFFKDNNNFWNEQDISKIEIYYFDSQNAATRYGNELSEAFNSFKIKSITDTGIQRILLKHLNKFNESIDGKTIEHPELAFSSDGIDSLNENIIELNDGKPHKPIIKVRCFEPIGNKFNVGNTGNKKAKFVEAAKGTNLFFAIYQDSEGKRSYESVSLNVVIDARSRVLPLSPSVTKKDIGYYFTCPPTIWYIFRMKMNMKIPTLLILLIYRKSR

SEQ ID NO: 10028 - protein, 1061 aa, unidentified
  REGION 1..1061: note = Description of Unknown: Cas Enzyme sequence
MADRSYRLGLDLGSNSLGWFVIWLDEEERTAGLGLGGVRVYPDGRDERSRESNAMARRLARSLRRRRDRYVRRRAAVMAALIEAGLMPAEAAARKALEALDPYELRAAALGGPLPFHHIGRALFHIDQRRGFLSNRRTDKTGGEDGLIKSAAGRLRAAMEERGAPTLGHFMAGQRRAGRAVRTRKRGSGAKAAYDFYPQRDMLLAEFEAIWRVQAGFHPALTQAWHDRLRDLVFYQRPLRPVPAGKCTLLPAVGPGDEEGFRCPRAHPLAQRFRIWQEVRNLRVQVTGQPARPLTLDEGNKVAAALLGAAKVDFDRMRSLLKLPAEARFNLESEKRDHLKGDEAAEVLSRKKYFGKAWRSLPLDRQIEIVTALLKEEDERALVDWLVRTAGVGRETAQAVAGALLPEGYARLGLRAIRLLLPKMEGGLDYAAACEAALGKSHSGGPASERRGRLPYYGEWLQDDVLGTGEPGDPPEKRFGRLPNPTVHIGLGQVRRVVNALIERLGPPAQVVVEMTRDFRLSPRKLAEVEREQAANQRRNDARRSELQTLGYPVTSQNLLKLRLWEELNFKDPADRRCPYTGEQIGIRRLLSDEVEVDHLIPFKTSFDDSPANKTVAMRYANRAKGKRTPHEAFGSSPPLDGHAYSWPDITARAALMPRNKRWRFAPDALERFAAEGGFLARQLNETGWLARMAKDYLAAVVDRDQVWVVPGKLTALLRAKWGLNFSDAKDRNDHRHHGIDALIAGLTSRSLLQAIASANEAERERVEIPLPWPALRDEVAAWRAGVTVSHRPDHGVAGRLHEETAYGLVADPAAEEGRNLVYRKAFTALTERELGAIRDRRLRDMVLDHWGAAKAAGVKLDQALRDFAATVAGRDPHVRGGIRHVRLLKPEREDYLVPVMGPDGKPYKAYAAGENAFVDVVETSAGKWLGVATSVFLANRPGYRPAWADDPSLTFVMRVHKGDLLRLDRDGRSEVMVVRQLDAASGRFKLAGHAEAGKLQDRHDDPDDPFRWLMASYGTLKAMGAERVRVDELGTVWRIPAEEGLRHLQRMEQRRDRPRG

SEQ ID NO: 10029 - protein, 1453 aa, unidentified
  REGION 1..1453: note = Description of Unknown: Cas Enzyme sequence
MKKILGLDLGTNSIGWAYIIEGDTPEQSSIEQIGVRVNPLTVDEQTNFEKGKPLTTNADRTNKRGARRNLNRFQLRRENLIEVLKSTCIISDDTLLAETGKNTTFETWKIRAKAVSEKIEKEEFARVLLAINKKRGYKSSRKAKNEDEGQAIDGMSIAKRLYDENLTPGQLVFRLLQEGKKSIPAFYRSDLKNEFDKVWNTQKEYYPEIFTDDFYKELQGKGQRATSAIFWSTYNFDIAEIKDIEDKLKNEQTVKLNNREKKRLQAYKWRSDAISNQLKKEEAAFVITEINNNLYNSSGYLGAISDRSKELYFNKETVGQYLYKQLLQNRHKRLKNQVFYRQDYLDEFEAIWTEQAKYHQELNEKLKSEIRDIVIFYQRKLKSQKGLISFCEFERKEIEVNGKKKIIGLRVAPKSSPLFQEFKIWQRLNDIEVRSKTEPKEKRFLEPDEKEILFNELNIKGNLSASKGLEILFEKHKNLEINFKDLEGNRTGKALYEAFLKILDLEGYDVKDLLKVKLNKDEVELEDLNVSATEIKNVVKQIFETLNINTEILEFNAELDGKEFEQQPSYQLWHLLYSYEGDFKKYDEQEKLTYGNDNIGLKKQLCKKFGFSPDHAKILANVSFQTDYGSLSTKAMKEIIIHLQEGFAYGGRKERPDEPSACELAGYRHSKHSLTKEELEKRKLKDKLELLKKNSLRNPVVEKILNQMINIVNELICKHSKRDENGKITEYFKFDEIRIELARELKKNADERAEMTTNINSAKIAHEKIEKLLQSEFGIKNPTRNDIIRYRLYEELRNNGYKDLYTNVYIPREILFSKQIDIEHIIPQSRLFDDSFSNKTVVYRKDNSDKGNQTAYDYIGRKFGDEKLNEFQERVERLFEIGKKNKEEGISKAKYKKLLMSESEIGDGFIERDLRETQYIAKKAKEMLFEITRAVISTTGSITDRLREDWDLINVMKELNLPKYRTLGLTEMEERKFGHKVEVIRDWTKRNDHRHHAMDALTVAFTKHNHIQYLNYLNARNNETHKEHGNIIGIEAKETEIKLDENGNKKRVFKQPIPNFRQVAKEHLENVLISHKAKNKVVTKNKNKISGKVIVQEVLTPRGQLHKESVYGKYLYPQIREEKVGVKFDYEAIQKVSKRLFKKLLEERLAENGNDSKKAFTGKNALIKNPIYIDNDKTRILPEKVKLINWVEDFSLRKDITPENFKDDKLIDKILDVRVKRIMKKRLIDFGNDPKKAFTDLDKNPIWLNEEKGIAIKRVTISGVSNAVALKNKKDHLGKEILDQNGKPIPVDFVSTGNNHHVAVYEDENGNLHENVVSFFEAVERVNQGLPVIDKTYNEHLGWHFLFSMKQNEQFVFPNAKTGFNPQDIDLTDPKNKKLISPNLFRVQKFSKVTYGNSSVRDYVFRHHLETSVEENKELKEIAYKSIKSLVYFKGILKVRINHLGDIVQVGEY

SEQ ID NO: 10030 - protein, 1039 aa, unidentified
  REGION 1..1039: note = Description of Unknown: Cas Enzyme sequence
WRKDMEATEEALKKDNLFIGQLLLRDLKQNKWAKIRNRVVLRHQYQKEFDAIWDEQAKYHKILINCPKDKLETIVNYLYPGTKQSQIDLRKDGIEKGLKHIIRNQVIYYQRPLKPQTELIGKCKFEKDERVIPSSHPLFQEFRCWEQINRLFTTSKVALYDEKKKKTIYKYYDKYLTNEQKNKIYSKLQNQKQVAFADVAKIVELKNDRTEFLNGLNPKAKLKGCDTLISIKKILGDQYDIAFYKDNKIIEKIWEAIFNNTGNEYDETSPKVSSLIKTLQNVIDKGTVIELAFKLAQGINFPRKYSSLSAKAIKNILPLMVCNPITIDNSAIEKYNRIKHIIDTGEISDEENIEMYMIDYIQNNPNIIETGGMMFAFASSLIYGKHTENNVNPTITDYHQIQYNPDMNLRNPIVEQVTNETMQIIKALWKQYNFNPKELEIRVELARELKNSAEEREKIYKGQLNNQKQNTWIKSRLQENSIPITEDNILKYKLYEQQKYISPYSGETLEASKFDEYEIDHIIPKSRLFDDSISNKVLVEGFLNNEKSNRTAWEYITQQTTKYKICSIDAFIKNVNDNYFGKKKKNLLLEKIPCNLVERQIKETQYISLTVKNQLSKIVGSNNVKSTTGEVTSFLRSRWGLKKLFMELTEERFKQMELWDSSKQWVKKYYDKEKEKNVYEIDHWSKRYDHRHHAIDALVVALTKQSHIQRLNNLNKELQDWLIKHRNEIKLEIAEGESVIEAFFNLEERRRIKIQESIESFRKLDSPFDNLVKQTKELLETMVVSHKPKDSLSIQYNEKTKKKELKIRGALHEATLYGKHNGQDTKTVSISNLTAKDVEKIVDKYVLKNEILKHRNKTNENGKNLYESMKEAFTGEGLKIFNDERMASNKPPVYKVKIYYNTKEVKESSLQRLYDNNDKLSVKTGRNYLFLAMEKNGKKGIERVFDIISLFDAADVAKDEWRNKNHKFKQSIYNNCLERNNADRLLFTLQQNDLVYLPYNVDDPVLSFTSNEEFESWLSEKGNKIGFCKRIYKVVKFTG

SEQ ID NO: 10031 - protein, 1049 aa, unidentified
  REGION 1..1049: note = Description of Unknown: Cas Enzyme sequence
MKRYRLGIDLGATSLGWSMIELNEDNTPKDLLDLGVRIFPDGRDAKTNEPLNVQRREHRSMRRNRDRYLQRRTYLLDTLVKYVLMPQNEHERKQLEYLDPYVLRAKALDEEITLYELGRVIFHINQRRGFKSSRKMDSAEKETSRMKEAIKELKQRLDNVGARTLGEYLFNLNKDIPQKNQNKLRPLRIRDYGKEYNLYTDRKMYENEFDMIWNKQSTYHSELTEDVKEHLKQIIFFQRDLKPQPKGKCRFEIGEPRCPVAFPVYQQFRIYQEVNNLILLDYDRKEHELTKAQREMITQTLLKQKSATFKSLRKKIGKEYAGDYVFNLESEKRKDMKGDETSFILRKIENFGIKWNELSEDEQDEIITRIINEDNDIEIEKNLITWLCKSFGLKNENAENISNVRLPRGIGSVSKKAIRKILPYLKEGFLYHEACQKAGYHHSDFRTGEIYDEGNLPYYGKIMQHHAAFGSDDPNDIEEIQYGKIANPTVHIALNQLRKFINALAEKYGAPTQIVVELARELKLGQKRLREIEKEQTHNRKHNEEIAEELKKVGIENKYQNRLKYKLWEELDGDPAKRCCPYTGKQISISDLFSNKFEIEHILPKSKTFDDRPTNKTVSYYIANKFKGERSPFEAFGESPENYNWDKILERCENFPPNKRWRFYPDAMKNFEDQGELISRMLTDTQYMSRIAKEYMSYVCGPNNVWAIPGKLTSKFRAKWGLNELLSEDSKKNRADNRHHAIDAFVVACTDRAMLQKVARATESTRERFIEKMPPPFEVFCHDEMQEKVNNIVVSYKPDHGNAKAAILRNQTVGQLHEETAYGFVSEDEEKGKITLSVRKPLISLESVKNINEIASSKIRNELLTLAEGVPKNEIKAILANYSERTGIKRVKLHVEKDKKTVIPIKNKNGEIYKYYLSGNNYCADIYCPNKGEKDGKWQIEIIPMFKAHKQDFEPEWHKKYPTAKKIMRLFINDYVAYDDEGKRKIKRVKKMSVDGRLFFIDPKIAKTEKEPNATSVKQLQERNARKIGVDILGKIYDSQKKNENSRDK

SEQ ID NO: 10032 - protein, 1100 aa, unidentified
  REGION 1..1100: note = Description of Unknown: Cas Enzyme sequence
MPAAMDSSQKYVLGLDLGSASLGWAMIALDDAGQPTSLLHTGVRIFEPGVEGTSTDIQEGKDQSKAVDRRTARLHRRQLRRRAARQRDLFHTLQATGLLPIGESGAKAGALERQALLNKLDQSLVFKFSSATDSAADAALFAQMPLYLLRKRALGNALEPFELGRIFFHLIQRRGFKSNRKETKKSAKENEDQGAVKADIHSLELEIQAAGARTLGEYFAGLNPHNPTNDPKLRVRRRWTSRKMFETEFALIWAAQSPYHTSLLTPELRDSVSQLLFFQRPISAQKHLIGHCELERGDTTHPPPRRAPWASMSTQRFRILQKVNDLKIIHPVSDNAEFLSAEDRMKLYRFLDTEGTQTFAAIRKHLGLKGYVFNLEKGGDKSLQGNRTQQSMLKVFGHFWYEFTEGKQNQIIENWRNSESDEGLMQEAMQHLGLTATEAQLLVNEKPASDYCALSLKAIERLMPLMLEGASFKTAETTIYGDRFSGLTVHETVPEMRKVLPTLRNPAVERALTELRKVVNALVREHGKPQEIRIELARELKKPRGERQKETDKIKKREKERADIAKKILQECGNSNPSRLDIEKGLLHRECGGICPYTEKSISFCNLYNDSEFDIEHIIPRSRFPDNSFQNKTLCHQSMNQLKGGRTPYEMYKGNPEEYEKLLDRVRAWPIKNRGKLDRFRVGEPGLKEDNTLEGFSQRQLNDTRYTSVSAAKLLATLYGGRERINPDGTKDQAVYATSGSITAALRNTWGLEEILRELVPPQPGDTRGKPRIDHRHHAIDAITIAATRPAVIAAMARDSSRALDPRTRPKIDPPWKNFVPSIRPHIEQLLISHRPEHKLSGELHDETNYGRPYQQNQKTLVHIRKRVAGLSPKDIGNIVDTKIREAVERKAAELGGDLTACELKNDWPVLPTRNGRTIPIKKVRLKKVLDVTPVGNETRRRYVAESSNHHIAVYAQLDAAGKEKRWDGVIVSLLEAYQRISEAKRSEAYKKYRRSILIVQRSIPGAEDLQFKFSLMGGDTVELHRTCNHEKEICNPEIYRIRTIAASGQLSLARITDARMKKEIIAAGDWWQPRVDALRKLGCRKVVVDLQGRRRYAND

SEQ ID NO: 10033 - protein, 1246 aa, unidentified
  REGION 1..1246: note = Description of Unknown: Cas Enzyme sequence
MKKVLGLDIGTNSIGWALVYEPDQPGESYNIAGMGVRIIPLSSDENDEFTRGNAMSKNAKRTAMRGARRTMQRYKLRRQQLGLILNALGMMPESWLFELNAVDLYSLRAKGVSEQLSLQEIGRIFFHLNQKRGYKSNRKANNEEEQTEIKAIEEKDSEDTRLKKKGYLDLINDREQVLKDENITIGQHFYKELLKNDKTRIKENIYLRSTYIDEFNRIWNNQQIYYPDILTDGNKQKICNETIYYQRPLRSQKGLVSNCLFEKYHKATPKSSPLFQINKIWQELNNIELTSFKAMRGREGGFDKQGKRWLTLEEKQKLFNKLNIEGKLSVKKCLDELGYITDQKEYKINIRNEKELEGNRTYAAIKKVFHQFKIDESLLQFNLTIDQKEIPDKQTGEIVTRPQISPEFEREPLFQLWHLLYSIEETETLLAKLQSRYGLDEIVAKALAKIDFVKQGYGSLSAKALRNILPHLMQGNGYSEACKMAGYNHSNSITFEQNNEREIKDRIKLYDKNSLRQPVVEKIINQVINLVNEIIDEKNGYVTNKERHSGSFEIRVELARELRQNAEERNKTYSRNAKQDRRHKEIEIIIKQHLPYKRVTHNDIVRYKLWEEFGQVSPYEPGKPVSLTQLFSGDYDIEHIIPKSRLFDDSFNNKTICRRKLNSGSLGKNQMTAYDYMQSQEEQVFRNYLEFIKLHLYKKDGISKAKFNKLMMPIDKIPDDFINRQLQETRFITKEVKTCLMLICRNVYATSGSVTAEIRHLWGWDDVIMDLQIDRYRTVNQTEIIEYITNGQKHTKERIIGWSKREDHRHHAIDALTIACTKHAFINRINKINAQENRDEMFDKVKNSRFNDKLTLLQKYLILQKPFETALVSSAIDNILISFKAGKKVTSNSSNKIKKADGIIQKETEVIPRGFLHKDTVYGRIKQFEEVPLSARFDRFGDIVRPDIKAQIVDYIGKFDNNVKEAFNGKNLLLFKEQFRYDKIMVFRHEHVVRYKLDTNFKAADAEFIVDEGIKAVVKAHLAEHGNNPKSAFNSDKVIWLNKEKGILIKSVRCFTGYTDLQALHKNQKGEPIDFVVTRNNHHIAIYRDEHGKLQENTVSFWDAVKRKQATLPVIIKEPGIVWDEIISSGFDDQELLKGLPQPGWTYQTSLQQNEMFVFGLSEEELESAIHEKRYSLISKYLYRSQKMSKKSSGSIDLWFRHHLETKLDDGAASKDLKKFINVASLGAMNGLKVKVDNIGRVIRTS

SEQ ID NO: 10034 - protein, 1090 aa, unidentified
  REGION 1..1090: note = Description of Unknown: Cas Enzyme sequence
MSPAMESSQKYVLGLDLGSASLGWAMIALDPVNDPIGIIRTGVRIFEPGVDGTSLDIEQGKDQSKAVDRRTARLHRRQLRRRVARQRELFQELQKAGLLPVSEIGTSASSEQRHQLLNDLDQELARKFALSVDDSTFAQMPLYLLRKRALDHPLGPYELGRVLFHLIQRRGFKSNRKETKKSPKETEDQGQVKDAIHSLELEMRAAGARTLGEFFAGLNPHDSKQKVRRRWTARWMFENEFKEMWDKQAPYHPSILTPELHDRVAHLLFYYRPISAQKHLIGTCELERGDATHPPQRRASWASMAAQRFRILDKINNLRIINPVTDSARKLTEEEHAKLYSFLDREGTQKFAKIRSHLGLGKEISFNLERGGDKDLPGNRTQQSMLKVFGPRWYEFADGKQNQIIENWCNHDDDALTQEAANLGLDAECAALLVKENPQADYCRFSLKAIRKLMPGLMKGLSTTEAQIEVYGNPLAGLTVHDKLPQIREVLPTLRNPAVERAMTELRKVVNAIVREHGKPHEIRIELARELKKPRSERQKETDRAKKRERERTEIVKRILLECGNANPSRSDIEKGLLHRECGGICPYTGKSISFRGLYTDSEFDIEHIIPRSRFPANSFQNKTLCHQSMNQLKGNRTPYEMYRGNPEEYEKVLDRIRAWPIKNRGKLDRFRVGEPGVKEDNTLEGFSSRQLNDTRYTSKAAAKLLATLYGGLIRETSAGNEQAVFATSGAITATLRSTWGLEEILRELVPPQPGDDRGKPRTDHRHHAIDAIAIAATRQSVIQAMARDSALAIDPRTRPKVLQPWKDFVPSIRPHIEQLLVSHRPEHKLSGELHDETNYGRPYQENKKTMVHVRKRVSGLSPKDIPNIVDPAIRHAVMQKAEELGGDLTVCDLKETWPVLPTRNGATIPIKKVRLKKVLDVTPVGNDTRRRYVAESSNHHIAIYSQVDAHGKEKRWEGVIVSLLEAYQRVSAAKRTEAYKQRRRVTPIIQRSLPGAEDHQFRFSLMGGDTVELHRACDHAASICAPDTYRIRTIAASGQLSLVKITDARMKKDIIATKDWWQPGVDALRKLGCRKVVIDLQGRKRYAND

SEQ ID NO: 10035 - protein, 1374 aa, unidentified
  REGION 1..1374: note = Description of Unknown: Cas Enzyme sequence
RRIDRSSRKLSKRYKQRRNKLIYVLQNLDMLPEYIKLSDVFDNPLKLDKVSILPIVKKQKQYSAFDLVDLRTKALTEKISLRDLGRIIYLYNQLRGYSGGNNEPEKESEADEENDSAGKKANSSYVAFAKIIKVYDTEEISFKNKLYKKSKAIIETEDGIVEGETLLEILKENESLELQIITRKSKKGDTISFKLPNKTNWRKKMENLESQLNELSQEKGKEVYISEYFLQVLKDDKWAKIRNNVILRSRYESEFDAVWKQQSKYYSFLDQTENSELLKLLQFIFPGSQESQNTYRKIGMEKGLKYIIKDQIIYYQRELKDQSHLISNCRFENQEKVIAKSHPVFQEYKIWEQINKLTINTKVEIGKDRKGQIKYSYVDRAIPTQLKVWLFDELQNKKEIGFNTIITKLKKEYSFRDKEDFLNGINAKAKLKGNETKLILEKALGDLWNKFGLNEIEKEVELWEILYNGKGSEYDITSDRTSRILKFIKARSKDLPDAEQIAIQISKIKFSRSYSTLSLKAIEKILPLVRAGIYFNPSFSQELNTKIVKLLNESVNDPFEKSAQEYLEKNIDLLVEGGLMNAYATILVYDKHTEKEYKNDELINNYKNIQRLKQGELRNPLVEQLINEALIVVRDIWKKHGKPTEIRLELSRELKNNAERRAKVYASNRENQKINDDLKSSLLEIAKETVIADIEKHKLSLSQEDFQREYVKQYKAPSKSEIEKLKLWNEQKQISPYTGQCIPLSELFNRERYDVDHIIPQSRYFDDSYSNKVICEKSINKEKGNKTAMEYFESGSTGQNILFKDAYIELVNNNYYGQKRKNLLAIKVPEDPITRQIKETQYISIRVKEELNKIVGNDKVKTTTGSVTDYLRNHWGLTDKFKDILKYRYDDIKPKLFEAAYKQYQKKNEDNIKEAEKLGAAFNDVVLNEENFKQLFNDDFIKKKNNKWVIRGWSKRIDHRHHAIDALVVACTRPGHIKKLNDLNKELQSWLDKNRQELLPDFEGTPTELLDEVLNLDKEKREKIFFQIEKFKNIELPWLGFPDEAEQKIKEIIISIKPKDKLLIQNNDSGTPQIKIRGQLHEGTLYGKSQGIEAYKIPLIKLAGKDFATEKTIEKIVDPYLRVVINEHLQDNNNKKEDAFSAEGILDLNTKLLLKKNKNGESAPHTPISKIKIFYRDPTKIKMKKGQEEVEDTLQRLYRIKAYNKSLYVKTGDNYLFAVMNNSNKRIFDLITFFDAASLIKEEFNKCKNKKIFDKDLVLRKYFEERNDTELLFLLKQNDMVYLPSESEEVILEKTSPLYNDFWNNKKERSKGVYAVVKFSKNLQIYFIKHNVADVIERGIEFGSQNCLEKDGDISIKHFCIKLKTDRLGNILPA

SEQ ID NO: 10036 - protein, 1036 aa, unidentified
  REGION 1..1036: note = Description of Unknown: Cas Enzyme sequence
MRILGLDVGIASCGWALIEIDEGRSGIIAVGSRCFDPPLVPKTKEPKSAGRRAARGQRRVIRRRRLRMNRLRELLAENGILDGSGRDALAEAARRLAGAEVTPWDLRRAAHERALSRDEFAVVLGHVARHRGFRSNSKSETGANAPDETSKMKKAMEQTREGLARYRGFGEMIASDPKFAQHKRNRDKDYSHTPKRSDLEDETRAIFAAQRRFGQHSASGDLEREFAHIAFSQRPLQDSDAMVGKCLFEPDQKRTAKQAPSFELFRFLSRLATLKLTAGRVEFPLSPEQIALAARDFGGDTKGISFLALRRKLDLDPNTRFAGVSADREKNDVAARTGSAAAGTYALRKALGEAPWASLAKTPEKLDRIAEVLAFREDIARIREGLQEIALEPFVRHILLEATERGDFGHFGGAAHISAKAARALLPGLAQGLGYSDACARVGYDHSARPVIALKDINSPVARRAFLESIKQVRAIQRAFGPIDQVNVELARDVGKGAEERAKLTQGIEDRNKQKDRRALEASETLGRPVSPDELLRYELCKEQNFKCVYCDAGIAPNGFAADDTRYQVDHILPWSRFGDDSYRNKTLCCVACNQHKRGRTSFEWFDEDKTAQDWEAFSARVEGFKEMRGLKKRNFKLKDAKEVEDKFRARNLTDTQWATRLLADELKRMFPSKADERRIFTRPGAITSKLRRAWGLEGQKKIGGVRVADDRHHAIDALVLAATTEGLLQRITKQVQQREREGRGDDIFHVAPPWPGFREASIRAVYGENGVGGVFVSRAERPRARGKAHDATIRQIREIDGEEIVFERKAIEKLTPADLDKIPTPAPYGAIVDPAKLRDATVAALKAWIDAGKPKGEDQLPRSPKGDIIRKVRLATKTKVGIRLNGGAVDRGEMARVDVFRKANKKGVWQFYLVPIYPHEIATMEAPPMRAVVAYKDEIDWTPIDSGHEFLWSIDSMTFLEAVKGSGDVVEGYFRSLDRSTGAISVSSHSNSDALVTGVGVKTLASFKKFRVDRLGFARAEVHREVRTWRGKACI

SEQ ID NO: 10037 - protein, 1234 aa, unidentified
  REGION 1..1234: note = Description of Unknown: Cas Enzyme sequence
MRKVLGLDIGITSIGWALIAEDEIPEIIGMGSRIIPLSSDDENEFTRGNAISKNQKRTEKRSIRRNNFRYKLRRKYLIDELTKLGMMPDEALFKLPGLQLYELRAKGVKEKLSLKEIGRILYHLNQKRGYKSSRKEEKKEGQKETEYVQKIAERESQLGDDTIGQYFHKELRDDWNKRENSIGYRIKEQVFTRNTYIHEFDRIWNFQQPYHQSTLTNENKRRIRDEIIYHQRPLKSQKGLVSICEFEGKFYIDKNGKEVFAGPKVAPRSSPLFQVCKIWESINNIQIKKRNPETKKYEIYIPSIEEKQKIFDYLDTSERLSQAELLKLLALQRNEVYTNAMIEKKGMQGNLTKCAMLKILPDEFHHLLDFALNTERYDILADRNTGEMATRKRVKSNIETQPLYQLWHCIYSISDDKELENTLKNKFSLPSSIATELTKIDFTKQSFGNKSVKSMRNILPYLQDGLTYDKACSMAGYNHSDSITKEENLIRKLKDKLKPLSKNSLRQPIVEKILNQVINVVNAIIDTYGKPNEIRVELARELKQSREERNDTYKRINEAERNHERIRKLLEEHPEFKKKKVTRRDIERFKLWEEFDRVSPYEPSKLISLTELFSGRYDIEHIIPRSILFDDSFSNKTICPRQLNSGQLAKNQMTGFDFMKMRSQKELEEYIECVKSNKTISRTKRTKLLMSFTDLTSDFIERQLRETQYISRKSREILTEVCRDVYVTSGKVTSHLRKVWGWEDVLMSLQLPKYKSLGLTEFVTYESNGQIHEKEVIGAWSKRDDHRHHAIDALSIACTKQGFIQRINTLNAEHTRNEMYGEIKDIDFKEKLSLLDKYLISKKPFETAQVQKAAEGILVSFKTGKRVAVTGQRTVKKNGKRIVVQSNIIIPRGALSEESVYGKIKAIEPNVQIKKVFEKSDLIFKPKIKAIVKQRLMECDNDVKKAILSLKKKPIIYKDAELTYATLFKEEYVIKYPVQNITEKDLKSIIDEGVRTIITNRLKENQNNPKLAFKDLHQNPVWLNEEKRIPIKSVRCFTGLSSVEAIYQNEQNEGISFVKPANNHHIAIYTDEHGAKHEHVVTFWHAVERKKLMLPVVIKNPKEIWDVALLNKTNYSEDFLSKLPNDSWVLNTSIQQNEMFVFNMSKDDIEGDLNKNNYKTISDNLYRVQKVSTGDYNFRHHLETKVDNKINGEKDEMVFIKSGRLIRIRSADAFTKYAPNKVMLNNLGRIIKIE

SEQ ID NO: 10038 - protein, 1521 aa, unidentified
  REGION 1..1521: note = Description of Unknown: Cas Enzyme sequence
MKKILGLDLGTNSIGWALIEQDNQENKGQVIATGSRILPMSQDILGKFDSGVSVSQTAERTNFRGIRRLRERHLLRRERLHRVLNILGFLPEHYTNQIDFDKRIGQFMPETEPKLPYLFNTDTKKADFIFKKSFEEMMQDFELHQPRLVENGKKIPYDWTIYYLRKKALSEKIEKEELAWLLLHFNQKRGYYQLRGEDEEENKKQLVEFYSFRIIGVQATNDKKDDETWYNIYLENGWIYKRKSKTPLDWIDKIKEFIVTTELNDDGTIKKDKDGKEKRSFRAPAETDWTLVKKKTEYDIDKSHKTVGAYIYDTLLQKPDQKIKGKLVRVIERKFYKAELEAILIKQCGFHEELKDSTLYQACLEELYENNDAHQNSIREKGFAHLFSNDIIYYQRPLKSKKSLISNCKFETRTFIKDGKKEVEPIKCIAKSHPLYQEFRLWQFIQNLKIYKKENTDVDVTLDFLKTEEDTVKLFEWLNEKKDIDQKAFLKYPEFKLKKDIDNYRWNYVEDKNYPCNETRHLIAKKLENVKNVPTGFLNKENEEALWHILYSVEDKNDIIKALKTFAQKRGLGDDFAEQFKKFPPFKKDYGAYSSKAIKKLLPLMRIGKYWNEGDINDHSHNYQTNIQKVIATLLKDRDKKNENPDNGFPSSFNSNLLSKLEMLADDLSEYKGLDHFLASYVAYGRHSEDSEVKKWKTADKIELLEQHSLRNPIVEQIINETLQVVKDIWKQHGNGEEGYFDEIHIELGREMKNPTDARKRMTESISENENTNLRIKALLTELLNDNDIENVRPYSPMQQEILKIYEEGALNAEGEIPDDILKIAKLAQPTSSELTRYKLWLQQKYRSPYTGDVIPLNKLFTRSYDIEHVIPKSRYFDDSFSNKVICEVEVNKDKDNLTAYEYIKENRGKKVELSSGRVTTLLTIEQYEEFVKNHYSKTRGKMKKLLMDDIPTAFIERQMNDTRYISKVVKNLMSNILREEGEDDTISKKVIVTNGNITSTLKQDWGLNDIWNDLITPRFQRMNELTKSSNFGEWTNKEGKKVFQTQVPLELSKGFSKKRIDHRHHALDAIVIACTTRNHINYLNNLSALGKDKKEIKERKRNDLKHTLCFKKYNDDTKQNYKWVFNKPWDTFTQDSKEKLHTTVISFKQNLRVINKTSNKSLQWKKDNNGYMGKTMVPQTVGKNWAIRKPMHKDTVSGLVQLKFKKTVTLSAAIDSGDMIVDKALRKQIKKLIAENNDKKKLLNFFKQKENKWNGKDITRVEIYDWDKENVASRVSIDDSFNVSKIGSITDSGIQKIMLRHLEKFNEEKNGKIIEHPELAFSPDGLDTLNITIATLNNGKPHHPIYKVRTYEPKGNKFNVGETGNKKDKYVEAAKGTNLFFAIYKDEKGKRNYDTIPLNIVIERQKQGLCSVPEINEVGNKLAFYLSPNDLVYVPTLEEQENTSLIKFENLSKEQVARVYKTVSFTTNQCFFTRNDIATPIVNKVEFSALNKMEKAIDGVMIKEVCIKLKTNRLGNIKPA

SEQ ID NO: 10039 - protein, 1175 aa, unidentified
  REGION 1..1175: note = Description of Unknown: Cas Enzyme sequence
MSDHQTVWSFDLGKGSIGEAVRDIKSNKFLHKASLLIPAEFASTKEAAMRRRMERTRLAHKAREKWLDEVWLAAGLEPLQTRKVWKNPKTRKWELKQIGDYRMEREFAPQNRKPGRDGAPADDTICYTSCLLRIKLLRGEKLEAWQIYKALHSAIQKRGYGRVPWAAREEKRRGKTEEEQEKELKKLDPDYREAVETWPKFKHAVSWVEFHLPCYYDAWKMGLWSVNKPDVLESRITCQAESTRKVRFDRADVEREISTLAKQAAVQLHQLADSFAKWKRDGWKSIDSFPVAAKTFGEFLVYGPAGEPEGDARNNFSDYLKFRASNKIHPGSSDDWMGATAQKTPRFDNRIINTCALIPRLQVCNVTIRFNKSDSKPIPESLLATEVTFLMKLKNTLVTGYPAQRKLTTEEIRKLFEVVTAEALAKALSVGLDDKYRERKVAECYALTKTDWARTKGIKELGLFPLPGHMEIKAPKTDGRSRFSRPALRLIRALILSGQSPSAFHQRLLGRDRHLITEIGMDVLDAEPVRFVGAAGGEKTFIKAERPWVVTSDLKFLLDLARSNDTWDNIYFPEQRLDALEARYTDIKGKISVPQAVRELLGSINDPVVKHRLGVFSDRLTKLQRGDDKEGIPACGIPETVVLEFVREDFMGERAKRELQKFISDREKARKEAGDQAAALGVHEKSGRLKYELFKSQGSVCLYCQQNFKETDLADYRIEHIVPRAQGGPDAMVNYVLAHDACNDAKGDRTPFEWKHGQQGWDGYKACVEKHGTLLRNKKVQLLLREDAAELVGRYTALAETAWITKLAQKIVSLHFGWPRGVDREGNRRVIAVSGGLTARIRRKYRLNSLLNPPPVGTIDLNEWEAKAEKNRKDNRHHALDAMVINFLPQWMRDEKKGWFFRFPEPVRKNPRATFEKEIADVMPRLLAFEKAPLAETIYGGRMEKGKTTIVQRVPLRKLAFNTIKQKEVFDRKYLAGQIKSVRDPHIAEMLLRFLGKESNGESEWHDFCEDLFQRRRDGTKGARISKINVNVGSADEYAEMSKDRGGAYRKGKKGHKGQIIYLELTPTKKGAAKEIIHVRPVYAFESRLTIERKLRKELGDSIKIYGFFQSGCLIAVKKEVAHDKKPLPAGSYLLNTIMADAKCMKVTTQNGVTYPDIPRYSLSSLIEAGLCRAD

SEQ ID NO: 10040 - protein, 1106 aa, unidentified
  REGION 1..1106: note = Description of Unknown: Cas Enzyme sequence
VDSNNLTLGLDLGVTSIGWALADVEGQQIVDAGVRLFEAPMDVAKFEAGEPGGSFAAVRRKSRMQRRQASRRQARHRDLYLALESVGMLPFAGKRAEDRHKELTSFDNKLMEAWRPRIHAEAPSIADPDQVICYYLRAKAATDRLELPELGRALYHLGQRRGFKSNRREGRSGLASADAKKEEAERSQIKSSIATLQDELDASGHTLGQRLAFVNPHLAVIRNRKRSDIAPIWTARRMYQDEFERIWKTQQPHYPDVLTANFYNRIERLMFKQREVSAGKPGNCELERNPALPRAPKSSLLAQHFRLVQTVNNLMAEGISSIEWREKQQKLIAMLSTVIFEKPNKKGTQTFFGLPFAEVKARLGLPKRTKLNLEDDEDSTYLRGNRTNAIMVRALGTERWSAMEEQEKRRIVRKWISESSPEKLLRIARTQWNLDEAVAEQLAGLEAEEGYSALSHVAMLKLLPHMEQGLTYPEAVKEVYGNVLSDGKEHEFLPPLESVFPRIPNPVVKRALTELRKVLNAIIRQHGRPTHIRIELARDLKRNAEQRERIHKGNKERERERITARKWIEESGRRPTDRLVERVALYNRTKGRCAYCVQALGDMEYVFSENSGIEIEHVLPRRCNDNSFSNKVLAHRACNVRKADRTPRQAWDPSPEWDEMLKFVHALKDKALLDRFMIQTEEELQGFTNRHLSDTRYISKLASEYVELLYGGRDAQLEWDDRARRCVYASSGALTAEMRKRWGLNAILKPKRDNAEAERKDTKSRDDHRHHAVDAIVIALTTESTIQRAAFEAQRHDRASGHLLPRYFPPPWPTNGDIEERIYAFRQEIRATVEAITISHRVNHRLQGELHDANAIGKPRADSEGIFIHSRKEVHRLKDKEIEVIQDEAVKAAVREKAAELGKLELCEKQRNWPALRKPDGSLITIRKVTLKNRRNKEPLGIGSNGNRRHVIENNNHHVVIFRQPATGDDNRWYTHGPVSRFEAMTRLTNAKREGKGPPHQIVTTKDGSNTFIMFLMKGDCVEMRDPVNDVTDIYRVSSMSENDYAFIRHNMGMPSAKDLGLTTSQLRQLQISRGDRIRIRGNIDDLRSLDCKKVNVDPLGRVTYQ

SEQ ID NO: 10041 - protein, 1284 aa, unidentified
  REGION 1..1284: note = Description of Unknown: Cas Enzyme sequence
MKKVLGLDLGSSSIGWALVHQPETGDEKYQIAGMGVRIIPLSKDDADEFTKGNAISKNASRTLKRGVRRSMHRYKMRKQFLAAVFNALNMMPPKELFKLSALDLYGLRDKAVREQITLQELARILFHLNQKRGYKSNRKANNEEESEAKDVKEAENITEDDEPKKTKKKGYLDLINDREELVKEQTIGQYFYHELLKNPFYRIKENIFMRKSYENEFDQIWKVQQRFYPDVLTEANRNRIRNEIIYYQRPLKSQKGLVSVCTFEGKMYADKRNGYQKEIFSGPKVVPKSSPLFQVSKIWQELNNVEITSFQAMKSRSKSSLSSTVEGGFDQYGKRKLSQVEKQKLFDALNWGEKLTPKQILQNLGYSSRYNEYKINLRNEKFMEGNRTLADIKKAFDKFKVSRDELLRFDLKIDTIGNVGKETGEIFYRVMGKGENENPLNTFENEPLYQLWHLIYSIEETESLVKVLQNKFNLSKEIAEALAKLDFQKAGYGNMSARALRNILPHLMNGFGYADACTKAGYNHSNSLTTEQNTKREIDDKLELYPKNSLRQPVVEKIINQVINLVNELIDEKNGFITNEERYAKDKFEIRIELARELKQSAKERNDAFSRNTQQDKRHKGIEEELRNCGFKRVSKNDIERYKLWEEFGKISPYEPTKVISLSEVFNQVPGVLYDIEHIIPKARLFDDSFSNKTICPRKLNKDKDKQTAYDFMLTQSDQAFHNYLEFIKMHLDKKGITKSKFKKLMMPLSEIPDDFIDRQMNESRFISREIKGLLEKICRNVYSSTGTVTSKLRHLWGWDDVLMNLQIDKYRDHELTEFITYETNGQIHEVERIKGWTKRDDHRHHAIDALSIACTKQGFIQRMNSLNAQHTNDEIFNETRGKEYGKKLSSLEKYLVDQKPFETAIVQKEATKILVSFKAGKRVASKSVNKIKKGKTIVEQRASLTPRGFLHKETVHGQIKQYEKVKLSPRFDNFNNMVNEVERQQLSEHLSKSDNDVKKAFNSKGLEKFIQEYGYYEVTVYKKEAVVKYKLNNDFKEKDIEYVVDKGIQKILKDHLAKHGNNPKVAFNADNTVWMNKEKGIAIKSVRCKTGSDSLQSLHKNEYGVPIDFVSTRNNHHIAIYRDANGKLQENTITFWDAFERKKAGLPVIIREPKVVWDIILNSGFDEQSVLSKLPLENWEFVTSLQQNEMFIFDLSYPDIQNAIDENNLSLINKHLYRVQKIAESYYNFRHHLETSVDDKFNGVRNENLSIAIGKMKRVQSLLNMTGIKVKVDNLGRIVKVGE

SEQ ID NO: 10042 - protein, 1083 aa, unidentified
  REGION 1..1083: note = Description of Unknown: Cas Enzyme sequence
MSSAKETPQKYILGLDLGSASLGWALIGLNPVDEPISLIRAGVRIFEPGVDGTALDIEQGKDQSKAVERRTARLHRRQLRRRAARQRELFQELQKAGLLPTNAAGNGASSEQRHELLNDLDRSITLKFLKPGDDSFAQKPLYLLRKLALDQALEPFELGRVLFHLSQRRGFKSNRKETKKSAKENEDLGQVKADIHALEIAIQEAGARTIGEYFAGLDPHTEKVRRRWTARKMFEQEFALIWAAQSIHHGSVLTQELHDRVHELLFFQRPISAQKHLVGTCELERGDDKHPPKRRAPWATMAAQRFRMLQKINDLVVIDARNQTSRKLTAEERGKLYQLLDREGTQSFTAIRKHLDVKGTTFNLEAGGDKDLPGNRTQKSMRKVFGIFWDEFTEGKQNQIIENWRNSESDELLMQEAIEHLGLDVGAAAVLVKESPQADYCSLSLTAITKLMPLMMSGRSFKDAETEIYGSRFSGLTVHDTLPPVREALPTLRNPAVERAMTELRKVVNAIVREYGKPYEIRIELARELKKPRQERVKATTANRKREADNKGIAAKILSECGLANPSRADLEKAKLFVECGGICPYTGRSIPFSQLFQDSEFDVEHIIPRSRFPDDSFQNKTLCYLPENREHKRNKTPFEAYSDKPDDWAQILLRVSKWSNPGKLSRFKLQSANELAEFSARQMNDTRYTSVLAGRLLAMLYGGRDVATDNGKDRRVITASSGAVTATLRRSWGFERILQAIVSPEPGDTRGKPRTDHRHHAVDAITIALTRQSVIQAMANASAFEPWQPGTRSWRRVPEPWTTPDFIDNLIEQIAKMVVSHRPEHKISGELHKGSNFSRPYLYKGKSTVHTRCELSQLKPADIAANDTIVDKAILGLIRAKFDELGGNPKAFEDSQNLPCFITSSGRKIPIRKVRIRQVKEPKVAAQGDRERFVDSGGIHHVALFVARNNTRQEQWLSEVAQVTDVYQRCPRRDKRSGRPKSIANEPAVARTLRDNPDAEFLFSLMKDDTVELDYNGAREVFRVKKFYAAGPIWFTGVNNAQMDADQKKNKTTWSKNPNGLKTLNPRKVVVDLLGRVHSAND

SEQ ID NO: 10043 - protein, 959 aa, unidentified
  REGION 1..959: note = Description of Unknown: Cas Enzyme sequence
LKRRRQRMSEIRRLFRGHGLIEVQGPTGLRIAQLDPWSLRAEGLERKLTGPELAIALGHIAKHRGFKSNRKGERGANARDDSSKMLKAINETRDRLAQYRTVGEMFARDDVYTDRKRNRDGQFTHSVLRDDQAREVTVLFDIQRRIGNPLASAELEAAFTEAAFFQRPLQDSEHLLGQCPFEPAEKRCAKRAPSFERFRLLSRLRALTLSEGREERPLTPDQIAKAEGDFGLQKSFTFKRLRDRLGLPEETSFGGVARADEGRDFVGRASNAAEGTASLRGVIVDAAGEGAWRSLQNTPEKLDAMASVITFRDDIDSIRQGLTQIGLEPTVLTALMAAIEDGRPLKAAAAAGYVHTDRAGPGSPEGTMHERMVHDIKWVDGNVSNPVARKAVIEALKQVHAIVGVHGLPGAIHVELAREVGKSKEERDEIKSGIDKRNAAKDRLRDQFRETCGHEPSGADDLLRFELWTEQAGRCLYSDRAIAPQQIVASDNSVQVDHILPWSRSGDDSFVNKTLCFTTANQNKRGRTPFEWFGADPARWEAYRGVIESNRAMKGRKKRNYLLKDSSVLTEKFRPRNLNDTKYATRLVLDLLARLYPESDRFTGVPRKPEEERRKRRLFSRPGPLTDRLRRAWGLQGLKKGEDGKRIADDRHHALDALIVAVTSEGRLNHLTRLVQERENAGLPRDFGFVDPPWPGFRDEAQSMLREVFVSRAERRRARGEGHAQTVRRIEDAPDAQVVYERKSVDALTEADLDRIKDPDRNAALIASLRQWIKDKKPKDRRPQSPKGDAIAKVRLRTTKKVDVLVRDGAAERGEMVRVDVFRKKNKRDAWEYYLVPVYPHQVFDPEDWPSPPNAAVQAYKPEADWPHMNDGHEFIWSISPFSFIEVEKPDGTFIDGYFRGADRTTGAISLSPHYTRDESVRGIGVKTLRSMKKINIDRLGNRTEILREKRTWRGAVCT

SEQ ID NO: 10044 - protein, 1092 aa, unidentified
  REGION 1..1092: note = Description of Unknown: Cas Enzyme sequence
MSLDLEFSFDVGHSSIGWAVLQTTGRVSPEPETPRVSILGCGVVTFGSDDCLASKRRNYRRQRRHARATRQRIAQMEKLLAHKGVLSTEQLQHKHKQAGGHAAPWLLAARVLASGGDDKHLLDWPSLWDVLRWYAHNRGYDGNRRWSSQETESQAEDTEKEKAANALMGKFGTSTMAETLCKALGLEPLGEKAASDQNFKRLNAAFPRAVVEKEVRALMEFHRRKLPAIDAAFLESLFDDWRAAAVTNLKLPARYWGGLLFGQLVPRFNNRIISTCPITGEKVPSKNCPEFFRFRWAMTLANIRVAGGNDKEMRALSAAERKKVDAVMQINGALTPTELKKAVRETTGCSRDNLDTMLMHPDAKDALLVDPVQKLVKGDKLKSLWPTFSWRVQKRVRDLLHRGKPVSLERICGIAKKLGESLAEFEVELSKLGDASNTKRSKKAGSFDRDDMLKELLTIKKPEGRAAYSRPLLVRAYAEVMVGKHPKEVDGCLFITEEIRKAQLLKQIDQQTNNHLVRHRLLILERLLKDLIADPAYANRDRLRVAKVTIEVNRDLREMSGKSAKEIQQDLGRRLANHHNVAAKLEADLDGKTFNGKPIQITAGLIRKARIAEDLGWTCPYTGKPYDALDLVARQVDKDHIIPRSLRPADSLDSLVITFSEVNKMKGQRTALQFVSDAQSTVVEGLPQLSIISLTRFRQWVEGLETSKGHEDDKRRKKKRKELLLLQNYEDKGFTPRDLTVTSQLVRLGAQNIKKAFADVEKMPAVVSLPGAVTGTVRKSWNLLGCLSLAAPQIKEADGSIKNKTDIRNVTHLHHALDACVLALASHYLPNNGGLWELMIKRNPNEGEKTHLRSTGYFGIDKKGHFGLTELPDVLKEQIRQRLAEKRVVQHIPADMSGMRVEENTRGITSIKDDRVFLRQQSRDAKTGKLTIKPTDESRDKVIGLKPGKLTPQNGVRVITDNFGVAILDHCAEGEEKFVIIPWHKIWPRLQELKANNSGKLPRILRIGTLVRVPNKAGRSDYRGLWMVRGVQFNQKAGFLVDLSFPDVIQYRISGRDDCAQNIRLKALYDGGLEVLKPPLTGIASCPTTSSA

SEQ ID NO: 10045 - protein, 1179 aa, unidentified
  REGION 1..1179: note = Description of Unknown: Cas Enzyme sequence
MSFPDGVRQKYILGLDLGSASIGWAVIDLDGNLDPCGLLAAGSHIFDPGVEVPPAAGKMARDEAVFQGLDRSKAVGRRIARQMRRQIDRKGIRLKALFKLLQSKSLLPIYPELKGEPLAAERHHLFTRLDKELTDALCAEKRKRGTDGLMLEADQALPYVLRKEALERKLELHELGRALYHLCQRRGYRPSAADDSEKEETASTEEEIESKRGRRKKPEPEDKGDKDSESPKKVAEWISDLQAKMDAAHTPTIGAYFADFKHNNPHQERIRHRWTGREMFVKEFDLIWERQSEFYRDSRPGLLNDDLRNRVYDCLFFQRPLASAEHLIGMCDLERGERRAPWATLEAQRFRLLQKVNDLAYIPSGLFNERKLSLEQCATLAAALQDKGDMPFPEIAKLLGLPPKTEFNLMRGKKKKIEGNRINQVMLQVFGDRWRAFTEQERSSAVALWTKTEGFEERKNVAISQCGLDPWKAKEWAENRPPKDCCRHSRKALVKLIKRMEEGVPYATAKLEIYDSQLAGKAPLDFVPKVIETLPSINNPAVLRALTELRKVVNAIIRTYGDKPYEIRIELARELRKNRKQRQNATEAGDKQHLRRIDAARTILRECRNYDAQGRDAERLVRERRDDVTKMLLLMECRCLCPYTGDSISYLDLFGGEVEVEHIIPQSLMVDNSFNNLTLCYRKVNHEKLDKTPRQAFCRAEDDQQWIDIIGRVQKFGNKEKLHRFLLSSREDIDRFSNRRLNDTRYTSKLAGRLLMSLYGGRDIVPAETLDELDEFKDRTGRRAICVSSGMVTSLLRDAWHLNLSGVIGDDAFKCPKKSEDDEESGKRRKGQSNKKDRCDHRHHALDAVVIALTSEKVIREINMLASRLYRERQTPLKYRDLKSIQNPWHNFMDDHFRDIFRGMLVSHRPEHKLSGALHEATSYGKVRYYNAKGDPVRYQRIAIGKLLTDKQIEKIVDEEVKKSVVKLGETIGGYKKWSQEKHGWPKMPNRNGEPVPIKKVRIKITKNAKEIEAERFRGFGTGRPESNVEDKEIAYASFFTVQDRKGTKTVWEIVKLFEAAQRVRALPKSERGHEKICWKYPKYPDATFFRFSLMKGDLVELVLNGKPAIFIVRRFEFDSRLWVAPINAAGKDEEMEAAGHLLRLGFSRFLTMGAGDDKIPRPVFVDLLGQPHYINIGA

SEQ ID NO: 10046 - protein, 1095 aa, unidentified
  REGION 1..1095: note = Description of Unknown: Cas Enzyme sequence
MCGDAIQFAPFCAVGGRRVMGTRFAFDLGTNSLGFAIWRTGPDPSGTFGADAPLDLLWSGVRLFKDGRNPKDQQSLATMRRIPKQSRKRRDRFVLRRADLMSSLVEAGLMPPDTTEQKILEALDPYALRAGALDRSLRPYEIGRAIFHLNQRRGFKSNRKTDKADKDKGKIAVASTRLREALREHNCRTFGEFLWMRHRGRGHDPRRVRDPGRQPTRIRLEGAGAKALYEFYPTRDMIRWEFEAIWRAQSAHHPTLLTTESHDAVARVLFRQRDLKPPKIGKCTFVPGEERLPKALPSVEARETYERLAHLKIEDGAREERGLTPAQRDAFASVLLTEGKMTYAKMRKALKLGGGARINFEQAGETEMKGSLTGKLLSKPNHFGPRWLTLSWPQRDAFVAKLLEATDEDALVACLMREDGLSEEAARECATIPLADGYSRLGATANAAIFEALKDERERDGGLVTYAEAVRRAGQDREPPWHHSDERDGEIFARLPYYGQVLQRHVLPGSMDDKDRGDDAAFWGRIMNPTVHIGLNQLRRVVNALIVRFGAPDQIVVELARDLKQNAKQKEDEQKRNRENRDANDKRAAKLAELNVPDTGENRARLKLFEEQQRAGDGVALCPFSGRTIGIAQVFTSEIEIEHVLPRSRTLDDSAANKVLCFRDMNRIKRGKSPFEAFGGGPQWEEIAARAEKLPNNKRWRFKPDAMKQFEERGGFLDRQLNETKYLSRLAKAYLGKICDPDQIYVTPGTLTGLLRGKWGLNGLLSDDNRKNRTDHRHHAVDAIVIGAMTRGLLQSLAREAGRAERTEFDDTLGKVPKPFEDFRDAVQASLERLIVSNKPEHGKGGALHEDTAYGLIADPAEAKAIGNLVRRKPLVDLTAGEIDAVRDPVLRARLQAVATPFRDAKGKVRDDKALSAALAAFAATPLPDGKTIRRVRVGKADESAVALNDRRTGRPYKAVTPGENHHIDIVRMRDGSWKGFAATVFEVNQKGWRPLWERDKLGGKLVMRLHKGDAVEVDDGDGVRRVKIVVQIEPSAGRIRLAAHNEGGAFQKRNDDPDDTFRWDLATISKLRDRGCVAVRVDESGAARLKRSNG

SEQ ID NO: 10047 - protein, 1025 aa, unidentified
  REGION 1..1025: note = Description of Unknown: Cas Enzyme sequence
MKDYVLNKKPEPAANDKFLTGLVFGFDVGTGSIGYAVRKGNDFKDVGVLICDSEGSDLSKRRDLRRQRRTLRSKKFRRQWFAKELVKLGLPKSQTALDDPIALRLRALNGEMLKPEELHAALTHLFKRRGYSKVPWANVEKAVKETAKPKKDDDEGIIKEAVKEMKAKLGDKHPCQFLAEEKARVGNSPTTNWARKIYWPREVLRDEFLAIVKAQQKNFPQLAEKADWLLYGDSQLKEKNGETFHVFFKSTEARNPGVLGLRWPRFDNRGPALDSLQPVDEQGRPLHVVRKNKEAFANAQWELALMNFRVLDVETRQKRDPRTYFPIFIENVRNEWNKKGKVTEARLKKLAEPFKEKFLLIEDQKPLSPDTGAGRARYSSPTLNLIHKEISEGRRVDPPQPILRRKGENAEQALNRYLADIKHPLVRHRLVLFRRLLMQLVSRYGQPDMIVLEAVRSLALGQKAKNELNQRNEKFRKERENAREQLSSNNESISRKGIQRFRLWQEAKGRCPFCLQTIERTDLGHGADIEHLVPRSIVDCNEFYNLTVAHIKCNRELKGDRSPLTAFGGTSQWEGIKANAETCFTGRKLEIFLSPNAEELIEQKSDLQHTAYIARVIRHIALVQLGWLNEEGRDPTPEKQNPALKFQVTNGQLTSRLRKAWGLNQILHPLPPGKRWDELTDEEQKQFTEKNRGDLRHHSLDAMVICCTLPWLAHRTHGATDQFGHHGWWTQDEKQRSKAVNPLFPNEGQMHEVVKKEIEKVVVRHHVSRSNHQQAYATTLYAKKAKDTYVAREVFTSLTPKNLGSIWPETFASYCEAAWRRYSDESPDLEGELRRTKNCVPETFTRKLCFSHFQKWRQDDCPDFYWPNEIKIPIRSVRLISVKDDSAVVPFSPGTHAFVKRTGFKEVQVFLAEDEKSFVPVFIPYWKNDKLVSVKPIKQGTKPVAIIRRGMVVETKKAFSTGQPAGKYRVLVTSQLQLKLLPHHVANKEEAIVSFGLGKKGLQPMWADFIRVLGHELPHPPSVKP

SEQ ID NO: 10048 - protein, 1096 aa, unidentified
  REGION 1..1096: note = Description of Unknown: Cas Enzyme sequence
MNDKGKISPANSPTGTGPDLQLAFDVGHSSLGWAVLQTAGRASAEAESPSINLLGCGVVTFRADDCLASARRGYRRQRRHIRSTRQRIARMKILLAHLGVLTPAQLDLPGCAWPWLLAARVLRGGKLLTWPELWDVLRWYAHNRGYDGNRRWSAVEAEAEAVDTEKEENARTLMGQYGVETMAETFCKISGLDPLGSKKSCHLPGDKRPKGRNAAFPRATVESEVRRILKAHFGRLEKVDELLERVLLGRDPQDATAWQAIPCPELKLPKRYQGALLFGQLVPRFNNRIISECPISGGKVPSRNCPEFLNFRWAMQLANIRVARFGEKELSPLTVPERKQLDTLMRQQGGLGVEEFKKHVRQISGAIRDNLETMLMPPDAKEALLLDPVQKLTQSADLKAFWPLLPERLQKRTRGQWRRGKSITLAQLRGQLGSDTAVFDAEITRQLDAANTKGRKKNKPISRDDLLNKPFFVRKLDQRAAFARHILKTAFDEVMAGKHPKEEGNCLFVTEQMRQTQLQRDIADQTNNHLVRHRLLILERLLGDIIKEYAAGDKARIARLTIEVNRDLREMSGMTAKQKARDLGLRIANHHHVAGALEQNESLRKVLEQQGTHISAGLIRKARVADDLGWMCPYTSQRFEAVDLVTKRVDKDHIVPRADRASDALDSLVITFSAINKWKGKRTAWQFVEQEQGKPVPDLPNLSILSLTRYKQLVEGLETFKGHDDDIRRKKKRKELLLLPSYEDKGFTPRDLTTTSQLVRLGALSLRKAFIGCEQQPIIVSLPGSVTGTVRKAWKLLGCLRLACPQVLDESGEVKKKDDIRDITHLHHALDACVLGLASHFIPNNGHVWELIVKRNPNDAEKRELMALGVFGFGLENRFEMRDLDDRLKEQIRQRLAEKRVVQHIPASMDGLRVEQNMWRVVEIKEDKVILRQRIRQADHTRPEKTTEEKSGKLLGLNPVDGNGKLAKNKGVLIIPDNYGVALDPQPTIIPFHKVWPRIQEIRKVNSGKLPRIIRNGQIIRVAGGKNFKGVWKVFSAKNNAAGMALDIGSPDVVRLKNKTEGHKINVRLATLVTDGLEIIKTPLTGIAACPTTSSA

SEQ ID NO: 10049 - protein, 1082 aa, unidentified
  REGION 1..1082: note = Description of Unknown: Cas Enzyme sequence
MSPTLELAQKYVLGLDLGSASLGWAMIALNQAGEPTSLIRSGVRIFEPGVDGTALDIEQGKDQSKAVERRTARLHRRQLRRRAARQRELFQELQKAGLLPTNANGAGASSEQRHQLLNELDRSLTSKFLKPKDDSFAQKPLYLLRKIALDHALEPFELGRVLFHLSQRRGFKSNRRETKKSAKGNEDLGQLKADIHSLELAIQEAGARTIGEYFAGLDPHTEKVRRRWTARKMFEHEFALIWTAQLPHHAPLLTQELHDRVHELLFFQRPISAQKHLVGTCELERGDDKHPPKRRAPWATMAAQRFRMLQKINDLVVIDSKSQTSRTLTHEERGKLYQLLDREGTQSFTSIRKYLDFKGTTFNLEAGGDKDLPGNRTQKSMRKVFGIFWDEFTEGKQNQIIENWRNSESDESLMEEAIAHLGLDTEAAAVLVKESPQADYCSLSLTAITKLLPLMMSGRSFKDAETEIYGSRFSGFAVHETLPPVREALPTLRNPAVERAMTELRKVVNAIVREYGKPYEIRIELARELKKPRQERVKATTANRKREADNKGIAAKILSECGIANPSRTDLEKAKLFVECGGICPYTGRSIPFSQLFQDSEFDVEHIIPRSRYPDDSFQNKTLCYLPENREHKRNQTPFEAYSNNPDVWAQILLRVTKWSNPGKLSRFKIQSESELADFSARQMNDTRYTSVLAARLLAMLYGGRDVESDNGNRQVIFASSGAVTATLRRAWGFERILQAIVSPEPGETRGKPRTDHRHHAVDAITIALTRQSVIQAMANASAFEPWQPGTRSWRRVPEPWTTPDFIRSLTEQIEKMVVSHRPEHKISGELHKGSNFSIPYLYKGKSTVHTRCALSELKPADIAADDAIVDKAILALIRAKLNEVGGNPKAFEDPNNLPCFTTANGRKIPIRKVRIRQVKEPKVAAKGERERFVDSGGIHHVALFVARNETRQEQWLSEVAQVTDVYQRCPRRDKRSGRPKAIANEPAVSRKLKDNPEAEFLFSLMKDDTVELDYNGAREVFRVKKFYAAGPIWFTGVNNAQMDADQKKNRTTWSKNPNGLRTLNPRKVVVDLLGRVHPAND

SEQ ID NO: 10050 - protein, 970 aa, unidentified
  REGION 1..970: note = Description of Unknown: Cas Enzyme sequence
IRRQKRGMRRVIRRRRQRMSEVRALLSAHGLLVDADRDALRLGVDPWQARADGLTRVLSDCEFAAALGHIAAHRGFRSNSKRDRGANAADDSSKMLRAIAATQERLGKYQTVGAMFAADPAFADRKRNRGGDFNRSVLRDDQATEVTILFAAQRRLGNPKATAELETSFADAAFFQRPLQDSDALVGPCPFEPAERRAARRGYSFELFRLLSRLNTLTLIWHDGERRLTPDELAIAGKNFGKSKTITFKTLRKALDIDASVSFDGIKPEDEKNDVVARSGSAAEGSFVLRNAIGTAWPELVRTPEILDRMAEIITFRDDLTSIEQGLSDSGADAATVAAVIAAVKAGDCKNFKGAGHISARAARAILPGLWQGMVYSEACADAGYDHSITQLVKLDDIKNPVARKALGEMLNQVRAVIKEYGPIDRIHVELARDVGKSAEERDKIKSGIEKKNKERDKSRDLFRELLHQEPHGEDMLRFELWQEQNCRCLYSDELIPVEAVISSDNRAQIDHILPWSRFGDDSFINKTLCLAVANQNKAGRTPWEWFSQAKTPAEWDAYAAAVDGCKAIKGAKKRGFYLRKNAAEVEERFKSRNLGDTRYATRALLSKLGEEYGKDGVGVLARPGALTSKLRRGWGLQGLKKDAAGKRLEDDRHHALDAIVLAATSQSMVQRLTRAFQDAERKGLARQFAGEFVGAPWPRFRLDAEAAVSKVFVSRPERRRVPGEAHAATIKQVRAVDGENVVFIRKAVEKLTEKDLELIPVPAPYGRIADPARLREAMIEAIRAWWAGGRKADALPRMPNGDVIRKVRVRTSDKVAVDVRGGTADRGDMARVDVFRKPNKRGKAEFYLVPIYPHQIATLAAPPCRAVIAYKPETEWTQIDGGFVFAFSMFANSLIEVTKSDGEIIIGYFKGMDRSVAAVSISEQLSQHKLKSGIGTKTLLFFKKLSVNRLGVVSEVSQETRTWHGEVCM

SEQ ID NO: 10051 - protein, 1363 aa, unidentified
  REGION 1..1363: note = Description of Unknown: Cas Enzyme sequence
MWKRAIIMVLASNFKISDFTFSIDLPEHRRSIASTPQRENWKRGLAMKDYVLNKKPEPASNETVWAFDLGKGSIGEAVRRGNEFEHGESLLIPGKLARRGPAKDSGTPANRYRALKTREAHHERERWLEIVWAAVKLTVLRPREVWQNPETKKWELKHPADYQLEREFAPAEFRRDGKTGSQEKNVYPNGRAENDGAPAATSEDFDICYTSALLRIKLLNGDSALKDWQIYKALRAAIQCRGYGTVPWATKEARKQGKSAKELEQEEEKKLQQADPRYRDAVGRWPDFKRGLQKQNLPFFVGMQLSAAAKKNLRLPDDYYFVPPCYYDAWKMGLWNPAESDKVLARPNHRANSTRNVRFDRIDVRAELVRLGDQAAVLLPQIREAFVGWQRSGWKVRHPVTGAEKTYTVHAKTFGEFLCDGPAGQPDESSFEAFLQQREQAGLHRGSYEEWMAALGQKTPSFDNRILNDCTLIPRYHVCKVDVRLEAGKNGGITGKLIPESLLATEVTLLLKLKNLLVADPVAGQRKITVEELKDVFAYAHRQLKALNLVTPDGELIKEWPTKVAARFGLNKSDWKDIAAESEFLRKIKLFTAGSGGASRALTDEESVWLLRAVADSKGKTALEFPENLQALFKAAKAEWKKAKTAVDQNILRPMPGHEEVKAPRPSGRSGYSRVALRIIKELILSGQAPSVFHARLVQREAELLGDLGSSPGKPLCLFNDSVAVDKKQREQEDTENRKRGLLISELNFLLQMRRDNATEDSWKNIFIPSQTLDALQQRHTKGDKLDADAAIRELLGTINDPIVRHRLGVFDKRLQKLQDGDEKENIPSFGVPDAIVLEFVREDFMGEKAKRELQSFQKGREDDRKKAKEEAAKLGLESRSSGLRYELFKAQGCICLYTGKPLSETQLDTYEIDHIVPRSLGGPDAVVNYALTFHDINHTKEKGKLTPFALLHGKDGWDAYVKRVEARSTALRNKKVQLLTREDAPDLVERYTALAETAWVSKLAQTIVNLRFGWTNGYDQNRKKRVIVVSGGLTARVRRKYGLDKLLYKKDTDIEAFAKKLKNRADKRHHALDAMVLTFIPQWARDLGKEGFFRFSAEFRDANGREDYEKIRKLFDDSIAKVNPRYLAFEQPGLADMAYGQRDNGTMMVQRSLLRDLAYKSEQQKPVFNLTYAATQIKDVRDERIKLELLKFIATSPDKFAWDAFCYKFEKGELDSMRGIKVLKVLQNRKEAPSEFKDMSKDGSGAFRTRKEGHLGQFVYLDAKGKPRVEVVRVFDSIAKVKAEIEARGEGIRVIGFYQSLCLVKLDKPVVHGVVTLEPGTYQLNTIKKDGQGRAQVTSAGGEKSPEISLGKFLAAGFTRAD

SEQ ID NO: 10052 - protein, 1030 aa, unidentified
  REGION 1..1030: note = Description of Unknown: Cas Enzyme sequence
MNGTTVEAKDSFTEGLVFGFDVGTGSIGYAVRRGSEFLDVGVLICDSEGSDLSKRRELRRQRRTLRSRKARRQWFAGELVKLGLIRPSTPPTDPISLRLRALNGEALKPEELHSALTHLFKRRGYSKVPWANVEKAAKATAKSKPDDEEGLIKKAVGEIHHEMAERACQFPCQLLKVRRDEAGQSPIKEWGRKIYWPRELLEKEFRAIAAAQQERFPEFVQKTDWLLHGDSQAKLKGEETYHVYFKASQAKNPGILGMRWPRFDNRGPALDALQPVDELGRPLHVVRKNKDAFTQAQWELALMNFRVLDANTRQKRDPRIDFPVFIGNLRNEWSKKGKVTEARLKKLAEPFSDKFLLIEDQKPLTPETGAGRARYSSPTLKLIRREIGEGRRVDPPQPILQRKGEDAEQALNRYLADIKHPLVRHRLVLFRRLLVKLVACFGTPDTIVLEAVRTLALGQKAKNELNRRNETFRQERENAREQLASNNESFSRKAIQRYRLWQEAKGRCPFCLQTIARTDLGHGADIEHLVPRSVVDCNELYNLTVAHIKCNRELKGDRTPLAAFGGTSQWEGLKANAELCFRGRKLEIFLSPNAEELIEQKSDLQHTAYIARVIRHISLIQLGWLSSEGRDPTPEKQNAALSFQVTNGQLTSRLRKSWGLNQILHPLPPGKRWDDLTEAEQRQFTEKNRGDLRHHALDAMVIACTLPWLAHRTHGAKDQFGRHGWWTQDEKQRSKASNPLFPKEGQMHEVVKREIEKVTVRHHVSRSNHQKSYANTLYAKKAKDTYVAREVFTSLTPKNLAFIWPKEFAYYCETAWKQYSEESPDIAGELKRSKNCVPESFTRKLCFSHFQRWRQDNFPVFYWPQKIIIPIRNVRLISVKDDTAVVPFSAGTHAYVKRTTYKEVRIHISADGKKFVPALVPYWKHDKPVCNENINTQFGIIATIKKGQIVELKKALSAGYRPGRYIVTDFGQVQVVILPDYIADNEDARTGFGLPKTGIKPRWHEFVDSLGYELPHPPSAKPQPAGAAEA

SEQ ID NO: 10053 - protein, 1224 aa, unidentified
  REGION 1..1224: note = Description of Unknown: Cas Enzyme sequence
FIGLEKTRSEGKGQSELSGDAVRKSVFQLPLPLDGLGFSKLHEIGENMNVSNTTLTDGRIWAFDLGKGSIGEAVRQGSRFLHKASLLIPAEFAETKTAAGKRRMWRTRQAHKAREQWLDEVMRRAGIEPLHGRRVGKVDDNGHQKWVQTDKGDYRLEREFPPSRFGKDKAGQPKERVYPGGKAKDGAPAQTGKDFTTCYNSALLRIKLLRGEPLEPWQLYKALHSAIQKRGYGQVPWATRELKRTGRTEEEIEQEMAKKDPEYKAAVTAWGKFKQEFSDSRFHFPCYFDAAKMGLWQPDVLQERINCQAQSTRKVRFDREDVEKEIAMLARQAAQQLPQIQNSFETIKATGWAQSGKSFAVAAKDFGEFLVYGPAGAPPNDAKGDFGRYLFFRKRNGIHPGGSDDWMGATAQKVPRFDNRIINRCALLDGLQVCNVGIRYDAKQNRPYPDSLLASEVTFLMKLKNTLVSRTDGQRKLSPEEIRTVFKSVTVDAMAIPPGTKDWARKVAECYALTKTAWGSKKGVKELGLRPLAGHESIKSPKADGRSRFSRPALRLIRALILSGQNPDEFRRRLLARETTLLDEIGMDVRDLEPTSEVNGVNNFLKQPRPWILIKHLKFLEDLEKANNSWEDIHIPEQRLDSLEARHTAEDDVFDKQAAIRELIGNINDPVVRHRLGVFTRRLEELHRAHGVPATIVLEFVREDFMGDQAKRDLQKFQSDREKSRKEAREKAAELGAGERSAALKYELYKAQGCICLYCGQTLAATDMADHEIEHIVPRSQNGPDAMVNYVLAHKECNEQKDEQTPYQWKHGKEGWNAYENIVKQHAVALRNKKVQLLLREDAPELVQRYTALAETAWISKLAQTIISIHFGWRNGIDYQGENPAKRVIVISGGLTARIRRKYHLNSLLNPPPPGTLNLNEWEANAEKNRDDDRHHALDAMIISFLPAWVRDAHKEHFFRFPETVHENARAFFENEINQVAPKFIAFLKPAFEETFYGQRTIAGEQFIVGREKLAALAVKVVANKRVLKARKDIEFQRIVDPQIRSKVESFLNDNLSLTLDRWDKWCEEFRLGEGGQCVGKILATKSKAGSLDEYKDISKDRTGQFRRGAKHRGYFVFERPAPSKNEPDKMQIDVRPVFVFQNVAQIGNELSKQHGVVLLGYFESGCQVHTTGEWEYKGQKFPASNYICTSIWSNRNAKLKHPRFGEIGPVGLRILFNAGLKRV

SEQ ID NO: 10054 - protein, 1072 aa, unidentified
  REGION 1..1072: note = Description of Unknown: Cas Enzyme sequence
MKDYVLNKKPEPASDEIVWAFDIGKGSIGEAVRRGNEFLHKASLLIPADFGETRTARNRRRMFRTREAHKARERWLNEVMQSAGIEVLHGRNYDESGTWKPGERADKRLEQEFPAPGDNTCYTSCLLRIKLLRGEKLESWQVFKAFHSAIQRRGYDKDIPWKTRETRETKDGGDDDVGTEKRMHKFEQDLESMAPGKTDFHFPAYFDAYQMGLWNPAKPDELKLRSDCHAKTTRNQIVPRNLVEAEIRRMVEGASKHFPELAGKADYLLYGIAKQRYASYQPKLREEFKLREGGANDWQGVVGQKIPRFENRIIAKCVLIPRLNVCKLREGEKGQPHEKSLLAVEVAFLMKLKNIRVQRPGGKGWLSAEEIRAILENPERKDWKFTKSAWRKLCFSIGAIPLPGHDEVESPRFSGRSRFCRPALELLKRLILSGKTPSRFLQEEILRLNGNKDPLKGLVEADLKFIGDMAAKHDAWEGVYIPNQQLDALVELSSDSAEAITTLIGRQNDPIVRHRLSVFYKRLFEIEQTTKSRPDQVVLEFVREDFMGKKAKIEYLSFIKKRAEERAKAREEAANAGATERSAGLKLELLRAQDGCCIYTNEGLVPSKLDEYQIDHIVPWSKGGPDAVVNYVLTTQKANEAKADRTPYDWFHQEMPEKWDAYVNRVRARATHLRNKKVQLLIGLNAVELADKYTALAETAWIAKLAQAIVGLHFGWRNGVDENGIKRVTVISGGLTGRIRRKYALNQVLNPNAKTEEEAEKKNRDDDRHHALDAMVISFIPSWVRDAMKEKFFRFPDPIHQNAKGFFEKGIASVVPRNLCFEKAALAETIYGARTDHGKKVIVQRAELVSLGMKPTTPGKSVYDLKYAVKQSQSIRDSIIQARVLEFLTTNPDEMAWRKFCAEFHLKSKDGSLGSRVLSVTVNVGEPTEYKDMSKDGTGAYRKALKGHKGQIVYWDAAGELCVAPIYPHDSLFQKREKINSLGGKSKFYEFFQSDCPVLTKREIPAEGYKLVIKNAAKQKRRVLAEKPLPPCELTLRTIITKDLIGELTLADNTRVVASLDVWVAAGLERIL

SEQ ID NO: 10055 - protein, 1348 aa, unidentified
  REGION 1..1348: note = Description of Unknown: Cas Enzyme sequence
MPSVAIVFRNDLGTNSIGWAIRDSDAIDNQIVDKGVLTFEKGVGEGKSGEFPLVQKRTESRHKRRNYQAEKYRKWELLECLIESNMCPLNISELDEWRKYKMGIGRKYPQSKKFIEWLRFDFDGDSKPDFERLGFDKHENHYLFRMLAVSENEEHKKIFQNNLQLLGRVFYHLVQRRGFRGRDEEEADTMLKGSDKTGTRGRNEIANEIERYKTLGAALYYINKDENKRIRKRYNLRTDFENELKEICRVQNLNDAIYKRLWKAIIWQRPLRSQKGLVGICTYEKNKSRCPVSHPLYEEFRTWVFINNLKIKLPETIDKLSYLQEKIYPLFYNASNDFKLVSIIKQLKKDNGIIESKFYPDTKVVSCRLLNSFENLLGENWKKEFGWDEALVNLPKKCNYSFEDIWHVLFSFDSAEKLREFAKEKLKFNDDNAVKFSKIKLQQGYTTLSISAIKKILPYLYHGFVYSEAVYLANLSKVMGEKEITPDIAKNFASIIKDIIKEHNEEKVLISVANNLISSQLNSEHRYRIESNRELDDAEKREVDEKLIDTFGIKTWDEKNEEEKKHFKNFVQNKYLEFLRKPSSSKKEDLFISIPRLHDKIFKHLQDMYNIPDENKKYLWHPSEQETYPDAKEKNNIKQLGDPQPISRGFKNPMALKSLHKLKQLVNYLLQAGKIDEDTRIVIEIARELNDANRRKAIEKWQRSRENENDEYKNKIQEIIDEHHLNIDVNNKKIIEKYRLWAEQNRSCLYTGKVINCTELFDGTKYDFEHTIPASMSFDNELKNLTIADSKYNREVKKKRIPTELENYSVKVTVNEIEYSAIEPRLQFMKDKVEQLENLYEEWKNKSRFASSKNIKDAIIQHKHLIGFDLAYWRKKLDTFTCKEYKAGWRNSQLRDTQIVTKYALPYLKTVFRKTEVQKGSVTAAFREIYKIQPRLEIKDRSKHSHHAIDAAVLTLIPPAAIRDKILLRYNEEKDINPNNTYHENPRGWKNFESKHILSIEDDVLINFQPQHRTLIQTYKNVRKRGKQQHVRFKDVKGKWRYKLDKNGNKISLVAQGDTIRGQLHKESFFGAIKIKDEMYLVERYPISLFTSINDCKNIIDHSVRELVKLIIEKRMSEGMPFDKAKLDPIPFPNGKSFIKKVRCKVSAGRGYLTPGKALEINKHDFLSKHDYKRYTYAQNEENNVCLYYEGEIENKIERAFRIVGLFELSKLKLKEYADIKKEPYYQTAQVGRGKNKITVPISQILQVGQKVILCKEHIEELKSLEKERLFMRIFRIYKFNEPAPATVYIYLQNHLEAKTNEELGNGEKEVNFNIYQSRIFLNSAKFNCAIENKHFETTIDGAIKWLF

SEQ ID NO: 10056 - protein, 1093 aa, unidentified
  REGION 1..1093: note = Description of Unknown: Cas Enzyme sequence
MNDYVLNGKTAPASNSDTVWAFDLGKGSIGEAARRGTEFLHKASLLIPSDFAETKTSAGRRRMWRTRQAHKARERWLEEVMRAANIEVLKGRQIGKVDAAGNVIPKEQWNKSKGKWAEIAKGDPRLEREFPAPGDNTCYTSCLLRIKLLRGEKLEPWQVFKAFHSAIQRRGYDKDIPWKTRESRSAKKDGDDEDAGTEKRMHDFELALQSMAPGKTEFQFPAYFDAWKMGLWNPAEPNELKYRTDCHAETTRNQIVPRKLVEDEIRNMAAGAAKHYPALAGKSEYLLYGPTGMSYASIKPEVRKKFPLLKLREGAVTDWQGVLSQKIPRFENRILGKCALIPRLNVCKLREGDKGQPHENSLIGVEAAFLMKLKNLRIQRPSGLGWLSADEIRAILEDPKRKDWKITESAWKRHCVTIGAIPLPGQEKIDSPRFTGRSRFCRPALEVLKRLVLSGKKPSEFLKEEIQRLKENKDPLKGLIEADLKFIADMAAKNDTWEGIFIANQQLDALTELSSNSAEAIMRLIGQQNDPIVRHRLGIFYQRLCKLEQTTNSQPDQVVLEFVREDFMGKKAKLEYNSFIKKRAEERIKAREEAARVGATEKSAGLKLELLRAQDGCCLYTNEGLIPSKLDEYQIEHIVPRSKGGPDAVVNYVLTTQKINEAKGDRTPYDWFHQEMPDKWDAYVNRVRARATHLRNKKVQLLISPNANELAERYTALAETAWIAKLAQAIVGLHFGWRNGVDKNGNKRVTVISGGLTGRIRRKYALNQILNPNAETEEEADRKNRDDDRHHALDAMVISFIPNWVRDARKENFFRFPEPIHQNAKGFFEREIASVVPRNLCFEKAALAETIYGARTDQLKKVIVQRAELVLLAMKSTTPGKTVYDLKYAVKQAQTIRDPIIQKRVLEFLTTSPDEAAWRKFCGGFHVKRKDGSRGPRVLSVTVNVGEPTEYKDMSKDGTGAYRKALKGHKGQIVYWNDEGKLCVAPIYPHDSIFQQREKIKSLGGKSKFYEFFQSDCPVRTTKEIPAESYKLVIKNEAKQKRRISAEKPLPASELTLRTIITKDFIAELTQANNTRVVASLDVWVNAGLTKII

SEQ ID NO: 10057 - protein, 1461 aa, unidentified
  REGION 1..1461: note = Description of Unknown: Cas Enzyme sequence
MKNILGLDLGTNSIGWALITHNSNEHKYEIVKLGSRIIPMGEDVLGKFDSGITESDTAKRTGFRGIRRLRERHLLRRERLHRVLNILNFLPEHYASEIDFEQKLGQFKKETEPKIAYHLNQETKKFEFLFKESFREMVEDFKIHQPQLLEGGKKIPYDWTIYYLRKKALSHRIQKEELAWLLLNFNQKRGYYQLRGEDDDYQTDDKVTEILTLKIMECIKEEKYKNTNQFWYKIILEGGYEYKRTSENSFEHWINTSKDFIITKELNEDGTIKYTKDKKEPKPKISIELLPTFEEIEAVTDEIKKGKLYKKIKLRTEDTINKSGKTVGSYIYDTLLQNPKQKINGKLVRVIERNFYKKELEQILKTQKDHHIELQDKQLLTTCTQELYKNNEAQKSGLENKDLVHLFLNDIIFYQRPLKSKKSLISDCKFESRTFIVDGNKKTEPIKCIAKSHPLFQEFRLWQWIKNLRLYEKATDIDVTNNFLISGEDWVNLFDWLNDRKEIEQEPLIKFLLKSQNLKPKVLSSEARKYRWNYVYDHIKDESKKYPCNKTRNAIISKLGQKCKSFLTTENEIKIWELLYSVNTKEETESALSKSEHRDKKKDKPNKYSIFNFLVENGFSEEEINALKTAKIEEKDYGSYSTKAIKKLLPLMRIGKYWNERNIHKETKDRILKIITGEFDETIKDRARDKAINLKEIQDFQGLPIWLTSYIVYDRHSEDGDIKKWKTPQELEAYLKEFKQHSLRNPIVEQVITETLRVVKDIWSVYGRGVDNFFDEIHIELGREMKNPADKRKEITVQIANNENTNLRIKALLAEMMNDSRVENVRPYSPNQQEILRIYEDGALHTERELPDDILKISKTAQPSKNDLIRYKLWLDQKYRSPYTGAVIPLNKLFTTAYEIDHIIPQSRFFDDSFSNKVICETEVNKLKDNKLGLEFIKAHKGVIVELNFGQTVEILSVEVYERTVTEQYSKSRGKMKKLLLEEIPEKMIERQMNDTRYISKMVKNLLSNIVRAETKDDGTTSVNVLSSNGQITSVLKQDWGLNDIWNSIIAPRFERLNEMTNSTNFGTINEKTQKFLPTVPLELSKGFSKKRIDHRHHALDALVIACATRNHINYLNNQNALEKGKNKEQKQKSREDLKQILCYKKYDEGSNSNYKWVFKKPWETFTQETKEQLLTTIVSVKQNLRVINKTTNKYEKWESKNGKLEKVIARQTKGESWAIRKPMHKDTVSGLVRLRFKKTVQLSAALDNWEDIIDNDLRKLIKALVEDKYDKKALQKYFKQLNNIWNDKDIKKVEIYYWDKENVASRVKLDESFNESKIESITDKGIQQILLNHLNKEKYQNRIDEKGKPIVPESVAFSPDGIDELNKNIKELNNGKFHQPIYKVRTYEPKGNKFNIGQTGNKKDKFVVAADGTNLFFAIYKDEKGNRNYEAIPLNIIIENQKQGALQNKNPKECSVPQTN

SEQ ID NO: 10058 - protein, 1046 aa, unidentified
  REGION 1..1046: note = Description of Unknown: Cas Enzyme sequence
MKDYVLNKKPEPAANDKFLTGLVFGFDVGTGSIGYAVRKGNDFKDVGVLICDSEGSDLSKRRDLRRQRRTLRSKKFRRQWFAKELVKLGLPKSQTALDDPIALRLRALNGEMLKPEELHAALTHLFKRRGYSKVPWANVEKAVKETAKPKKDDDEGIIKEAVKEMKAKLGDKHPCQFLAEEKARVGNSPTTNWARKLYWPREVLRDEFLAIVKAQQKNFPQLTEKAAWLLYGDSQSKEKNGETFHVFFKSTEARNPGVLGLRWPRFDNRGPALDSLQPVDEQGRPLHVVRKNKEAFGNAQWELALMNFRVLDAETRQKRDPRTDFPIFIENVRNEWNKKGKVTEARLKKLAEPFKGKFLLIEDQKPLTPDHGGGRARYSSATLNLIHKEISEGRRVDPPQPILRRKGENAEQALNRYLADVKHPVVQHRLVLFRRLLMQLVSRYGQPDMIVLEAVRSLALGQKAKNELNQRNEKFRKERENAREQLSSNNESFSRKAIQRYRLWQEAKGRCPFCLQTIERTDLGHGADIEHLVPRAIVDCNEFYNLTVAHIKCNRELKGDRTPLTAFGSTSQWEGIKANAENCFSGRKLEIFLSPDAEQLIEQKSDLQHTAYIARVIRHISLIQLGWLNDAGRDPTPEKQNPALSFQVTNGQLTSRLRKAWGLNQILHPLPPGKRWDELTDEEQTQFTEKNRGDLRHHSLDAMVIACTLPWLAHRTHGAKDELGRHGWWTQDEKQRSKAANPLFPNEGQMHEVVKQEIEKVVVRHHVSRSNHKRTYDTTIYGRPKRSGVPIPDCYVSREPITALKPADLKSLKTGKSKIFPPELGDYLASAWEKYCETEPEWEKQIKANNKCLPEAFQKRLCFSDFQRWRQDGAPVFVWPKQIKIPIKRVGYIGVEDDSAVAPASPGTKGFVARGSFREVHLHPSEDGKSLVPVFVPLWRLDKPIPKAPIKPDSEPVAMIRRGQTVEIKNSPGRNTPVGKYRVASTMQQNIKLLPVHLADIKESLKASGFLENGVNISWDTFIKSAGYELPHPPSVKPQSESPHQA

SEQ ID NO: 10059 - protein, 1099 aa, unidentified
  REGION 1..1099: note = Description of Unknown: Cas Enzyme sequence
KAYPKNPEFLNWLKTDEAANINPYHFRDKASKENLSLKDLGRAFYHLSQRRGFLSNRLDQGSDGIVDQIRSELLRSIEYENDIEELKGVIEITKLNYSESDDKATQKFLKGFEKTFEANKAKPIEELKDALLKFLNKTENLGAVKKGIAELTIKIKDAECETLGQYFYKCYQKKEKIRAHYTSREEHYLNEFKKICEIQKLTQKTCNDLEDAIFYQRDLKSQKGLIGKCSFEKNKPRCPISHPAFEEYRALQFINSIKATNESGEMVFLSKDERKKIWSKFIRKSKPNFDFEDIAKELTPKGKQRKFNYKDHHAVSGCPTISQLISIFGEDWKESVYEKYTNKQTKKGTKSADDVINDVWHVLFAFNKDEKIEEFAKSKLTLDTIKAKKFSKIVLRKDYSSLSLKAINKILPYLYEGSIYSYAVFLANIDVVIGSAIWDNTENQKIIRNAIKNLIDNNAEIKKRESLVNDLVAQFKENYDNSHSDYKLDEQDKKDVKNKILSVYGKIYFAGLSLENQNEIVYWVENKYLEQLRKHRTEFIKPKRLDEQIGEFLRDNFNVSDNDLEKLYHPSDIEIFKPPKRNEDGKTYLGSPVVSSIKNPMAMRTMHQLRKLMNTLIKEGTIDEETKIHIELARELNDANKRKAIQDWQKDRQEDRNKYKEDIKALYKAECGLNIEPSEEEILKFQLREEQNGICLYTGKTIKICDFIGGNPLFDIEHTVPKSLGLDNSQENLTLCDVSFNRKEKGNKLPSELSNYAEILPRLATWEKEIEKYEILFNSRKKARGAETKEQKDKRIREKHYNKLYLDYWKGKYKRFIITDVPEGFKNSQMVDTGIITKYARAYLKSVFEKVYSVKGVMTAEFRKAWGLQNDYEKKERNNHIHHCIDAITIACMTKDKYDLLAFAWGQDDEGKKQEAKKILEESKPWKTFAQDLNTIENEILVSHYTPDNMKKQSKKKLRKGGKIQNKKNGKPIYQQGDTVRGSIHKETFYGAIIKPNQKDDLIPKYVLRKKIDSLAIGDLKNIVDPAIQSIIQKAVDDKGLNQAIKDGFFMESGVPIYKVRTYSPTVTKPIFLKEHRDKSRFEYKLNYHVMNDGNYLMA

SEQ ID NO: 10060 - protein, 1510 aa, unidentified
  REGION 1..1510: note = Description of Unknown: Cas Enzyme sequence
MKKILGIDLGTNSIGWALVEKSDDESRGKIVNAGSRILPMSQDILGKFDSGQSISQTAERTGFRGIRRLRERHLLRRERLHRVLNILGFLPEHYAKQIDFNKHFGQFIPETEPKLSYRLNIETNKAEFAFKNSFEEMRADFAIHQPHLVEGGREIPYDWTIYYLRKKALTHKIAKEELAWLFLNFNQKRGYYQLRGEEEEENSSKQVEFYSLRVTGVVAADDKKNKDEIWYNVHLENGWIYRRTSKIPLDWTGKTKEFIVTTDLNDDGTVKTDKEGKEKRSFRAPGEDDWTLLKKKTEYDINQSHKTVGSYIYDTLLQNPNQKIKGKLVRVIERKFYKAELEAILTKQKEFHTELKDMSLYQSCLEELYENNEAHRNSIGQKDFTHLFLNDIIFYQRPLKSKKSLISNCKFESRSFIKDGKKETEPLKCIARSHPLFQEFRLWQFVQNLKIYQREKEVDDKLQTDVNVTGELLKSGEDWINLFDWLNNRKEIDQKAFLKYPEFNLKKNAEKYRWNYVEDKIYPCNETRSQIIYRLEKAGITPSVLTEENEVELWHILYSVEDKSDIQKALKTFANKKALGDGFVEQFKKFPPFKKEYGSYSAKAIKKFLPLMRTGKYWTEENIDIKTRSRIDKIVNGEYDETIRNRVREKTINLGSISDFNGLPHWLVSYIVYDRHSEDGETLKWKTANDIKLLQQHSLRNPIVEQVINETLQVVRDIWKQHGNGEENFFNEIHIELGREMKNPADRRKQMTNQISENENTNLRIKALLAELLNSGDVENVRPYSPAQQEILKIYEEGALSAEENIPDDILKITKLAQPTATELTRYRLWLQQKYRSPYTGEMIPLAKLFTRAYDIEHIIPQSRYFDDSFSNKVICEVEINKDKDNSTAYEYIRNNRGKKIELSLGKEATLFTIEEYEDFVKTHYSKSRSKMKRLLMDDIPEGFIQRQLNDTRYISKVVKNLMSNIVREKDEQEAISKNVITSNGTITSTLKQDWGLNDVWNEIITPRFERLNELTKSTNFGEWTNKGGKKVFQTQVPIELQKGFSKKRIDHRHHALDAIVIACATRSHVNYLNNESALGKAKKEEKEKKRYDLKQKLCFKEYNDDSKKNYKWVFYKPWELFTQDAKETLYGIIVSFKLNLRVINKTVNHYQVLKKDEAGKTIKEIVKQIKGENWAIRKPMHKDTVSGLVKLKFKKTVSLSAALDNWKMITDKELRKQIKELTTHNYDKKKLMKFFKDQNNKWLDKDISKVEVYYWDNENVASRVKVDESFDSSKIESITDASIQKILLNHLETFHEDKNGKIAEHPELAFSSDGLDQLNKNITRLNGGKLHKPIYKVRTFEPKGNKFIVGTTGNKKDKYVEAAKGTNLFFAIYEDENGKRSYDTIPLNIVIERQKQGLSTVPEKNESGHKLHFYLSPNDLVYLQNVEEKEVLPPVNILNLTQEQKKRIYKVVSFTGNRLSAVPYPVAKSIVDKVEFTQLNKLEFSLEKLSIKDSCVKLKVDRLGNISKI

SEQ ID NO: 10061 - protein, 1241 aa, unidentified
  REGION 1..1241: note = Description of Unknown: Cas Enzyme sequence
MRKILGLDLGSASIGWALIEESVDNKTSIIGLGSRIIPYEGTEGKDFAKGTGESRNSLRTKARTARKGYDRYQLRRKYLVETLVKANMFPDETLKSLPKIELWSLRNKAVNSQITLKELGRLLLWLNQKRGYKSSRSDANLGKKDTEYVATVKSRHEKIKELNLTIGQYFYNELSNNQFFKVKENIFPREAYIEEFEAIYHTQKQFYPETLTEEFISKLRNEIIYYQRPLKSQKGLVSVCEFEGFWRTGKDGKEYFVGPKVAPKSSPIYQLSKMWENINNIKVGSRSGGDVEITSEQKIAIFQHLDNNEKLTVTDLLRILQLDRKNCYVNKQIEKGLIGNITKNAIRQCLGNSTQYNHLLNLNLNIVESDTKGYRIDKKTGEILNEKTTQYIDADIEYQPLYQLWHTIYSIQNKQECSNALQTKFSIEPTIADKLADIDFSKHAFGNKSAKAIRKILPYLMEGDKYSEAMSYAGFEHSDSLTKDENLKRKLLETLKPIEKNSLRQPIVEKILNQMVNVVNAIIEKYGKPDEIRVELARELKQSKEERNDTDKAMNKRQRENENITKRLAEYGLKATRNNIIKWRLYEEIDNEEKKLNAVCIYCGQPISLTEAIKGNDVDIEHIIPKSKLFDDSQSNKTLAHRHCNKNKNDMTAYDFMKSKPTEVFEAYIERVNSLYANYVINKTKRDKLLMTEDKIPDNFIDRQLRESQYIARKAREILQTICHNVWATSGTVTSELRHLWGWDEITMNLQFEKYKQLGLTEMVEWESEHGKNKHQKEIITGWTKRDDHRHHAIDALTIACTKQGYIQRFNTLSAEKTREDMKAAIEERSVTFNEKRSLLEKYIISEQPIAVAEVQEAVANILISFKSGKKVAVVGKRKIGKHGNKKVVQTGIIIPRGSLSEESVYGKIRTIDERKSIKYIFENSQLILKPYIKQLVEDRIETNNGDYKKALASLKKEPIYLDDKKEILLEYASCYKTEYVIKYSVDINFNKVDKVIDGKIKGILQERLDKFGGKAKEAFKDVQLCDKSIIKWYEDESLERPIKSVRCFTGLSAVVPVKKDEDGEDIGFVKPGNNHHIAIYTNNDGNKIEHVCTFWHAVERKKYGIPVIIKDVSEVWDKIQMQPERTYPESFLEKLPNIQLKFELSMQQNEMFVLGMVNEDFQMAINENNKSLISRYLYVVWSLSESDYWFRHHLETKNAEIKNIDGARESRRFYRTKSIGGFLGLNPFKLKIDRLGNIPI

SEQ ID NO: 10062 - protein, 1389 aa, unidentified
  REGION 1..1389: note = Description of Unknown: Cas Enzyme sequence
MKKILGLDLGTNSIGWALVNEAENENEKSSITKLGVRVNPLTVDEQTNFEKGKSITTNADRTLKRAARKNLQRYKLRKENLIEILKTNGFITNETILSENGNKTTFETYRLRAKAATEEVSLEQLVRILLMINAKRGYKSSRKAKSQDEGQLIDGMGIAKKLYEENITPSQLVYQILKEGKKFIPDFYRSDLQAEYDKIWDFQKQFHSKILTDEFKKQIAGKGKVNTTKIFLAKYGIYTADNKSTEKRLQAYKWRVDSLSKELSKEELAFVISDLTGTISNSSGYLGAISDRSKELYFNKQTVGQYLMAQLDENPHTKLKNQAFYRQDYLDEFNTIWETQAKYHKELTAELKGEIRDVVIFYQRRLKSQKGLISFCEFESKQIEVEIEGIKKKKTVGSKVCPKSSPLFQEFKIWQVLNNIQIINKLNDKRFLTDDEKNCLFSELNLKDKISKAEALKLINKNSKEYDLNFDNIEGNRTQCSLYKAFQTIIELSGHDGFDFNKMSAVERIQTIKSIFNGLGYNVDILQFNSELDGISFEKQPMYQLWHLLYSFEGDDSNSGNEKLLNKITELYGFEREYAKVLVNINFQPNYGSLSTKAIRKILPYLKDGFAYAGRNEFPDELSACEYAGYRHSKSSLTKEELENKVLKDKLDILPKNSLRNPVVEKILNQMINVVNTAIDVYGKPDEIRIELARELKKSAKEREDATKSINDATAEHEKHRITLKKDFGLTNVSRNDIIRYKLYLELKDNGFHTLYSETYISPTKLFSKEFDIEHIIPQSRLFDDSFSNKTLEKREANIEKANDTAYDYICKKTNEVGLSDYLKRIENLYKAGNISKSKYNKLKMKGEDIPCDFINRDLRDTQYIAKKAKLILEELVKDVVSTSGSITDRLRQDWQLVDVMQELNWEKYDKLGLTEIIENRDGHKIYRIKDWTKRNDHRHHAMDALTIAFTKRSHIQYLNNLNARSDKGGSIYGIETKELYRDDKGKLKFKAPIPLKEFRVEAKKHLENTLISIKAKNKVATININTTDKKNGVNKKKQLTPRGQLHLETVYGSIQQYATKEEKVNANFNEEQILKVAKKAYREALLIRLKEFDNDPKKAFTGKNSLDKNPIYLDIEKTLKVPEKVKIVTSETVYTIRKDISPDLKIEKVIDCKIKTILETRLKEFGDDAKKAFSNLDENPIWLNEKKGISIKRVTITGISNAVSLHEKKDKYGKLILDKNGNPQPVDFVNTGNNHHVAIYMDENGNLQENVVSFFEATTRINQGLSIIDKEYKNQDGWQFLFSMKQNEYFVFPNEETGFNPNEINLLDSDNYNLISPNLFRVQKFSKVIYGNSAVRDYVFRHHLETTINDNKDLKDITFKSIKSLPIFNNIVKVRINHLGQIVSVGEY

SEQ ID NO: 10063 - protein, 1082 aa, unidentified
  REGION 1..1082: note = Description of Unknown: Cas Enzyme sequence
MGMEIHENRTLGIDLGIASCGWALIEQDEDGGGRIVAMGSRTWDAPETDKERTPTNQLRRGHRGMRRVLKRRRQRMSEIRRLFRSHGLIEVQGPTGLRIAQLDPWSLRAEGLDRKLTGPELAVALGHIAKHRGFKSNRKGERGANASDDSSKMLKAISETRDRLAQYRTVGEMFARDDLYTDRKRNRDGQFSHSVLRDDQAREVVLLFDRQRRIGNPLASAELEAAFTEAAFFQRPLQDSEHLLGFCPFEPAEKRCAKRAPSFERFRLLSRLRALTLSEGREERPLTPDQIAKAEGDFGLQKSFTFKRLRDRLGLSAETSFGGVARADEGRDFVGRASNAAEGTASLRGVIVEAVSEGAWRALQNAPEKLDAIAAVITFREDIGAIRLGLMGIGLESTVLDALMAAIEDGRTLKAFSGAAHISAKAARAMLPHLRAGLTYDKAAAAAGYVHTDRAGPGSAEGTLHERMVHDIKWVDADVSNPVARKAVIEALKQVYAIVGAYGLPGAIHVELAREVGKSKEERDKLKNGIETRNKAKDRLRDQFKETCGHEPSGAEDLLRFELWKEQGGRCLYTDSCIAPHQIVASDNSVQVDHILPWSRSGDDSFVNKTLCLTTANQNKRGCTPYEWFGADAERWEKFRAAVESNKALKGRKKRNYLLKDASVLTEKFRPRNLNDTKYATRLMLDLLARLYPASDRFTGIPRKPEEARRKRRLFSRPGPLTDRLRRSWGLQGLKKGEDGKRIADDRHHALDALIVAVTSEGRLNHLTKLVQAREDAGLPRDFGFVDPPWPGFRDEAQTRLGEVFVSRAERRRARGEAHKAGVQSVVDTEDGPLVYERIAVDEKFTLDDVARIKDPERNSALVEALTEWIKAGSPKDKRPVRRYGGINKEGVQKEPERLEEIRKVSVLSRSRPSVRLHHGREEGPPGTADRSAIIRLDLYENVEVKTRSRYKFVPIYAHQIVEKRAPIRVFTLKTDYAIWPELSSSDQFLFSLNPFCFVEVSWKQRGAKEAIPLEAYYRGFDVNDGRIALSFHTSRDSNAKHLQWRLSPTTILELRKFAIDRLGNRTEILREKRTWRGAVCT

SEQ ID NO: 10064 - protein, 1053 aa, unidentified
  REGION 1..1053: note = Description of Unknown: Cas Enzyme sequence
MNGLVFGIDQGIASCGWAVLRHPTPNDPTGEIIAMGSWMFDVPETDKERTPTNQIRRGNRLLRRVLRRRAQRMAEVRRLFAQHGLLAGQEPDALKRAGLDPWELRARGLDKLLSATEFAIALGHIAKRRGFKSAKKGKEANTAGDDQKMLKALEATRERLGRYRTVGEMFGRDNDFRDRKRNRDGLFDRTQSRDDLIHEVGELFKAQRRMGSDAATAELEGAFTSIAFRQLEMQDSEKLVGMCQFESKEKRTAKFAPSFERFRLLSKLVHLRITTPEGERPLTPEQIALATADLGATAKLTVKAVRKRIGMADSQHFTAIKPEDESQDIAARTGEAMHGTKKLRDALGEALWAEMQKQPEQLDRIAHVISFYETADTIDIELRKLGLHSGAVDALLADLGAFSRFKGAGHISALAARSLIPHLERGLRYDQACEAVGYDHAASRWAKREQVTDKQAFNRLVEDMGKEIANPVARKSLTEGLKQLWAMRNRWGLPDAVHIEMARDVGNNLEKRNEIKRGIDKNTAERERQREEVRELLKIEDVNGDTLLRYRLWKEQAGRCPYTDKAIPPTAIIATDNSHQVDHILPWSRFGDDSYSNKVLCTAEANQRKKGQTPFEWLMAWQGEDGWNTFVARIEGNSAFRGAKKRNYVLKNAKDAEERFRTRNLNDTRYACPMLAEAVKLFYPEGQRQEKEGERRVFTRPGGLTAALRHAWGVESLKKVDGKRVDDARHHALDALVVAAIGEWEVQRLTKSFQEWEQKGLARPLRQVDPPWGDAASFRREVQQAYDDVFVARPERRRARGEGHAATIRQVKERDGAQVVYERRSIADLSEKRLADIKDPERNQDVIEAIRQWIADGRPADKLPRSPAGDEIRKVRLRTKGKPAVQVRGGTADRGEIVRVDIFTKPNKRGKEEFYLVPIYPHHVMNKRDWPMPPMRSVVAHKDEGEWTLIDESFAFRFSLYPRNYVEVTKPTGELLTGYFQGLNRSTGAINLSNHKDSRSLVDDNGNSMQSIGAKTLLTMKKYNVDRFGARSEVKSEVRTWHGEVCTSPIRPG

SEQ ID NO: 10065 - protein, 1095 aa, unidentified
  REGION 1..1095: note = Description of Unknown: Cas Enzyme sequence
MSSVAEKSQKYILGLDLGSASLGWALVGIDAMEMPSSLIRAGVRIFEPGVDGAKPGTPASAQEIQFGKDQSTAVARRQERLRRRQLRRRVARQRELFGVLQGAGLLPTDDTQAAGIGSEQRHRILNNLDVTLTNRYRNGADQETFAQMPLYTLRKKALYEPLALDELGRVFFHLSQRRGFQSNRKDVKKKTKDSEDQGQVKSAIHELEQAIEAAEAKTLGEYLAGLNPHEQKVRRQWTGRKMFEKEFQMIWDKQKEYHTARLTPELHDRIWDLLFFQRPVAAQKHLVGKCELEPDKRRAPWAALLAQQFRLLQKVNDLRLVEEDGNELPLNEDGRAAIFDLLENHGTQSFAKIKQHLGLPKTAEFNLERGKAKELKGNVTAQSMRKVFGERWREFSTGKQNQIIENWRNSEKDEELKREAMEHWGLDEAGANALVNEKAPGDYCSLSLVALGKILPLMRAGKSFKEAETEIYGNRFSGAAVHPLIPVLRPNRKHFRNSTPPPQDPLMASIANGLRNPAVERSITEMRKVVNAIVREYGKPCEIRIELARELKKPRSKRLDETARNRKREAENKALAERMHNECGMPQNPSRNDLEKAKLWVEQQGQCPYTGRSLPFSRLFDDNNGFDVDHILPRSRHPDDSYQNKVLCWGDTNRMVKRNQTPFEAFAEQDPEIWHQILARVARWKNPGKSRKFEIRSTDELAEFSSRQLNDTRYTSMIAARLLSTLYGGRDVIRNGKKEQAIFASTGAVTATLRRNWGFEQILRNIIPPEPSESTGKPRTDHRHHAIDAIVIALTRNDVIQAMARASALEPWQPGTRSWRHVPQPWRTPDFFRSVEEQVREMLTSHRPEHKVSGELHKGSNYGRPYPYKGKSTVHLRVLISALTAKDIEEGDVIVDRATRDILRAKLTEVGGNPKAFEKAENTPYMITSAGKRIPIRKVRIRETRNPLRVGEGSSERYVASGGIHHVELFVTRDEKRRETWDSRVIQITEAYKRQREKQPVVARVLEDDPEAEFLFSISNDDTIEINDGDRRKIVRVKKSAENKQIFYVPVNDAHTDTDQMKLKIVSSKYPSTLKALEPRKVVVDLLGRVHPAND

SEQ ID NO: 10066 - protein, 1159 aa, unidentified
  REGION 1..1159: note = Description of Unknown: Cas Enzyme sequence
MDRYILGLDLGSASLGWAVVGLNDQFEPYELKAAGAHVYDPGVEVPPTIKIAKDEAILQGQDRSKAVGRRIARQMRRQNHRKSARQKALFHLLQEKKLLPSYPEFAGEVLEAKRHHTFNRLDKELADALCGERRIRGLDGVMLEADQALLYVLRKEGLERELKLYELGRALFHLSQRRGYRPSASDDRAEEEAAETEEQTDTKRGRKRKATEEGGDEEKKENAKTVEAEIQRLGTKMEAAHAATLGSYFASFANNNPHIERIRHRWTSREMYRNEFDLIWKKQSEFYRDSHPGLLTDELKEKIEHWLFFQRPLASTEHLIGRCDLEPKEPRAPWASLEAQRFRLLQNVNNLAWFSRRTTKEEPLSPEQRTILSNELQSRGDLSFAKVRELLELPPNTEFNLQRGKKTKIEGNRIVPIMQRVFGDRWSGYSGAEQAEAVELWRTTEGMEERTKTAIERLNLDPLFARIWAENRPPSDYCRHSRKALTRLLEPMEIGVSYATARTTLYGNPFAGKEPLPLVPLINEALPSITNPAVMRALTELRKVVNAIIRKYDKPYEIRIELARELRKNRKQRHDATEANEKNHEQRILAASRILKECQKDRYDAQGRDAEGLVRERRDDVTKMMLLMECGGFCPYTGAPISAGQLFGGEVEVEHIIPQNLMVDNSFGNLTLTFRNTNLEKLGRTPWEAFGGEGKEDQWAQIMDRVKKFKNREKLGRFQQRTPAEALAFANRRLNDTRYTSKLAGRLLMSLYGGRDVAPPEAQDEMEEFKDQTGRRAIFVSSGMVTGLLRNAWCLNLSGIIGEDALKCLQGPGEEKEARTRRSESKKKDRSDHRHHALDAVVIALTSEKVIREINTRAARLYLERGRPLTYRDVMKSIPQPWINFISKESRSLFQRMIVSRKPEHKLSGALHDATFYGKERLSNDGSMKRHQRIAISNTLTDAQIENICDKGIKRAVKELGDAIGGYKKWSVEKHDWPKIPNLSTGEFVPIRKVRINITKNPRLLDTGKRWKVFAQGRPERNVEEGEIAYASFFNVQDRSGTEWRWEIVTLFEASQRVRALPKAEKGQSKISERHSKFSDAVFRFSFMKGDLVELLHEGRVGIFIVRRFESDGRLWVAPINAAGKDDELKKAGYLLRLGFSKFLSMGVGEERIPRPVIV

SEQ ID NO: 10067 - protein, 1160 aa, unidentified
  REGION 1..1160: note = Description of Unknown: Cas Enzyme sequence
IMSFPDGVRQKYILGLDLGSASIGWAVIDLDGNLDPCGLLAAGSHIFDPGVEVPPAAGKMARDEAVFQGLDRSKAVGRRIARQMRRQIDRKGIRLKALFKLLQSKSLLPIYPELKGEPLAAERHHLFTRLDKELTDALCAEKRKRGTDGLMLEADQALPYVLRKEALERKLELHELGRALYHLCQRRGYRPSAADDSEKEETASTEEEIESKRGRRKKPEPEDKGDKDSESPKKVAEWISDLQAKMDAAHTPTIGAYFADFKHNNPHQERIRHRWTGREMFVKEFDLIWERQSEFYRDSRPGLLNDDLRNRVYDCLFFQRPLASAEHLIGMCDLERGERRAPWATLEAQRFRLLQKVNDLAYIPSGLFNERKLSLEQCATLAAALQDKGDMPFPEIAKLLGLPPKTEFNLMRGKKKKIEGNRINQVMLQVFGDRWRAFTEQERSSAVALWTKTEGFEERKNVAISQCGLDAWKAKEWAENRPPKDCCRHSRKALVKLIKRMEEGVPYATAKLEIYDSQLAGKAPLDFVPKVIETLPSINNPAVLRALTELRKVVNAIIRTYGDKPYEIRIELARELRKNRKQRQNATEAGDKQHLRRIDAARTILRECRNYDAQGRDAERLVRERRDDVTKMLLLMECRCLCPYTGDSISYLDLFGGEVEVEHIIPQSLMVDNSFNNLTLCYRKVNHEKLDKTPRQAFCRAEDDQQWIDIIGRVQKFGNRRLNDTRYTSKLAGRLLMSLYGGRDIVPAETLDELDEFKDRTGRRAICVSSGMVTSLLRDAWHLNLSGVIGDDAFKCPKKSEDDEESGKRRKGQSNKKDRCDHRHHALDAVVIALTSEKVIREINMLASRLYRERQTPLKYRDLKSIQNPWHNFMDDHFRDIFRGMLVSHRPEHKLSGALHEATSYGKVRYYNAKGDPVRYQRIAIGKLLTDKQIEKIVDEEVKKSVVKLGETIGGYKKWSQEKHGWPKMPNRNGEPVPIKKVRIKITKNAKEIEAERFRGFGTGRPESNVEDKEIAYASFFTVQDRKGTKTVWEIVKLFEAAQRVRALPKSERGHEKICWKYPKYPDATFFRFSLMKGDLVELVLNGKPAIFIVRRFEFDSRLWVAPINAAGKDEEMEAAGHLLRLGFSRFLTMGAGDDKIPRPVFVDLLGQPHYINIGA

SEQ ID NO: 10068 - protein, 1485 aa, unidentified
  REGION 1..1485: note = Description of Unknown: Cas Enzyme sequence
MKKILGLDLGTNSIGWALVDTDEKKILGMGSRIIPMTQDVLDTFSGGKPLETQTAARTSYRGIRRIRERHLLRRERLHRVLNLLGFLPEHYAQEIDFEKHVGQFVDESEPKLTYNNRDFIFTSSFEEMLSDFKLSQPQLFYTKPNGKETKIPYDWTIYYLRKKALSKKIAKEELAWIILNFNQKRGYYQLRGEDDADATRTAQTRIYFDTQIINRIVDTGSVYKGLKVIQITLANGDSGKYFSKEIPNWLGLQKNIIATVDLDKDGNDRFEDDGSLKRRFSIPTEEDWEKKWKLIKIKTEKEIKDADTTVGAYIYENLLQNPSQKIRGKLVRTIERKFYKEELIDILKKQIELQPELFTDDLYNDCVRELYRNNDAQQLVLSKRDFVHLFVEDIIFYQRPLRSQKSSIGNCTLEKHPIKDKDGKIVRDDNGKPILVSLKVIPKSHPLYQEFRVWQWLSNLKIYRKDDDADVTTKFLKNTEDFVNLFEFLMTQKEVGHKDILKHLVIPALKEKFPSAKPATFNKEVDKEIAKYRWNYVFDDSKEKEEDKSKKYPCNTTGYEIRRRLEKAENIPANFLTSEIELHLWHIIYSVTDKKEYEASLRSFANKYKLDENSFVEEFKKFPPFPSEYGAYSEKAIKKLLPLMRMSKYWCWDAIDTKTQSRIDKIISGEYDESIKTRVREKAINLTDNNHFQGLPIWLASYVIYDRHSEADITAKWNSIAELEQYLEDFKQHSLRNPIVEQVITETLRVVRDIWEQFGQGAKDFFNEIHVELGREMKNTADDRKWLTEQVTNNEATNLRIKALLAELKENSDGKLLVENVRPFSPMQQDALKIYEDGVLNSTIELPEDIIKISKSSQPSKSELQRYKLWLEQKYRSPYTGSVIPLGRLFTEDYQIEHVIPKSRYFDDSFNNKVICEAAVNQLKDAQLGLEFIKNHHGTKVECGMGKVVEILSEEAYQSFVKEHYSKSKTKRQNLLLEEIPEKMIARQMNDTRYISKFISSLLSNIVRADKEDDGINSKNLIPGNGKITTVLKKDWGLDAVWNDLILPRFERMNKLNNTDAFTYWNGQYQKYLPVDYSPANSKRIEKKRIDHRHHAMDALVIACMTRDHVNLLNNQSAKSETSRYDLQNKLRNKSKETWINKKADTQVERDVFKEFKKPWDNFTIDARNALETVVVSFKQNLRVINKATNNYEKWIDKDGKKVKAKIKQEGTNWAIRKPMHKETVSGKIDLIWLKAPKEKILTASRKSVDTTFDLKTIDSITDTGIQKILRNYLAYKGNNAEIAFSPEGLEEMNTNIKEYNNGKFHQPIRKVRIFELGSKFSLGESNNKKDKYVEAAKGTNLFFTIYENKDGKRNYETIPLNLVIERLKQGLPPVELKGENDFFLTPNDLVYVPNKDERESFPVRIQFEVDKDKNRNIYKVVSFSGSQIFFVRHEIATSIINKTEFSTLNKMERAIDGTMIKDVCVKLKINRLGKVERHSCRNTF

SEQ ID NO: 10069 - protein, 1307 aa, unidentified
  REGION 1..1307: note = Description of Unknown: Cas Enzyme sequence
MKKGELPRLKCFHNGIILIVISFKNCTAKILNKNKLSNVLFNKINLLTLSLLINHVKHNIMKKILGLDLGSASIGWALITEDKENGITNYEISGIGSRIIPYEGTEGKDFAKGTGESRNSSRTKARTARKGYDRYQLRRRFLVETLIKNKMFPDDSLKNLPKMQLWELRNKAVDSPISLIELGRLFLWLNQKRGYKSSRSDANLDKKDTEYVATVKSRHEKIKELNLTIGQYFYEGLAKDEFYRVKENIFPREAYIEEFDRICSNQQQYHSSTLTNKLIDKIKNEIIYYQRPLKSQKGLVSVCEFEGFWRKGKDGKEYFVGPKVAPKSSPLYQLSKMWENINNIKISSRTGGDIEITAEQKWALFEHLDNNEKLTQSDLLKLLNLKKENCYVNKQLAKGIIGNITKYAICNCFINLNSCQDLLKLDLKIVETDSEGYLYDKKTGEIFNTKPVKFIDPMVEREPFYQLWHTIYSIPDQEECSKVLQANFKIEQAIANKLAAIDFSKHAFGNKSVKVIRNILPYLMEGDGYSEAMSYAGYDHSNSLTKDQNLQRKLLAQLKPIDKNSLRQPIVEKILNQMVNVVNAVIDKYGKPDEIRVELARELKQSKEERNDADKNMNKRQRENEEITKRLAEYGMRATRNNIIKWRLYEEIDNQDKKLNAICIYCGQPISLTEAIKGNDVDIEHIIPKSKLFDDSQSNKTLAHRHCNKDKNDRTAYDFMKSKSVQALDEYVKRVNALYASQVIRKTKRDKLLMTEDKIPDNFIDRQLRETQYISKKAREILQTICYNVWATSGTVTAELRHLWGWDDVTMNLQFDKYKALGLTQTIEWESDHGKNSHEKEVITGWTKRDDHRHHAVDALTIACTKQGYIQRFNTLSSSKTREDMAFDIENSTIEFKEKRSLLEKYIISEQPISVDKVEKAVADILISFKSGKKVAVVGKRKVGKLGNKKVIQEGIIIPRGQLHQEFVYGKIKSIEERKPIKYIFENPHLIYKPYIKALVEERILRHEGNTIKAISSLKKDPIYLNKDRSVLLEYATCLKDEYVIKYNVDINFNKADKVIDGKTKDILQARLNKFGGKSKEAFKDVQREDKTLIKWYEDEGLKHPIKSVRCYTGLSAVVPVKKDEQGKDIGFVKPGNNHHIAIYTDNEGNKYEYVCTFWHAVERKKYGIPVIIHNAAEVWDKIQMQPEGTYPESFLEKLPIVHWNLLVSMQQNEMFILGMAPEDIEIAISNNDCRTISDKLYRVQKMSIIPSSGQLDITFRHHLETQLNDETDSKLSKRFIKAQSIGSLFNLNPYKVKVDRLGNISI

SEQ ID NO: 10070 - protein, 1056 aa, unidentified
  REGION 1..1056: note = Description of Unknown: Cas Enzyme sequence
MKYRLALDLGSTSLGWAMLRLNEQDWPIAIIRAGVRIFSDGRNPKDGSSLAVTRRDARAMRRRRDRLLKRKARMMQSLLSLGFFPSDEPARRALEKLDPYTLRAKGLDHALTPAEFARALFHINQRRGFLSNRKTDSSDSDSGALKTAISSLRAAIDPNGAEGKARTVGELLYRRMTDQSKRPQERTVRARYRQERVTRDDGKTRIDKSYDLYIDRAMILAEFEALWAKQAELNPGVFTATARQELHWRLTHQRPLKPVRPGRCTLIPDEERAPLALPSQQRFRIYQEVGNLRILGEHLNDRALSKDQRDMLVTALERGNKSFKTGIPKLLSLPGTVRFNLEDAKRTELKGNTTNLILSKKDLFGEAWHSFDEAKQDAIVMQLLQEESEAALVAWLQAETGVDEPRAERISNTAMLPGYGSLSAKALAMILPEFRKAAFSFADAAKAANFHHSRLSDNAEVPGRTFKQEQIDASTGEIKHFHVFHELPYYGEFLQRHVGFADPKAGPDDLLERRFGRIANPTVHIGLNQVRKVVNTLIQRYGHPSEVVVEVARELKQNQEERKEQSERQAKNQRRNDRLKEQAAGLLQCAPERVRRADIERLILWEELSYDIAERRCPYSGVQISAEMVLREQVEVDHILPFSRTLDDSLNNKTLAMRKANRVKGNRTPWEARADFAAQGWDYAGILLRAEQIPNRGKRYRFSEEGYQQWLKGDDQDGKGFLARALNDTRYMSRVAREYLSMICPQDTRVIPGQMTAMLRKNFGLNGILGLDGEKNRNDHRHHAVDACVIGVTDQGLLQRFASASADARQRQLDRLVENMPYPWPSYREQVRRAIGDQHTIPVHVSHKPDHGHEGAMHNETAYALLGSGRVAVHKMVDGVRTREEGSLKVIEFANAKAMNRHGQLPDGSPRPYKGYKGDSNYCIEILRSDNGKGKWDWEIVSTFEAYQAARKHGVKRLSDPRLSLSGKPLVMRLIIGDYLRAEFKGAIRLLVVKKIKANGGIFVAQANEGNVRQREDEKDPSLIYGSFTAGGLQKAHGRRVTVSPIGDLRDPGFKE

SEQ ID NO: 10071 - protein, 1417 aa, unidentified
  REGION 1..1417: note = Description of Unknown: Cas Enzyme sequence
EKEKIMSKTLGLDPGTNSIGISLRNDEKGKNIIEQLEYFSSVIFKSGVGKEKSGEFSYAAKRTEKRSTRRLYMSRKYRIWATLKLLTENGYCPLSMSDLERWSKYDKEKGLKRQYPTDAVEFERWVRLDFNGDGVADYSSPFQLRAELMEKQFDFSNQIDRYKLGRALYHIAQRRGFRSSKGETLKEQESNETTEKQELDLIDALKKSEVKKSGKLSEYMQQHQLKTIGCAFAHLENDGIRVRNSEYQAIRSQYKDEIKQIFDFQNGLDNRSEFYNRLVSEKKGEGTIFYKRPLRSQKGLVGKCTLEPNKSRCPISHPEFEKFRAWSFINNIKFGEELKETLTIEQKEQLYNKIFLRTFNSFKFEDIRKWIEEKVCKGKQLDYKSKTINYKDKTSVSGCPISGRLKNLLGDNWENWEYNSDEEKTNKKTGEIKSIKYTAEDLWHVCFSFDEPEYVEEFAKKKLHFDDSQTKQLVRIYGAIQQGYGMLSLKATKNINRFLQKGLIYTDAVLLAKLPDIFKKKWADVEEHITSQIDEIIKTNREQKLLYNIANSLIADYKSLEPDDQFAFKNCKYKLVDSDLRDVKRTTIATIGEKTWAKKDNTEQEQILAEVARLYQEFFASEERDYFKLPKVTDALAAFLHNAYKIMSEDELRKEIYHPSMIEFYAPAKDSQIEDGRWLKLLGSPVIGALKNPMAMRVLHILRRQINAMLKEVDENGNALIDENTRIVIETARELNDANMRWAIEAYQREREAENKEYAKIIKEHFPNREINDDDIDQARLICEQHDMLDTSHTPSNTNEGKVMKAKDLGYKKDITKYRLWLEQGCRCLYTGKIINITNLFDDNAFDIEHTIPRSQSFDDSLANLTICDAHFNRTIKKNQIPTQLANYEEIKLRLQPWFEKIELLKDNVEFWKSQTKRAQDKERKDRCIRQRHLWQMELDYWQNKVNRFTMTEVTSGFRNSQLVDTGIITKYAYHYLKTVFNKVEVQKGSVTAKFRKMLGVQSIDEKKSREKHSHHAIDATMLTLIPTAAKRDKMLELFYKIQEKKRLNENTSELERELEKERIACGITGNVSEIVPFIENNIFVNHISKDQRLTLAKKKARVRGKEVFVKNKNGLLVNKWITGDCIRGQLHGDTFYGAIELNDDRHYVVRRELKYKKNDQDKGFKNWDELESSIVDKDLFRIIKGQFSENTSLKEACENGIYMFKKNNKGIIDYSEECKVNKIRHIRCRTSVKNPLPIKKQTYLSNKTYKQNFYAEMGDLYVMCKYENKEKTEKEYRIWSLFDVSNNRKVGIEDIPTTLTSKKGETDLYLTQQISSGDMLLLYKDSPQELLEMDKSLISQRLYVVRGFENDGNRIILQKNTNAQADKDLGKGESIKNYSKMPEKIRCGINTLKFIIRGKDFQITTNGISFINNKQL

SEQ ID NO: 10072 - protein, 1029 aa, unidentified
  REGION 1..1029: note = Description of Unknown: Cas Enzyme sequence
MKTLGLDLGTNSIGAALRDLAENDNPFSWYGVTIFDKGVGEGKSGEYSYAAERTKNRSVRRLVQARKYRLWATLETLIVTGYCPMTIESLDKWRKYDKKAGLMREYPIDDLHLDSWIKLDFNEDGCPDYTSPYQLRYELINKKLNIDDEVSKYKIGRAFYHIAQRRGFKSSRKSGDKENTSVYNGSKESGAKGVNEILDLITEQETLGAALAIIEKTGQRVRNQYTLRKHYQEEIEKIANYQNLSTDLVEKINKAIFFQRPLRSQKGLVGNCTLEPTKPRCPVNHPSYEEFRALAFINNIYYKNEEESDWQKLTAEQRSLIYHEKFFRKSKEHFDFKEISDLLAKHGLKNIHYNYKFNATVTGCPVSARLKDIFGETWNTEDFKIERSETRNQGKTKKDYYTIDDIWHVLFTFDDDEMLESFAKEKLKLNDEQSKEFYTAWKKLPTGYASLSLKAIKNFLPFLRTGFIYTEAALLANMHAALGEKQWTENKLNLLEIIPELINTNRYQKQILNIVNNLIAQQKALAFNDRSGWKRDNYSLTEQDKEGIIETIQSTYGRKKWQTLAITEQKSILDKVTILYQQYFRSGFEVKYMNDLKLLVVKHDSENYYMDANSRFYRLPHLLDTIKEFIVNHFDVSETKLNLLYHPSQIDIYPPVNPDQNDGKLYLSSPKTGAFRNPMAMRTLYELRKLINYLIRIGRIDEETQIVVEVARELNDSNKRWAIEAYQKKRESENQEFAKAILELQKEKYSDLDPENADNVDKFRLWYEQLPDNEGVLKQVKALNDDIEKYRLWKEQGCQCLYTGKIIKLTDLFDSNVVDFEHTIPRSISFDNSLANRSVCYSYYNRNIKGNRIPFDLPNYKMEAIIDAITYTPIVPRLKVWENKITELQNQVEFWKRKSRSAQDKESKDLAIRQRHIRQFDLIYWRNKLERFTMKEVTSGFKNSQLVDTQLISKYAMHYLRTAFNKVDVQKGSTTAEFRKIYSIQEKDVVKSRSKHSHHAIDAAVLTLIPTSARRQDVLKKAYEYAEKN

SEQ ID NO: 10073 - protein, 914 aa, unidentified
  REGION 1..914: note = Description of Unknown: Cas Enzyme sequence
MKKILGLDLGTTSIGWAFVKEAESESEQSSIVKIGVRVNPLTTDELLNFEKGKPVSVNADRTLKRGARRNLQRYKQRRQNLINALKKASIINDTSILAEDDKNTTHSTYALRAKAAEAEISKEDFARVLLMINKKRGYKSSRKVNNDDEGQVIDGMAIAKRLYEENLTPGQLCYQLLIEGKKHLPDFYRSDLQAEFDKVWEFQTRFYSEIFTDNFKKEIAGKGQRVTSAAFWTKYKFYTAEIKGTRDEKKIQAYKWRSLAFNKQLAVEEVAFVIAEINNNINSSSGYLGAISDRSKELYFNRQTIGQYLYQQLQNDPHTRMKNQVFYRQDYFDEFEIIWETQAKYHTELTLVLKEEIRDIVIFYQRKLKSQKGLVSFCELESKKVEYEIDGKKITKTIGAKVAPKSSPLFQEFKIWQNLNHLELTNKKDKTKLLFKDFDLEAKWPLFNELNIKGNLSKTRVLELITDKPAVWELNFTMIEGNRTNQALYAAFFKMMEYEGHDNVDPENLNATEMHDVILSFFESQSIDASLLDFNAELNGMDFEKQTAYQLWHLLYSYEGDNSATGNDRLYELLWAKFGFKREYASILAGINMQDDYGSLSVKAIRKIFPFIKENNYYTAKTLAGYKEQVVEQKDCLELLPKNSLRNPVVEKILNQMVNVVNTIINDPALGKPDEIRIELARELKKNAKEREEMTAQINKAKDNHDKIREILVREDGVPNPSRNDIIRYKLYEELKFNGYKDLYTNEYIARQELFTKKYDIDHIIPQASLFDDSFSNKTLIPRQVNLVKGNKTAFDYLEGNLGVEKLNDYVARVEMMYQVYNKTKDDGISKAKYLKLLKKGADIGEGFIERDLRDTQYIAKKAREILQGICKKVMPTTGSITDRLRDDWDLVNVMQELNIEKYRKLGLTEMVEK

SEQ ID NO: 10074 - protein, 1015 aa, unidentified
  REGION 1..1015: note = Description of Unknown: Cas Enzyme sequence
PKLYHDMFRSAGKNSYGAYAGLCMKNGKKLVIEKRASADDFFDSLRKIVKGIHSDEVEAILQEIDAGQFLPKAVSKINGVIPHQLQEQELKAILNRAEAYLPFLKEADRYGTVKDKIVQLLTFRIPYYVGPLNTAHSADDGRRGFAWAVRKEGGRVLPWNFSEKIDAEGSAERFIRRMTNKCTYLLGEDVLPKNSLLYTEFMVLNELNNVRLGEAGVRLTEEQRDILWKELFLRHKKVTGKRFRDFFVKEGWLSRDEQDAIRGIDGDFKASLGPWIDMDNLFRGGEKPDRAVLEKLIQDITLFGDDRRMLARVLRDDAPQLDPAQVKALTKLRYSDWGRLSEKLLAGLPAVDKETGAVQTLIEAMHTTGLNLMELLTDRFGYAEAISKENEKEMEDSALTYDTIERLRIPPAVRRSVWQTLSIVKELRHILGCGPKRIFIEMARGGDAVKQRTKSRRTQLLELYKACGRDARQWSEMLEKTPEDALRRDKLYLYYTQMGRCMYTGDVIRLEDLENKDLYDIDHIYPQSLTADDSLDNRVLVKKQVNAAKSDRYPLAEEVRQKQKPFWEMLYHKGLISRTKYARLIRSTPLSADELASFIGRQLVETRQSTKAAAEILKKVFPGADIVYAKAGNASRFRQYFGFLKVRDVNDFHHAKDAYVNIVVGNVYHTKFTTNPAHFLREKNARYSLNPAMYDYPVVRDGVTAWTPGDDGTIAVVKRWMGKNNILFTRRSYRQQGGLFDQLPVKKGQGQVPLKADGSPIGDIEKYGGYNKAAVSYFMYVQGKDKKGNPAYLFVPVLLYRTGALRTDADREAYCLEEWQREKAAFTEPRILLREIPYNALLELRGYRMHISSRSNVYIFMKNAVELCLSEEQAALVKRIGKFLERSRTEKGSRITAYDRIEEADLMALYDVFSDKLNRGIYREKMQVQAEALKNGREAFAELPPEGKSAALMEILHLFQCNPVLSNLSSIGGKAKTGTIAVPFNVTKQEGLTLVAQSVTGFFEKRIPLVPFGRP

SEQ ID NO: 10075 - protein, 1165 aa, unidentified
  REGION 1..1165: note = Description of Unknown: Cas Enzyme sequence
KTVGAAFAQLEDEGIRIRNNSEYKAIRSQHQDEIKEIFKFQKGLSNQTQLLDTLISEKQGVGTIFYKRPLRSQRGNVGKCTLEPNKPRCPIGHPLFEKFRAWTFINNIKAKSPDSDSAEPLPMDMRINIYNKLFLSRVKADFKFEEIRHFIEKQWGVALSKDDKTINYRDDTSVAGCPITARMIKVLGEDWENFQVIGTKERQTQGKSNNALHQVCYTAEDIWHLCYDAEDPEQVRTFAEETLGWDEKKAAELVRLWSAIPLELSDEDIQTIIKKAQQLEEVVNEEKRIGNIVNSLIANYKAESLEHRFADHNYEYQLDESDEREIIKHIESNIGKQRWELMDADEQISILEGVRSGYQAFFARHKRTFVELPQLGERLVELLSKEYPSVEKREWERLYHPSQIAIYRPILLDKSDEKRRLGNPDIGAIKNPTVMRTLNNLRSRVNQLLDDGVLVPSETRVVVETARELNDANAKWALEKYQKTRRDENAQIKKILEEFYSKPNGITDTDVDKARYVIEQCEEDNYKSKKDIGTYSKDIQKYKYWLEQGGQCLYTGRIISLSNLFDSNAFDLEHTIPASVSFDNSDQNMTLCEAHYNRFIKKNNIPTAMPNYEKDVTIDGKLYTAIKPRLEKWKKRIERLSRNVEYWKVQARRAQMKDRKDECTKEKLLWQMELQYWRDKLQRFTILEVTDGFKNSQLVDTRIITRHATLYLKSVFENVEVQRGSTTAEFRKILGVQSVEEKKDRTLHSHHAIDATILTTIPTAAKRERILELFYKVQEKERRLKNCSGDAYEGLKQELEGLQAKLKKEVGDCKLGGEISQLGNFINDKIIINHCVKDQTLTPSHKRLRRRGRVVGGKEHPIWQTGDTLRGKIHKESYYGAITQYAKDEDGNVLFNDGKPKIDPTIWYVIRRELKHKKSAQDTGFASWDDLEKVIVDKNLFKLMKEQFPEGTSFKDACEQGIYMIKKGKDQEHNIKTHRIRHIRCHTSVRSALKIKEQTNKSAKDYKQYFYAESGDLYTMCCYTNGKKKEYRPYRLYDIAQHRKSGIEDIPEFITDKKGNRLELAYKLCSGDMILLYENTPEELYDMDPANLKQRLYKVDRFESESSRIYLTNHLIANGEVGHSIKDYNQMPPTVRCGVNTLKFLIMGDHNDFIIKSNNIIFNHR

SEQ ID NO: 10076 - protein, 1029 aa, unidentified
  REGION 1..1029: note = Description of Unknown: Cas Enzyme sequence
MITRILGLDTGTNSLAWAVVDRDANGNYTLVKRGDVIFSEGVKIEKGKESSKAAERTGHKSLRVQYARRRLRKIDTLKVLVSLDLCPYLSDEQLSQWKAKKTYPLTDDFMLWQRSGSAEENNPYYCRYRCLTQKLDLTDQSQRFLLGRAFYHLAQRRGFLSNRLDTCADSEESGKVKSGIAQLSVEMEKAGCTFLGEYFYQLYKQHGNTVRLRSRYTDREEHYIKEFLAICEKQELDAQWVEKLQSALYFQRPLKSQRKGVGKCTFEPKKPRCAESHPDYEAFRMLCILNNIKIKTPKDVSLRPLNAEEREKVRPLFFRKSKPNFDFEDIAKALAGKNNYAWYKDAGEKPYRFNYRMHQGVPGCPVTAQLIDLFGPDWKAGIAETYMAVEKKNGTKTIDEMADDVWNVLYSFSSKDKLKTFATEKLQLDEARATKFANAKLPHGFAALSLKAIRNILPFLRQGFIYAHAVLLAKIPDIVTAAVWDDADKREQILSGLLEIIENYNPNDRGIEGTIDFCIKSHLQDVVDLRPGAADALYHPSMIEAYPDAKLNKKGVFQLGSPRTNAIRNPMAMRSLHILRSVVNQLLRDGTIDRDTEVHVEYARELNDANKRKAIADYQKDIERKRADYRKRIVEEYKNKCHKEIEPTDTDILKYQLWEEQNHRCPYTDSEIGICDFLGDNPKFDIEHTIPRSVGGDSTQMNLTLCDAMFNRQVKGARLPSQLPNHHEILKKIAPWESKCEDLRKQLDKIRTYGGMEKGMKDRLIQKRHRLKMELDYWQGKYERFTMTEVPEGFSRRQGAGIGLISKYAGLFLKSLFHSADNPNKSNVYMVKGVITAEFRRMWELQGEYEKKSRLNHCHHCIDAITIACIGESEYDKMAQYYHDDEVSRWHGSANKPQFKKPWSTFTKDVLALEQSLLVKHLTKDNMPKQAKRRVRTAKGKHLAQGDAARGSLHKDTYYGAIEQEGEIRYVLRKSLSDFNSESELENIVDQAVKEKIKAAVAGKNFKAAIAEPIFMNKEKGIRINKVRC

SEQ ID NO: 10077 - protein, 1537 aa, unidentified
  REGION 1..1537: note = Description of Unknown: Cas Enzyme sequence
MKNILGLDLGTNSVGWALVSVDENGKLVKKIRLGSRIIPMSQDVLGKFDSGVTVSQTAERTEYRSHRRLLERALLRRERLHRVLHLLGFLPEHYAACIGWDRNDNATYGKFLPETEPKLAWRKADDGVHRFIFMQSFDEMLEDFKESQPSLLANGKRIPLDWTLYYLRNKALTKPIAKEELAWILLNFNQKRGYYQLRGEEDEEIPSKRVEYHELKVVKVEATDEGKGGNVWYNLLLENGWVYRRQSKYSLDKWLGLTLPFIVTTNLEADGVTPKRDKDGNEKRSISLPKEDDWTLLKKRTEDHLEKSGLTVGAFIYQHLFANPSDKVRGQLVRTIDRKYYKRELQAIIAKQMEFHPELRDAQLLKACAEELYRNNEAHRAQLLAKDFKHLLVEDVLFYQRPLKSKKSLIANCPYETRQYINKETGEIKDVNVKCIAKSNPYFQEFRLWQWISNLRLLRQIDGQDVTAAYIKGNEDKERLFDMLNNQGEIKQEHILRDFLKLKKPKGGEFPLRWNYVDDKVYPANETRHAMNKAIKAMIADKEEKEAISQLLVQTAVEYMLWNLLYSITDRNELTSALRRFALAHGVSSVDAFVESFLKVKPFKKEYGAYSEKATKKLLQVMRLGKYWCGDELPEPAKRTKGNKQAVYDEMANRGICKQTLQNIRNIIEENIDERLMGALLNPERPLTELSHFQGLSVSDACYVVYGRHSEVAEIVKWKDAGELNTFINNFKQHSMRNPIVEQCVLETLRTVRDVWEQEGQIDEIHVELGRNMKRTAEQRARDTQAIQRNENTNIRISLLLTELKNDPSISDVRPYSPSQRELLKIYEEGALENLTNQDEDIAKISRLAQPSASELRRYKLWLDQKYVSPYTGRPIPLAKLFTPAYEIEHIIPQSRYFDNSFSNKVICEAEVNKLKANNLGMEFIKKFGGKTKSILDEETYKLHVTTNYAHNPAKRSKLLMEDLPTDFNSRQLNDTRYISKTVMALLSNVVREEGERETRSKHVVVCTGGVTDTLKKDWGLHDVWHNLVYPRFIRLNNLTGSQDFGYWRYLHEENKKKEEESKKVFQITLPPECQRGFVKKRIDHRHHAMDALVIACASADIVNYLNNQSAANPNSREDLRRLVCDIKRRIRKPWPTFTQDAQAALEDLVVSFKNTVRVVNKASNTYLRYDKDGKKKRFKQEGEGLKAIRKPMHKETYYGEVNLIRKEMLPLKRALEDVNAIVDKELRANIKVLLRDGFNLQQVLANFKSKDFKFNKLDIKKVEVYVSSAKSTPMVATRKPLDTSFNAKRIVDITDTGIQKILLNYLKANDNSPEQAFTPEGIAYLNEHIAEYNNGKPHQPILKVRVSEVMGAKFAVGQTGSKKTKFVEAQSGTNLYFAIYEGEDGKRNFETIALNVAAERLKKGKTPVCEKKGEGLSLKFYLSPNDLVYVPTDEDRTAEHPSIDKRRIYKMVSATDKECHFLPVSVASIIADKVEFEAMNKVGRVIDTSEYEEKEERNKEEDKEVNKPSGISKIMIKDVCWKLEVDRLGNITKIVR

SEQ ID NO: 10078 - protein, 1432 aa, unidentified
  REGION 1..1432: note = Description of Unknown: Cas Enzyme sequence
MTQKIFGIDLGTNSIGTSVRNTDLGNNLVDQLEFFSSDIFKASVNREGVNGGKGREYSLASSRSAKRRKRRLYEHRRYKLWATLDLLIKNNLCPMTPESLEQWRTYDKKKKLFRQYPIEDKAFHSWIILDFNSDGKPDYSSPYQLRRELVSVQLDFNQAIDRYKLGRALYHIAQHRGFKSSKGETIAEQEKQEDDSKKNKNNALIEEHVDATKASEEKHSKGLSTYMQEHNLKTVGAAFAQLEDEGIRIRNNSEYKAIRSQHQDEIKEIFKFQKGLSSQTQLLDTLISEKQGIGTIFYKRPLCSQRGNVGKCTLEPNKPRCPIGHPLFEKFRAWTFINNIKAKSPDADSAEPLPMDMRINIYNKLFLSRVKADFKFEEIRNFIEKQWRVALSKDDKTINYRDDTSVAGCPITARMIKVLGEDWEKFQVLGTKERQTQGKSNNALHQVCYTAEDIWHFCYDAEDSGKVRTFAEETLGWDEKKAAELVRLWSAIPQGYAMLSQKAIRNINRMLLFGLKYSDAVLLAKLPDILELSDEDIQTIIKKAQQLEEVVNEEKRIGNIVNSLIANYKAESLEDRFADHNYEYQLDESDEREIIKHIENNIGKQRWELMDADEQISILEGVRSGYQAFFARHKRTFVELPQLGKRLVELLSKEYPSVTEKQWERLYHPSQIAIYRPILLDKSDEKRRLGNPDIGAIKNPTVMRTLNNLRRRVNQLLDDGVLMPDETRVVVETARDLNNANEKWALEKYQEIRRKENDKIKKILEEFYPQFSNITSTDVDKARYVIEQCEEDNYTSKKESGTYSKNIQKYKYWLEQGGQCLYTGRIISLSNLFDSNAFDLEHTIPASVSFDNSDQNMTLCEAHYNRFIKKNNIPTAMPNYEKDVTIDGKLYTAIKPRLEKWKKRIKRLSKNVEYWRTRARRAQMKDDKDKYTKEKLLWQMELQYWRDKLQRFTILEVTDGFKNSQLVDTRIITRHATLYLKSVFKNVEVQRGSTTAEFRKILGLQSVDEKKDRTLHSHHAIDATVLTTIPAAAKRDRILELFYKVQEKERRLKNCSGDAPIGLKQDLEGLQEKLKKEVEACKLGNKLGQLGSFINENIIISHNVKDQTLTPSRKRLRRRGRVVYNKKRENDNDKNPIWQTGDTLRGEIHKESYYAAITQYAKDKDGNVLLNNGKPKIDPTIWYVIHRELTYFDDWKPLEKVIVDKNLYKLMKEQFPDGTSFKKACEQGFYMIKKGKDKEHNIKTHRIRHVRCHTVVRSALKIKEQTNKSAKEYKQYFYAESGDLYTICCYTNGKKKEYRPYRLYDIAQHRKSGIEDIPEFITDEKGNRLELAYKLHKGDMVLLYKNTPEELYDMDPVNLKQRLYKVYGFESYRSRFYLINHLVAEGELEYSIKDYNQIPRNVRCGMKSTKFLIMGEHNDFVIKGNNIIFNHR

SEQ ID NO: 10079 - protein, 927 aa, unidentified
  REGION 1..927: note = Description of Unknown: Cas Enzyme sequence
AFKGRLNKNGKQWELNYKEIEGNRTQAILFDCYNRIITLTGHEECNFKKLKASEIRHYVTTIFKRLGFNTDILDFNPLLEKHELEKQPMYMLWHLLYSYESDNSRTGNNSLLRKLETTFGFPEEYATVLCDVTFEDDYSNLSVKAMRNILPYLQAGDDYSQACAHAGYNHSRRSLTKDELEEKVYKDKLELLPKNSLRNPVVEKILNQMINVINTIVAEYGKPDEIRIEMARELKSSAAEREKTTRAISQANTENQHIRDILEKDFALSYISRNDIIKYKLYKELEANGFKTLYSGTYIPKEKLFSKDFDVEHIIPKARLFDDSFSNKTLEARNINIAKSNKTAFDFIKGEYGDEGAEVYKKKLDMLLSKDVISKAKYNKLLMSEADIPSEFIERDLRNTQYIAKKAYEILSELVRTVTPTTGEITNRLREDWQLVDVMKELNFEKYQKLGLAEVVEDRDGRKIKRIKDWTKRNDHRHHAMDALTIAFTKPAFIQYLNNLNARSNKSSSIYAIENKELHRDDNKLKFNAPIPINEFRVAAKQHLSSILISIKAKNKVMTQNVNKIKTKYGIIKKIQLTPRGALHNETIYGTKKRPIITMVKVGAALDEATINKISNLTIREALLKRLAEYNGDAKKAFTGKNSLEKNPIYLNIGKTKVVPALVKTIEWETYHPIRKAITPDLKIDKVIDKGAKDVLKARLDTFNGDAKKAFSNLDENPIYLDEAKKITLKTVSVEGVLSAIPLHTLKNQAGEPIIGKDGKPVLGNYVQTSNNHHIAFYTDEKGNLQDKAVSFFEAAERKSQGIPIVDKNYNHDRGWRFLFTMKQNEYFVFPNEATGFIPTEVNLMDEANYDMISPNLYRVQKVSRIEKGASTSRDYWFRHHLETILNDDSRLKNSAFKRINSLKPLEGIIKVRINSIGKIVAVGEYD

SEQ ID NO: 10080 - protein, 1019 aa, unidentified
  REGION 1..1019: note = Description of Unknown: Cas Enzyme sequence
  MOD_RES 162: note = Any amino acid
LEKCDISIEFLTKENEEALWHILYSVEDKNEIVKALQKFADKHDLNASFVDVFRKFPPFKKEYGSYSAKAIKKLLPLMRMGKYWSENSIDKGTRERIDKIITGEYDEKIENRVREKAIHLADVSDFKGLPLWLVCYIVYGRHSEAKEIIQWKSPADIDSYLXHLADVSDFRGLPLWLVCYIVYGRHSEAKEITQWKSPADIDSYLKSFKQHSLRNPIVEQIIIETLRVVRDIWKQVGNIDEIHVELGREMKNPADKRKKMTQQMSENENTNLRIKYLLTEFLNPEYEVENVRPYSPSQQDILRIYEEGVLNSVSDLPEEISDILKKFTETDLKKRPSRSEVLRYKLWLEQKYRSPYTGEVIPLGKLFTPAYEIEHVIPQSCYFDDSFSNKVICEAEVNKLKSNLLGHEFIVKHHGEIVELPFGKKVRIFTVDEYEQFVKDNYSRTRGKMKKLLMDDIPEEFVTRQLNDSRYISKVVKSLLSNIVREKGEEEAISKNVIPCTGGVTDRLKKDWGINEVWNKIILPRFQRLNELTGTNKFTTKNVGIQEIPTMPLELQKGFNKKRIDHRHHAMDAIIIACANRNIINYLNNESATAKAELSRYDLQKMLCDKAKTDNNGNYKWVIRKPWASFTQDTYLALENIIVSFKQNLRVINKATNHFLHYNEEGKKIFVKQGKGDNWAIRKSMHKDTVFGEVNLRRIKTVALNEAMKNPQSIVVKDFKRKLLELWNLGFDAKRIKKYFEDNRETWSDINLSKIEVYYFSKDTKDRFFATRKPLDTSFDRKKIENNITDTGIQKILLRHLELKDNNPDIAFSPDGIDEMNRNIIQLNNGKYHQPIIKVRWYEQADKFAVGQTGNKSSKFVEAAKGTNLFFAVYESNILDKKTNTIIKKRNYATIPLNVAIERQKQGLSVAPEDENGNDPIFVLSPNDLVYLPTDDELANGIIAQPLDRGRIYKMVSCTGNEGHFIPARIANPILQTIELGSNNKAQKAWTDEMIKEICMPIKVDRLGNVLESSSSYKK

SEQ ID NO: 10081 - protein, 1336 aa, unidentified
  REGION 1..1336: note = Description of Unknown: Cas Enzyme sequence
  MOD_RES 1161..1168: note = Any amino acid
MKKILGLDLGTTSIGWALVYESENTDEKSSIVRLGVRVNPLSVDEKGNFEKGKAITTNADRQQTHGARINLQRYKLRRENLKDCLQKQGWIGTEALCEEGKASTFETYMLRAKAAEEEISLHELCRVLFMMNKKRGYKSNRKANNKEDGKLFDGMTVAQKLYEEHLTPAEYSFQLLSSGKKFKQEYYRSDLKEEFDRIWNEQQKYYPEILTDDFKQHLQGKSKGNTSKIFLGKYGIYSADLKGLDRKLQPLKWRIEALKQQVDKEVLAFVISDLNGQIASTSGLLGAISDRSKELYFNKQTVGQYLWTSLKETPHVSIKNKPFYRQDYLDEFEKIWETQATYHKELTPELKQEIRDIIIFYQRPLKSKKGLISVCELEQRKVKVTIDGKEKEISIGPKVAPKSSPMFQEFRIWQNLNNILLIDKGNNSIHPLYEEERNLLYEELSVKEKLSKAEALKVLNKNSKQWDLNYKEIEGNRTQAVLYDCYNRIIVMTGHEECNFKKLKASEIRSYFKTIFTGLGFNTDILEFDSSLTGHELERQPSYQLWHLLYSYESDNSRTGNDALLRKLETAFGFPKEYAAVLSDVVFEDSYGNLSVKAMRKILPHLQAGLDYSQACEEAGYKHSRRSLTKNELDQKEYKEKLDLLPKNSLHNPVVEKILNQMINVINAVIDEYGKPDEIRIELARELKIGAAERENMTRSISQGNAENKRIREILQKEFALSYISRNDIIKYKLYEELKSNGFKTLYSDTYISKDKLFSKDFDIEHIIPKARLFDDSLSNKTIEARDVNIAKSNKTAFDFIFGKYGQQGIEAYKKKLDILLQDGSISKAKYNRLLMKEADIPSGFIDRDLRDTQYIAKKAYEILSDLVRNVTPTTGAVTSRLREDWQLVDVMKELNFEKYQKLGLAEVIEDRDGRKIKRIKDWTKRNDHRHHAMDALTIAFTKPSYIQYLNNLNARSDKSSSIYGIENKELHREDNKLRFNAPLPINEFRAEARRHLKSVLVSVKAKNKVMTQNVNVIKTKHGVIKKVQLTPRGELHNATFYGTKKRSIIKMIKVGAALDEATIKKVSSSLIREALLDRLHEYNGDAKKAFTGRNSIDKNPIYIDEEHKKTVPSLVKTIEWEMYHPTRKLISPDLKIDKVIDKGIREILKTRLAKFNGDAXXXXXXXXVSSVIPLHTIKDREGKPVVGKDGKPVLGDYVQTSNNHHIAFYMDENGNLQDNVVSFFEAAERKSQGVPVIDKSYNHDKGWHFLFTMKQNEYFVFPNEVTGFNPSEMDLTDEANYSLISPNLYRVQKMSKTSGRDYWFRHHLEAMLNDDPKLRNSMFKRINSLKALEGI

SEQ ID NO: 10082 - protein, 1130 aa, unidentified
  REGION 1..1130: note = Description of Unknown: Cas Enzyme sequence
YIKKEIVMNGKILGLDIGVASVGVGIIDKESGEIIHASSRIFPAATADSNVERRGFRQGRRLGRRKKHRKVRLADLFRDAELVTDFSKVSINLNPYELRVKGLIEKLTNEELFIALKNIVKRRGISYLDDANEDGESSSSEYGKAVDENRKLLADKTPGQIQLERFEKYGQVRGDFTIEENGEKHRLLNVFSTSAYKKEAERILTKQQDYNQDITDEFIRAYLRILTGKRKYYHGPGNEKSRTDYGRFRTDGTTLDNIFGILIGKCTFYPEEYRAAKVSYTAQEFNLLNDLNNLTVPTETKKLSEEQKRQIIEYAKGAKTLGAATLLKYIAKLVDGSVEDIKGYRIDKSEKPEMHTFDIYRKMQTLETVDVKQLSRQVLDELAHILTLNTEREGIEEAIKASFIKGEFEQDQIAELVSFRKSNSSLFGKGWHNFSIKLMIELIPELYETSEEQMTILTRLGKQKTKAKSKRTKYIDEKELTEEIYNPVVAKSVRQAIKIINLATKKYGIFDNIVIEMARENNEEEAKKDYVKRQKANEDEKNAAMEKAAHQYNGKKELPDSIFHGHKELATKIRLWHQQGEKCLYTGKNIPIADLIENQYKYEIDHILPLSLSFDDSLANKVLVLATANQEKGQRTPFQALDGMDSSWSYREFKSYVKASKVLSNKKKDYLLNEEDINKIEVKQKFIERNLVDTRYSSRVVLNALQDFYKLNDFDTKISVVRGQFTSQLRRKWRIDKSRETYHHHAVDALIIAASSQLRLWKKRNNPLFSYKDNQFVDSETGEIITFTDDEYKELVFRAPYDHFVDTLSSKKFEDSILFSYQVDSKYNRKISDATIYATRKAKLGKDKSEETYVLGKIKDIYSQTGYDAFIKLYKKDKSKFLMYHKDPLTFEKVIEEILKTYPDKEQKEKGKEVACNPFEKYRQENGPIRKYSKKGKGPEIKSLKYYDNKLGNHIDITPDNSENQVILQSLSPWRTDVYFNPETEKYELLGLKYADLQFEKGSGNYSITLDKYYEIKEKEGVSEQSEFKFTLYKNDLLLIKDTKTKEQQMFRFLSRTMPNQKHYVELKPYDKAKFEGNQPLMALFGNVAKGGQCLKGLNKADISIYKVQTDVLGNKRFIKKEGDAPKLEF

SEQ ID NO: 10083 - protein, 1525 aa, unidentified
  REGION 1..1525: note = Description of Unknown: Cas Enzyme sequence
MKNILGLDLGTNSVGWALISVDENGNLVKDIRLGSRIIPMSQDVLGKFDSGVTVSQTAERTEYRSHRRLLERALLRRERLHRVLHLLGFLPEHYAACIGWDRKDNATYGKFLPETEPKLAWRKVDDGGYRFVFMQSFGEMLDDFSASQPSLVANGKRIPLDWTLYYLRTKALTKPIAKEELAWILLNFNQKRGYYQLRGEEEEETPSKRVEYHELKVVKVEATDEGKGGNIWYNVLLENGWVYRRQSKYPLDKWLGQTLPFIVTTDLEADGVTPKRDKDGNEKRSFRSPKEDDWTLVKKRTEDHLEKLGLTVGAFIYQHLLANPSDKVRGQLVRTIDRKYYKRELQAIIAKQMEFHPELRDAQLLKACAEELYRNNEAHRAQLLVKDFKHLLVEDVLFYQRPLKSKKSLIANCPYEMRQYINKETGEIKDVNLKCIAKSNPYFQEFRLWQWISNLRLLRQADGQDVTAAYIKGNEDKERLLDMLNNQGEIKQEHILRDFLKLKKPKGGEFPLRWNYVDDKIYPANETRHAINKAIKGMAVDKEEKETLGQLFVQPAVEYMLWNLLYSITDRNELASALRRFALTHGVSSVDVFVESFLKVKPFKKEYGAYSEKATKKLLQVMRLGKYWCGDELPEPAKRTKGNKQAVYDEMANRGICKQTLQNISNIIEEDIDERLMGALLNPERPLTELSHFQGLSVSDACYVVYGRHSEVAEIVKWKDAGELNTFINNFKQHSMRNPIVEQCVLETLRTVRDVWEQEGQIDEIHVELGRNMKRTAEQRARDTQAIQRNENTNMRISLLLTELKNDPSISDVRPYSPSQRELLKIYEEGALENLTNQDEDIAKISRLAQPSTSELRRYKLWLDQKYVSPYTGRPIPLARLFTPAYEIEHIIPQSRYFDNSFSNKVICEAEVNKLKANNLGMEFIKKFGGKTKGILDEETYKLHVTTNYAHNPAKRSKLLMEDLPTDFNSRQLNDTRYISKTVMALLSNVVREEGERETRSKHVVVCTGGVTDTLKKDWGLQEVWHNLVYPRFIRLNNLTGTKDFGHWESKDGKAVFQTGLPLDLQRGFVKKRIDHRHHAMDALVIACASANIVNYLNNQSAANPHIHENLQRLLCDRKRVIRKPWPTFTQDAQKALEDLVVSFKNTVRVVNKASNTYLRYDKDGKKKRFKQEGEGLKAIRKPMHKETYYGEVNLIRKEMLPLKRALEDVNAIVDKELRASIKGLLRDGFNLQQVLANFKAKDFKFDKRDIKKVEVYVSSEKSTPMVATRKLLDTSFNAKRIADITDTGIQKILLNYLKANDNSPEQAFTPEGIAYLNEYIAEYNNGKRHQPILKVRVSEIRGAKFAVGQTGSKKTKFVEAQSGTNLYFAIYEDKEGKRHFETIALNVAAERLKTGQTPVPETNDAGLPLKFYLSPNDLVYVPTDEDRAAVRPSIDKRRIYKMVSATDRECYFLPFEVASIIADKVEFEAKNKVGRVIAALEYKEKSEEKSEEENKTSAGSKIMIKDVCWKLEVDRLGNITKIVR

SEQ ID NO: 10084 - protein, 1355 aa, unidentified
  REGION 1..1355: note = Description of Unknown: Cas Enzyme sequence
MKKPYSIGLDIGTNSVGWAVVTDDYKVPAKKMKVLGNTDKSHIKKNLLGALLFDSGNTAADRRLKRTARRRYTRRRNRILYLQEIFAEEMNKVDDSFFHRLDESFLTDDDKNFDSHPIFGNKAEEDAYHQKFPTIYHLRKHLADSTEKADLRLVYLALAHMIKFRGHFLIEGELNAENTDVQKLFADFVGVYDRTFDDSHLSEITVDASSILTEKISKSRRLEKLINNYPKEKKNTLFGNLIALSLGLQPNFKTNFKLSEDAKLQFSKDTYEEDLEELLGKIGDDYADLFTLAKNLYDAILLSGILTADDSSTKAPLSASMIKRYAEHHEDLEKLKEFIKANKPELYHDIFKDETKNGYAGYIENGVKQDEFYKYLKNTLSKIAGSDYFLDKIEREDFLRKQRTFDNGSIPHQIHLQEMHAILRRQGDYYPFLKENQDRIEKILTFRIPYYVGPLARKNSRFAWAEYHSDEAVTPWNFDQVIDKESSAQAFIEHMTNNDLYLPNEKVLPKHSPLYEKYTVYNELTKIKYVTEIGEAKFFDANLKQEIFDGLFKHERKVTKKKLRTFLDKNFDEFRIVDIQGLDKETETFNASYATYQDLLKVIKDKVFMDNPENAEILENIVLTLTLFEDREMIKQRLAKYADVFDKKVIDQLARRHYTGWGRLSAKLLNGIRDKQSCKTIMDYLIDDAQSNRNLMQLITDDNLTFKDDIVKAQYVDNSDDLHQVVQSLAGSPAIKKGILQSLKIVDELVKVMGKEPEQIVVEMARENQTTAKGRRNSQQRYKRLKEAIKSLDRDLNHKILKEHPTDNQALQNNRLFLYYLQNGRDMYTGESLDINRLSDYDIDHVIPQAFIKDNSIDNRVLTSSKANRGKSDDVPSEDVVNRMRPFWNKLLSSGLISQRKYNNLTKKELTLDDKAGFIKRQLVETRQITKHVARMLDERFNKEFDDNNKRIRRVKIVTLKSNLVSSFRKEFELYKVREINDYHHAHDAYLNAVVVKALLVKYPKLEPEFVYGEYPKYNSYRERKTATQKMFFYSNIMNMFKSKVKLADDQIVERPMIEVNDETGEIAWDKTKHITTVKKVLSYPQVNIVKKVEEQTIGQNGGLFDDNPKSPLEVIPSKLVPLKKALNPEKYGGYQKPTTAYPILLIVDTKQLIPISVMDKKRFEQNPVKFLKDKGYQQIEKNNFVKLPKYTLVDIGNGIKRLWASSKEVHKGNQLVVSKKSQDLLYHAHHLDNDYSNEYVKNHYQQFDILFNEITSFSKKCKLGKEHIQKIEEAYSKERDSASIEELADGFIKLLGFTQLGATSPFSFLGIKLNQKQYTGKKDYLLPCMEATLIHQSITGLYETRIDLSKLGGD

SEQ ID NO: 10085 - protein, 1151 aa, unidentified
  REGION 1..1151: note = Description of Unknown: Cas Enzyme sequence
  MOD_RES 213..216: note = Any amino acid
MARKVLGLDLGVGSIGWCLITLDKDEKPQSILGMGSRIVPLSTDDATEFTQGKAITKNKMRTVARTIRKGMDRYQLRREALKKVLREYGMLPDESLIKLPLLELWELRARAATRGEQLSLAELGRVLLHINQKRGYKHAKADEAAEAEAEGKSKKEKEGYVAQVKGRYQALKEKGQTIGQHFAEELRANQQTAPRGVYYTYRIKEQVYPREAXXXXCKQLVSTCEFEKKERVVQVKRINKDGVEELVERTITIGPKVAPKSSPIFQVCKVWESIQNIRLYYPDGTERVLEQEEKQKLFDYLQKNDKLNLTTLRKVLKIKPKEKLWCDKLLEKGIAGNTTLAILRKALKGYEQYEGLLRFDLTIRDGHKADEDGVIRPIVDESYQNEPLYKLWHILYSIEDRADMYRALVGQLKIKREDLDDGLMDALYKIDFVKQGYGNKSAKFICKLLPHLQEGKMYSEAAEAAGVRHSDSMTAQERDERSLLEEIPLLQKNALRQPVVEKILNQMINLVNALKREHGEIDEVRVELARELKMSREEREETTKSNNAREKENEAIAKRIAEYGLTPTKSRIQKYRLWQESDECCIYCGKHVDVVQFLRGEEIEVEHIIPRSILFDDSMSNKVCACRSCNQEKGNRFAMEYIQSKGWEQSYIERVNSLFHDKKISYSKRQRLLMLPKDLPEDFIERHLRLSQYISREAQGILRKGIRLVSASEGGVTAKLRQLWGYDNILRDLNLDRYRSMGETEVVTVEHRDGERTDERIKDWSKRKDHRHHAIDALVVACTQQRYIQRLNRVNAEADREEMDVFIREQQQKPTHSKGEKLSLLENWLIRQPHFTTGEVTSHVEGILVSLRSGKRTISRGRNIYKRSGKTEVQRGVLIPRGALSEETIYGVIQVNGEDKVVCKYPLQSLKAKDVEYIVDEALRKKVRERIKQRGEKEAFAEPLYLDEAQTQEVRSVRCFTGKDQAKLIPLRYNDESEAVGFVAPGSNHHLALYRDVDGRLVESVVTFWQAISRIRYGLPAIVTHPREVIEQALSIPELPEEVLGALPKSRWRLMEVLRINDMFLIGMKDEEIKAAIEGEDYPMLSRHLYRVQNLSSMFYVFRYHLETEVKDNKNDTGVIPKFYRIKSLGRYQKLNPRKVKIDLLGRISLA

SEQ ID NO: 10086 - protein, 1181 aa, unidentified
  REGION 1..1181: note = Description of Unknown: Cas Enzyme sequence
MNKKILGLDLGVGSIGWSLITLDEGGHPAEILGMGSRIVPLTSDNDRVNDFTNFKNGEGATKNKDRTMKRSARRGLDRYQQRRAKLSRLLCEVGLGFPRPLMSLSPLALWGLRADAATEGKVISLAELGRVLYHLNQKRGYRHSKSDESSKQDTEYVAAVKTRYAELRNESLTIGQYMYRYLSASAERGADALSCVHYRVKDQVYPREAYMEEFDRIMAVQQKAYPEVLTSVVLQKLRDCIFFQRPLKSCKHLVSYCEFERKTKEVQIPVVGADGTTSYKTKIVDIGPKVAPVSSPLAEVCRLWESINNIRIYYPDGAVYPLSLEHKQAFFNKLQESKSLNFSDAKKIIGAKAKDKLWCNELLKSGIKGNRTTATLRKLIEDYPQYKALLRFDLKQEDSCRVDLSTGEVLPLISVSYLNEPLYKLWHILYSVAEREAMGNALRKQLGVEQGDLDKGLLDACMKIDFTKQGYCNKSAKFMCKLLPYLQQGYMYSEAADLSGYKHSDSKTKEELEHRALKPRIELLPKNSLRQPIVEKVLNQMINLVNALKDKYGEIDEVCVELARELKMGREERKKYSTRNRENENDNKRVAKAISEFCTPTKSRIQKYKLWEEANHACIYCGKEITKPSLFSDGEAEIEHIIPRSVLYDDSMSNKTCACRSCNKAKNNRAAMDWVLTQTEEFQTEYFKRLEELAKKRLSNGKRQRLMTLLKDIPEDFIERHLRLTQYISRKATEILKDGIRYVWSSEGSVTSTLRHLWGYDKVLEDLNFERYKSMGETQTILVKRGSAEQEVERIKDWNKRKDHRHHAIDALVVACTRQSYIQRLNRLSSEEDRQSMQSELGSSYAPSKEERMQLLDKWLTAQPHFSIQAVRDYVRGILVSFRPDRRTYTKSRNKIKIKGRVSLQTGILTPRGELSEETIYGAIHVDGSKKIVYKRRLENLQVKDVPNIVDKGIQRIIKARLEAYNNDAMKAFAEPLYSDAAQTKQIRSVRCFSRCVYKNMIPLRRNDAGEEIAFVNSGSNHHVAFYRDSKGGLQEVVVSFYQAIERAKYQLPMIIKEPRAVVEEALERNVPDSVLSALPHSSWTFVESLQKNEMFLMGLSDDEIARAIKEVDRATLNDHLYRVQKFSSKDYYFRYHLETQLDDIKGGAIPKFYRVSFSKYLELNPRKVRVDLLGNLSLME

SEQ ID NO: 10087 - protein, 1179 aa, unidentified
  REGION 1..1179: note = Description of Unknown: Cas Enzyme sequence
MRRGFDRYQLRRHRLHRELSKVGMLPDAQLIQLPLLELWELRERAAQFGEQLTLPELGRVLCHINQKRGYRHVKGDRSSSVVEEDKKKKETNSDYVTAINQRYAHLQEAHLTVGQYFAKQLRSSKTESGAIVYRVKDQVYPRQAYIDEYNQIMQVQSAYYPEVLTPHFIKMLRDEVIFMQRPLKSCKHLVSLCEFEKQEKMMRVQQDDGKGGKEVVERKIKFGPKVAPKSSPLFQLCRLYEAVNNIRLTYPDNSPRPLTNEERAKLVAYLQGCETLQEKKPTKRPSKKPKKETCPEVNLDSLKQVLQIEEELRADKLLESGITGDTTRIALATILQPYEQYHHLLTMELETRPMKVQTTDEATGEITEHEVAVLTDSYTRQPLYRLWHILYSIEERDAMRKALITQLGMSEEELDGGLLDQLYRLDFVKPGYGNKSAKFMCKLLPQLHQGLGYSEACAAVGYRHSGSLTREEIAERILLPQIPLLQRNELRQPMVEKILNQMINLVNTLQAEYGIDEVRIELARELKMSREERERISRSNGTRKTKNDAVAKYIQEYGLYPTKTLIRKYLLWEEADRRCMYCGKEISLSQCLNGDEMEVEHIIPKSILYDDSFGNKTCACRQCNKEKGNMTALEYILTKGWEKEYRDRLDKLREEAKRQEKATQKKKKEVQKQTISYSKCQRLLWLKKDIPTDFLERQLRLTQYISRQAMSILQQSIRRVTASEGGVTARLRSLWGYDDILHSLNLDRYESMGETELVPKHPNSEEDDSMKCRITDWSKRKDHRHHAIDALVVACTRQGYIQRLNRLSSETDREEMRRETELRKESTADKLSLLERWLSQRPHFSVQDVSDKVAEILISYPKPKRTHTWGRNRYKKKTADGKEKTCIQTRVLVPRGELMEASLYGKIISDGKERIVKRYPLHALKGTVVDPRLRELITQRKQGSATEAKGAPLYLDAEKKQEVRSVRCYAAKLSTDKAIPLCFDEQGKAITFAKSGSNHHVVHYLDAAGKTHPIILSIWDVIERVRYGLPTIITDYAQVPQDLELPASVRDKLPQAEWKCIDVLLRNEMFLLGLSDEEITQAITRADYTLLSKHLYQLRTISISSDKKIDYTFYYHLDAPDPNQKKKEQGDKKKEKEQSKPAKGTSLTLHKYRVQGLSTFLELNIHKVRIDLLGRITLL

SEQ ID NO: 10088 - protein, 1372 aa, unidentified
  REGION 1..1372: note = Description of Unknown: Cas Enzyme sequence
MKYYIGLDMGTNSVGYAVTDEEYKLLKAHQKPMIGVRLFDEAQTAAKRRQARVNRRRMERRRQRLALLEDLFSPVISEVDPAFFQRLKESFFMVAHKTEEQPNTLFNDPGFTDHEYHKKYPTIYHLRHELMTSQQPHDVRLVFLAVHHILKHRGHFLNPGELGEVGGQLQSCYSQFLVSLSEDFAVELPPDIADQIQAVLTNKTTRRSEKQELLKELFAVDDDLVAQFSRLFAGLSATISKLFGEQYKGQSPKDVSFNGAGFEDEKQIELQQILTDSEFSLLQSAYNLYAQIQLDSLLQGYPSFSASKIGLYEKHKSDLNRLKTLFKANLESKTYATYFSESKKDFCNYVAYSGRCLKNKKKQPVVYRCQKTAFYEELKKILAKLPESIRDSEEVKSIQLEIENETFLPKQVSKDNSLIPNQLQLSELRQILKNAATYLPFLNQQGEDGLTISEMIEKIADFRIPYYVGPINPAHRVVPGQPNGSRHAWVTKTSAEPVRPWNFERVIDLEQSATDFINNLTNKCTYLIGEDVLSKDSPTYARFMLLNILNLLSVNGQRLPVLVKQNIYNDLCLNPKTSGRVTKKKICAYLNAEGYPVTEAELGGMDLEIPISLKAERQLEALVPGKLSLEDKEEIVRLITVFPDSNRMLRNRFSRQFGNKLSQSELIAISKLKFAKWGQLSRKFLTGLRANGPEGQETTILEAMWDYNLNLMELLSQDYGFADAVKQYKQEMLGDQQNFSYYLVDQYPTSPAVKKMIWQTMKIVDEIIRIRKQAPEKIFIEVAREEGEKKRPASRLDQIKQIFKANKDIEDHLKKELDTKSEENLRRKKLYLYFTQLGRCMYTGKAIDLEKLDGKDSANNDFYDIDHIYPRSQTKDDSLMNNLVLVESSANRQKGDDFPIVPGIQAAQKGWWTALKDKRLISEEKYRRLTRTTPLSPEELESFISRQLVQTRQATKAVAELLKLVFPESRVVFVKAGHVSDFRYEQNTFQFPKVRSMNDLHHAKDAYLNIVVGNVFDTKFTQDVRNYLKNHPKRDFNLGRMYDFDVVSASGKLAWKTGEEGSIRMVRSMMALNAIQCTWQTRHQTSGQNGGLFDQNLLPKGKGQFPIKTSNPHLAGQEGINNYGGYNKPTGATFFVVEHELRKKPQRTILPLDLTWVLTHEQTAPELEAYCRETLGLVEPRIILADLPYNSILEVNCFPLRLLAKTGASLKLAPALQPYFPAAFEPILKALTRQAEEGKDAEADPRAVYSSEENLALYDHFTQKLGSEPYSRLSVFANQYSNLSASRGDFILLTPFEQMKVLGQILILFLCDGRSSDLSLLQPKNSDGTPSSKNKQSGMIKISQNLQKGIKVDVLNFSCTGLFLSRTPISQP

SEQ ID NO: 10089 - protein, 1012 aa, unidentified
  REGION 1..1012: note = Description of Unknown: Cas Enzyme sequence
MGKPAEAGFGYRIFRFFIVATALTPENYNGGNLARDTSMRQAQKYDLGLDIGIASVGWCVLGEKRIIDLGVRCFDKAETPDGESLNLARRSARLLRRRLRRRAWRLLKLARLLKREGLIADSTLFQQQTPIAQSLWQLRVEALDRKLSGEEWARVIYHLCKHRGFWFARKAEAESSEGGKVKQGLERTKTLMREKNYRTAAEMMLAEFPEHQRNKRGSYSQALSRELLGEELATLFTRQRELGNPHTSAEFETRILDRKEGLFWQQKPALSGEAMLNLMGKCTFEPTEFRAAKRTWSAERFVWLTRLNNLRISIDGESRPLTQAERQAALDLPYKLASVKYKQLKAELVKQGLLPESARFGGLNYRTDGKDPEDAKLIELSGYHDLRKALEKAGLEGEWQNRIATQPDLLDRIASILTIYKTDDEIHAQLAGLGLAAPVIAALESVSFTDFIRLSLKALGKILPGMEAGQRYDQACVDAGYHHSQLVENAGSRYLPKLDDDAPNNPVVLRALNQARKVVNALIREYGPPQQVHIEMARDLSRPLDERYKIEKEQKTYQDIRQKAREHFAEEFGQAPRAKDFEKWLLYREQEGKCAYSLAPLDLNRLFEDGYAEVDHALPYSRSFDDGKNNKVLALTRENRDKGNRTPFEYLDGAADSPRWQLFEAFVKTNKQYRQAKRDRLLRKNFGKDEAAGFKERNLNDTRYICRYFKNFVERNLALHPESGYQRCVVLSGQLTSFLRARWGLAKVREASDRHHALDAAVVAACSHGMVKRLAVYARRKELEEARGSYIDEETGEIIDIEKLRRLEAHFPRPWDHFEDELCLRLGIDRSTGAVLPADTLAMQRDHLQLRHGYSAEEVAAAKPLFVSRAPKRRNGGAAHKDTVYAQPERLKAQGGVTQKVALSSLKLADLDKLIDPHRNEKLYAAIKARLEQFGGKGDKAFPPGFEFRKPDKDGNLTGPVVRTVTAVIDKLSGIPLRGGIAKNDSMIRVDVFRCPKGRFHLVPVYVHHRAA

SEQ ID NO: 10090 - protein, 1500 aa, unidentified
  REGION 1..1500: note = Description of Unknown: Cas Enzyme sequence
MKTILGLDLGTNSIGWAKVSVDDEDSYIRDIRLGSRIIPMSQDVMSSFDAGVTESQTKVRTGYRGSRRLRERVLLRRERLHRVLHVLGFLPEHYDQAIGWNRSEATTYGKFLNHGEPKPAWARDAKGKMQFLFKSSFEEMLYDFQVNQPEMVANGKKVPIDWTLYYLRKKALTAAVCKEELAWILLNFNQKRGYYQLRGEEEEENPTQVKEYHELKVVRVEATEERRGGDRWYNVVLENGWIYRRSSKIALDDWVGKTKAFIVTTEYEKDGKTLKKDKDGQVKRSFRAPDENDWTLRKKRTEHLLEDSGKTVGAFIYDHLLKEPSDKIRGNFVRTIERNYYKDELRAILRKQTEYHNELRDPEWLEACARELYPNNRPHRDSLLKKDMVYLLLEDLLFYQRPLKSKKSLIANCPYEHYEYVNKETGEIKHQPIKCIAKSNPYFQEFRLWQFIQNLRLFDREDDHEVTGDYLKTPDHYARLFDYLNDRKEIRQDTLLKDYFKLKKVKIGGENQFPVRWNYIDNNEKKYPCNETRYELLSALDKAGMEKAWLDSDHEYRLWHLLYSVEHKDETRTALRKLVDDDRFVEAFLKVKPFAKDYGNYSEKAVKKLLSVMRMGYLWREDEVRNSLQAQMEKIARGELEEKVIEKISNSGFTFQTVDNYQGLPVWLACYVVYGRHSEATDVLHWQKPEDLLSYIKKFKQHSLRNPIVEQCVLETLRTVHDIWKEAGHIDEIHVELGREMKSPSAERARRTQQILQNENTNMRIKSLLMELKRDREIQDVRPYSPMQQEILRIYEEGALQTLRKEDKDYAEIARIAQKAQPTADELIRYKLWLEQKYCSPYTGRTISLSKLFTSAYQIEHIIPQSRYFDDSFSNKVICEAEVNTLKSNLLGHEFITQHGGEIVHCTMLGDRKILSEAEYLEFVKEHYQGNKSKKEKLLMEEIPQDFLNRQLNDSRYISKIVKTLLSNIVRQQDEAEATSKMLITCTGGITDKLKKDWGLNDVWNTIVSSRFQRMNALTESEQFGHWENKDGKRVFQTAMPLELQQGFNKKRIDHRHHAMDALVIACASRNIINYLNNESANDTRRREDLRRKLCDKNRVIRKPWDTFTQDAYKALSQVVVSFKNYVRVINKATNYYEKYDDQGRKIRVPQKGNDLWAVRKPMHKETVFGHVNLKRKAVMTLSKAIDHYSTICYKPLRQAIAAMSRAGLAKKEIVSHFKKLEYKWNDTDVSKVEVWVFSDDREPMVATRKPLNDDFDEKKISSISDTGIQKILLNYLKAKGGDPQVAFTPEGIADMNQHIRLYNDGKFHQPIVKVRIVETMGNKFAVGQVGHKGMKYVEAQSGTNLYFAIYQAADGQRSYETIPLNIVVERLKQGLGPVPEKNDKDEPLKFYLSPNDLVYVPTEEETLASHASINADRIYKFMDSSGNTANFVPHRISSLIYNVDKKSAEAYCRGKLVQNELGLGSPQLKNQRAISGEMIKSICWKLEVDRLGNVVNIQK

SEQ ID NO: 10091 - protein, 1401 aa, unidentified
  REGION 1..1401: note = Description of Unknown: Cas Enzyme sequence
KILGLDLGTSSIGWALVNEAEDDIQKSSIIKLGVRVNPLTVDELSNFERGKSITTTADRTLKRSMRRNLQRYKLRRTSLIKILKDNNLISEEAILSESGNFSTFETYRLRAKGVEEEITLEQFARVLLMINKKRGYKSSRKARSQEEGQLIDGMSIAKQLYDENLTPGQLCLQILQSGKKYLPDFYRSDLQNEFNRIWDSQKYYYPEILTDELREKLVNRNDKATWAICEKPMKLIGIKRESKGRDIRLENFKWRVEALSSKVDLEHVAIALQKINGQISSSSGYLGSISDRSKELYFRNQTVGQYLMDQLKSNPNISLKNQVFYRQDYIDEFNILWEKQAQFHKELTEGLKSKIRDVVIFYQRRLKSQKGLISFCEFESSRVEIETEGKKRVITIGSRVIPRSSPLFQEFKIWQGLNNLEVFSKGQSSRKSASSRTVSAHREGDVRRSLDQEEKLLLFRELSVRDKLNKATILKMLFDNHNELDLNCSELDGNKTSAAFFRAFNEITEVSGHVKIDFDKLNADEIVSSIDLVLDTLGCNPGILHFDSDVEPDKQMFYRLWHLLYSYEGDDSNTGIDGLIDKISTLSGLKREYARILTGITFTDDYGNLSAKAIRKILPYLKTGNRYDLACEYAGYRHSKSSLTSEEIASKVLKDKLMILPKNSLRNPVVEKILNQMINVINAIIEEYGKPDEIRIELARELKKNASEREKMTKMINETTLAHEKIKKIIQDEFKLSHVSRNDIIRYKLYQELETNGFKTLYSDTYIPREKIFSKEFDIEHIIPQARLFDDSFSNKTLERRDINLEKGDKTASDFIRDKWGESGLQAFQDKIERIQNQNGQGISKAKYSKLKMSEGDIPDGFIERDLRNTQYISRKALGLLGEIVRTVVPTTGSITDQLREDWQLVDVMKELNWEKYKALGLAEYLVDKDGRQIRRIKDWTKRNDHRHHAMDALTIAFTKPVYIQYFNNVNARYDKGSEAYRIEQKYFSERKVIPPIPVDEFRAEAKKHLDEVLVSIKAKNKVVTKNTNVIKIKKRECPQSQLTPRGQLHLETVFGSNRAPVVREIRVGGTLNEEIIRLVTKPKFRDALLRRLAEYNHDPKKAFTGRNSLEKQPLYIDELHTKRVPEKVKIITFEPVYTIRKQIAPDLNIDKVIDSKIRSLLQERVSVYGDAKKAFSNLDEDPIWLNKQKGISIKRVSITGINNAQALHEKKDKEGRLITDSEGRTMPVDFVNTGNNHHVAIYRDANGDLQENVVSFFEAVTRANLGQPVIDREYRSSEGWKFLFTMKQNEYFVFPNFKTGFNPNDIDLLDTRNYSRVSPNLFRVQKLSTKNYVFNHHLETTAVTGDTLKFNKQMSGITYRFIQSLPPLEGVVKVRINHTSVPLKVVVTEQVRSIINWDYC

SEQ ID NO: 10092 - protein, 1493 aa, unidentified
  REGION 1..1493: note = Description of Unknown: Cas Enzyme sequence
MYNQDEVKEQKELKKPGLTIGLDIGTASVGWAVIDNNFNLVQGKKRIIDIDENGKTKTRKSRTNLWGARVFDEGQTAELRRLQRGTRRRLARRTERLKLLRAIFATEINKFDESFFIRLAESFYQNEDTKNKGVITEYPLFHGTLGSGETFAHDKAYHEKYPTIYHLRKDLLENPAQKDLRLVYLALHHILKYRGHFVNAGQTFDLAHGSIDIKKSFADLYNAFIMHLNEQMTDESQEPQSILPAAQQEAVQTILADRKKSKSWKAYELAEYLGQSNSGVQKQQKALFTAVVGNGIDLAKIFANEAYSNKTDAAIFPKAGDFKYSNDRYEEYITNISAVLTEEEMAIIEQGKVVYESIILSQILTKQTLAASMVEKYELHKQQLTDLKTLTKSIDDALYAQFFKADGVYTKYIDGVGNPRKKLTQEDFYKEVKKLLEGAIPQLVFPKKEGATFNFDAVTLNEQQKATFIALDEAMQLDNYLLKQRTSANGAIPYQIHEHELVKIIENQKTYYPFLGEELQITREDDAAGTVQKTEYKIQILMKFRIPYYVGPLAKHVGWKRDDTGSLIETEGYSTNSWVVRNSTEKLTPWNFDEVINKEASAENFIARMTGFCTYLPTKKVLPKNSLLYQEYTIYNELMSCGYYSKGKKEYFPPELKADIVKKLFQQQKKVSAKDMMKFLANEHGIQLTDETALFGIDKHVKSPSYNTSFSTYIDLVHCGISASQISENREKFEQIIMWQTVLEDKAMLKKRIKQTNAEVWHNLLTPEQVNKLVNKHYTGWGRLSKELLDGIKTSDTEGLTIIDHLKKRPYRNFMRLLEDPKIAETIAKAQGDLGKQQTFNYELVEKLAGSPKIKKSIWQTLQIITELERYLGVENIDRIVIEMARDNSGGRTKTRQQQIEKFQKEFLSNTGEKLDEQIKDAFARQTKDEFNDEKCYLYFLQNGKCMYSGQELSLESLSTYEVDHIIPQTYIKDDSIDNKVLVLKSENQNKGGDVPSQTIVNRMRAYWELLAKNHQVSPKKLANLTRGTLSDETKEGFIKRQLVETRQITKHLANILNEYFKDKQVDILTPRAQLVSQFRDGIVYLPAGEQGDMIISETKVKVLPAESDKFVKVRLHDKWHKNRELNDYHHAHDAYLVAIVGTYLYAVRPDLRGIWVYNTYKKDEYAKMGHYVGQRKEAYRQLLSGMVSPQWSNINLNTGEVSPCYPDVNNWSRDDVLQKIQKTLQLRNINIVKKTEMQDGKFGDVSLYKSPNNIKGKKSGKQDNFAHGLKHNLEPLRYGGTKSPSSALAVLVKTQKGEITGISVPAMQVREYLKSTNKLSYLQQEVDKTITAIVRPQMTKYTKYILPDGAVRLLASFQEASNGLQLPMMKVPTNIKDDTITEVQEQELLETYKTLVQFIAKNKLFKAAKIELLANDGLITDNFKQSTTEDKQKILTELFRVVKGSNQNLKALQAAGLGTTAQQLIGPNDKIGESSEIIDQSVTGLYETRRKL

SEQ ID NO: 10093 - protein, 1084 aa, unidentified
  REGION 1..1084: note = Description of Unknown: Cas Enzyme sequence
MQTKNQPYTLGLDIGMASVGAALLLPNQERILALHVRTFDKAETAKEGESLNKIRRDSRLTRRRIRRRAHRLVRLARLMKRVGLIADANPEAFALPGVSPWDLRAECLDRLLAPKEWAGVLYHLVKHRGFQSNRKSEAKADEKAGLMLSGVGRNHELLKESGYRTVGELAARHESFKEAKRNKGGSYSHTFARTDLDTELNLLFERQRALGSSLASADFQENVHDLLMARRPTVTEKNMRQMVGKCTFEKLEFRAPKAGYRAERFVWLGKLNNLKIVGGGDARPLTDTERRAIIDLPFTQAKLTFKQVRRALDLAPHQRFNLLSYRARGDGQDKDPENDTFLEAKAFHLLRKAYEAAGLAKEWHRDSLDPDRLDALAYSMTWFKDDSDSREWLTAQGIESTITEAILDVSFAKSKNGFEQFIHLSQKALKAILPHMEAGQRYDEAAKSAGYDHSQPDANVGKRSALPPPDKDSILNPVVYRAINQARKLVNAIVAEYGPPAAVHIELARDLSKPIDERRRIERDQKEFQVEKEKAVADFRDRFDREPKGPDLQKWRLYREQGGQCGYSQQAIEVGRLFEAGYTEVDHALPYSRSFDDSMNNKVLVLIKENRDKGNRTPYEYLDGANDSTDWQRFVAWVQGNKAIRQAKRNRLLRVNFGADEASEFRDRNLNDTRYICREFKRMVEIHLQWHPESIADNRCVVLSGQLTSLLRARWGLLKVREEGDLHHAMDAAVIAAAGRGLVKRMADYSRRKELQMVRNRYVDPATGEVIDVAALRQIEDHFPKPWPQFYEELRARLSPNPTLLLASVSGYDEALRESIRPIRVSRAPTRRGLGAAHQETIRSVRDGSQSAIKTPLRDLNLKDLENIVGFERDTALIDAIRARLEAFGGDGKKAFDNKQPPLHKPSKDPEKAPIIRSVKLLVTQKSGLPVRKGIANNGAMLRADIFTKGGRFHAVPVYVADAAKEAKAGLPNRAVVQAKPEDEWTVMDESYQFLFSLHPNDWVTVRLKGETKEGYFAGLDRATGAISLWLHDRNQSVGKDGQWRGIGIKTAPAVEKYHVDLLGNLHRVHKEDRQPIHVKPGKG

SEQ ID NO: 10094 - protein, 1096 aa, unidentified
  REGION 1..1096: note = Description of Unknown: Cas Enzyme sequence
MQSKQNFGALTFGFDIGIASVGWAVLNESRIVDLGVRCFDKAETAKEGESLNLARRNARLLRRRLRRRAWRLTKLARLLKKQGLIADVAIFKPEHPFATSLWELRKQALDRLLTPEEWARVIYHLCKHRGFHWVSKAEEKKAEEDSKGEGGKVKQGLAGTARFMKEKGYRTAAEMVLAEFPQAQRNKQGEYSKALSRVLLGEEFAKLFDIQHALGNPHATAELKTKLLDRKTGLFWAQKPALAGKDLLKMLGHCTFEKTEYRAPKASFTAERHVWLTRLNNLRIVMDGITRSLNEDERRIALPLPYMQASDLSYKQLKSALVKAGLLLGTVRFTGLNYPSAAQLERDKAKDPEATALVKIPVFHEIHKTLKDAGLETEWQGLLSSAFGGDAGLLDQIAWVLSVYKDDEEVERELNMLALPNKVKMVEALLGVRFDKFSNLSLKALRKIVPHMEQGLRYDEACIEAGYHHSQLVKPDDDKLKYLPPFYSSRDKTGKLIFNEALDIPRNPVVLRALNQARKVMNALIKQYGAPHQVNIEMARDLSRPLDERRDIEKLQNEFRERNQKDRDTFNAEYNSTGTLKGREFEKYQLYREQQGKCAYSIEPLDLNRLFEQGYVEIDHALPYSRSFDDSKNNRVLVFREENQRKGNQTPYEYLDGKGNSERWRQFVAFVEGTKSYRLAKRSRLLRKDFDEKESAEFRDRNLNDTRYICKFFKNYVEQFLQLAETSESKRCVVLSGQMTAFLRARWGLTKVRADSDRHHALDAAVVAACSHSMVQRLSNYSRRKELDKVREGFVDVTTGEIANPAMYQQLKEHFPDPWPHFRQELESRRTTDDLATLQAEMRNLGTYSEGDLAELKPLFVSRAPQRHNSGELHEAKIRSIKRIDSEQKSYIRVPLQSLTVKALDSIIEADGRNKSLVEALRQRLQENGNDAKKAFKAPFFKPSGEGKVAPIIRAVKVLNTQRTGVLIRGGVADLGTMKKLNVYQKGGQYIFEPEYQADKEKIINKTINTDEATYLFSLTKNDYVCLMLKGFVYKGYFVMYESDGRMNLRAHDQPLVSDIGYFRKSVLGIEKIDKFNVDVLGNIYLAQKEERRGLA

SEQ ID NO: 10095 - protein, 1021 aa, unidentified
  REGION 1..1021: note = Description of Unknown: Cas Enzyme sequence
MLHKMRYRLALDLGATSLGWAMIRLDGSNQPCAVIKAGVRIFSNGREAAPPGQQGDSLAKTRREARAMRRRRDRLLKRKARMIRILIEYGFFSSEKSERESLLTLNPFKLRAEGLNRALTPAEFGRALFHINQRRGFKSNRRTDKKDNDNSALKHAISKVRTTIDAEGCRTVGEWLNKRDEAGKTVRARYRQNKIVKDDGKTRIDKSYDLYIDRSMIEQEFDALWDKQAELNPALFTEAARADLKDVLLHQRPLKPVKPGRCTFLPDEERAPLALPSTQRFRMYQEVNNLRILRDGLKEEPLTLKQRDDLIVALEANSECSFTQIKKLLGVGGAVQFNFEDPKRQEFKGNTTSAILGNAKHFGPMWLTFDEAKQDAIVWQLVKEENEAKLIRWLQDETGVDEKRAETIANAGLPEGYGSLCALALARVLPELKRDVTTYDKAVQAAGFDHHSHISPSATGEIWPELPYYGEPLQRHVGFGSNDPKDCDEKRYGRIANPTVHIGLNQVRVVVNALLKRYGHPSEVIVELARDLKQSKKQRDEENQRQAENQKRNRQFRSDIASVLGIGEERVKRADIEKMILWIELNQKNSADRQCPYSGVQISAHMLLSDEVEIEHILPFSQTLDDSLNNKTVALRQANRVKGNRSPWDAFGAQSTAGFDYAGILARAEQMPKAKRYRFGEDGYQRWLKDDAGFLPRALNDTRHMSKVAREYMSLICPNTRVIPGRMTAMLRAKFGLNDVLGLNGEKNRNDHRHHAVDACVIAVTDQGLLQRFAQASASAREQQLNRLVENMPLPWESYREHVKRAVGAIWVSHKPDHSHEGAMHNDTAYGLRGSGRVSFHKMVDGQRTHIEDNLKVIELTDAKAGNRHGFLPSGEPKPYKGYKGDSNYCIEIVSNEKGRWEGEVISTFDAYQLVREHGTARLRHPTLSISGKPLVMRFVMGDYVRLEVNGIPNTFRVASINSAGRLTLAAHQEANVDARNRDREGNWRYTYKQAGSLQSSKARRVSVSPIGELRDPGFKE

SEQ ID NO: 10096 - protein, 1059 aa, unidentified
  REGION 1..1059: note = Description of Unknown: Cas Enzyme sequence
ALHVRTFDKAETAKEGESLNKIRRDSRLTRRRIRRRVHRLLRLVRLLKRTGLIETAGPDAFAMSGVSPWDLRAKGLDQVLEPREWAGALYHLIKHRGFQSNRKSEAKTDEKAGQMLSGVGRNQTLLRETGFRTVGELAARHEDFKDAKRNKGGSYSHTFARADLDAELSLLFERQRALGNSFTSAEFQAKVHDLLMARRPMQGVLEMVGYCTLEKDQKRAPKASYRAERFVWLGKLNNLKIVGGGDARALTDVERRTLIDLPFAQAKLTFKQARKTLGLELHQRFNLLSYRPDPKGNDKDPEEAALFEAKFFHKLRKAYESAGLKNEWQRDAIDPDRLDALAYALTCYKDDAESRQWLTEQGVEAPVIEAVLAESFDQFIHLSQKALKALLPHMESGQRYDEAAESAGYNHSQPETASNNQSYLPPPDKDIIRNPVVFRALNQARKLVNAIIKEYGPPAAVHIELARDLSKPFDERRRIEREQKEYREEKQKAAGRFAEDVGREPKRDELLKMRLYHEQGSQCPYCQSALDINRMFDQSDVYAQVDHALPYSRSFDDSLSNKVVVHTKCNQDKGNRTPHEFFDGVGDSERWQRYVAWVQGNKSIRQAKRNRLLRVNFGAEEASEFRKRNLNDTRYICREFKRMVETHLQWHPDSTADNRCVVLSGQLTSLLRARWGLIKVREEGDLHHALDAAVIAAASRGLVKRMSDYARRKELDMVRDNCPDPETGEIIDVTALRQLETHFPEPWPHFRHELKAWLSPDPARGLEILPGYEGAADIRPVRVSRAPTRRGLGAAHQETIRSIGREGQLLAEGLSAVKTPLASLKLKDLGNIVGYSHSHNHAMIEAIRKRLETNGNDGTKAFKTPLFKPGTANGYDADKSHVGETDQRAPQIRSVKLTTTQKSGIPIRGGIANNGAMLRVDIFTKGGRFHAVPVYAADASKKKKELPNRAVIAYKPEEEWTIMDESHQFLFSLHPNDWMCIRLKDEIKEGYFSGLDRATGAVSLWIHDRKQSVGKDGQWRGIGIKTALTVEKYHVDLLGNLHRVHKEDRQPIQHKACEV

SEQ ID NO: 10097 - protein, 1073 aa, unidentified
  REGION 1..1073: note = Description of Unknown: Cas Enzyme sequence
MNYYNGFIITENAMTSKQENLGALTFGLDIGIASVGWAVLGENRIIDLGVRCFDKAETAKEGESLNLARRTARLLRRRLRRRAWRLTKLARLLKREGLIADANLFKRKIEKDTSVPKSAWQLRVDALDRQLSAEEWARVIYHLCKHRGFHWISRAEEKAAEGDSKSEGGKVKQGLAGTKKLMQEKNYRSAAEMVLAEFPDAQRNKQGDYSKALSRILLGDELKALFEQQRKLGNPFAAEKLEAAILCNDKDKKGLFWAQNPALAGNKLLEMLGRCTFEKTGGDDGKGEYRAPKASFTAERHVWLTRLNNLRIVVDGTTRPLNEAERRIALLMPYQQAGDFTYKQLRTALTKAGYLPESFRYTGLAYTSEQKADGKTKDAESATLVKFPAWQELRKTLEKKELTSEWQKISTDALEGKPQLLDDIAWVLSVYKDDAEVETELRKLNLPNAEKIIDALLDIRFDKFSNLSLKALRQIVPFMEQGQRYDEAVANIPEYGHHSQLHEVGAGEHKYLPPFYKERDKTGRMVFNDDMDIPRNPVVLRALNQARKVVNALIKEYGSPHEVHIEMARDLSRPLDERREVEKLQKEFRERNEKDKAIFTSEFSIVGTVKGKEFEKFQLYREQQGKCAYSVEPLDIHRLFEQGYAEIDHALPYSRSFDDSKNNRVLVLAKENRDKGNRTPFEYLGGKDNSERWRQFVAFVEGNKAYRLAKRSRLLRKDFGEKEAKEFRERNLNDTRYICKFFKNYVEQYLQLHEDSEAKRCVVLSGQMTSFLRARWGLVKVRADSDRHHALDAAVVAACSHGMVKRLSDYSRRKELEQVREGFVDIDTGEILNPAMFDQIEKHFPNPWPLFRNELEARLKLDDIALLRKEMQRLGTYSEEALQAVRPLFVSRAPQRRNSGAAHKDTIYAQPERLKAQGGVTQKVALSSLTLKDLDKLVDPHRNEKLYAAIRTRLEQHGGKGDKAFPASNPLRKPDNEGNPTGPIVRGVTMEIDKLSGIPIRGGIAKNDSMVRVDVFTKVGKFYLVPIYVYQAVAKELPNRAATANTPRESWTLIDDRARSKTNRNTLERLRCW

SEQ ID NO: 10098 - protein, 978 aa, unidentified
  REGION 1..978: note = Description of Unknown: Cas Enzyme sequence
IRDDRVLDFATRADHAVAIGIGSVGWALLDMGHHEVLGMGAHLFNPPQENKTKVSLAATRRAARSQRRNIKRSADRNTHCLRVLKGAGLVPADADKGWLQLAKGDTQIIDARVEGLDRLLTDRELAQVLFSLCKRRGYIPHGDKESDADGRKVLSAISQNAENMEKNGWRTVGEMLRAGGSTRNKAGQYDKCVTNAQLVDEVKKILEAQRNLGNGKATAELESAYLGCMLWQKDTSDRDERVYKQVANCDIFPDEKRAPKACLSFEMCAAYERLCHTTIVMPDRSESKLPATFREAAISTLFSPVKLKGNKDCKVRYSDIRKSLDLPAMATFKGIDPAKEKDTEVAKPAAWRLMRNQLPEELMQKMRADRELADQIGFALTFASSESSLRAKLEPLDLSDDEVASITSLPFSSKAFSGYGMRSLKALDLLIESFEDVENITTLAEAMEASGIAAKRSEKGALHAKLPPYVDYDPTCKNPVVLRVMGRVRKVVNAIIGQYGMPNEIHIELARELKHSAHEKAVISKGNNARRDANNACRAQLAEDLGCTPEQVPSKLVRKLVLWKEQQGRDVYTGNAISYEKLLDDDSYCDIDHILPYSRTCDDSSMNKVLTTAESNRSKGNRSPYEWLMDNGTWEEFRQRIQASPEIPYKKRLKLLEENLAEKENDFIGRNLNDTRYATKAAQGYIADNLEFPADGRKRHVYAVAGGATSALRGAWGFAKKDREADDSHHAVDAAIIAACDASMVIKVAKASEAKRLTPRDERESLFRGTEPWEGFSDEVQSRANRLVPTRMVDHGGTARLFEDFRYRFDGIRDDGKKALLTRSGKTTPSGNYVIAKDGSAMLPDGMAFLRLWWDEATSHYLPEPVYYADLASIANGSYEPKVFTRGKPRPMWKPLPESAKGFSTTLRYGSPLKVKGALVRFQQFHSSAGDWYLNDIRHLGAEKLAGMTLASIRNKDDLVAIREDILGNCYSELEEDR

SEQ ID NO: 10099 - protein, 1080 aa, unidentified
  REGION 1..1080: note = Description of Unknown: Cas Enzyme sequence
MKQGQIAFSFDIGHSSIGWAAFQVSDAPGTFHSLLGTGVVLFPKDACLASARRGFRRSRRNIAARRSRIDRLKNYLAGLGVLSRDQLDANSNSYPWLLAARILASDGKKTLTWEELWSVLRWYAHNRGYDGNALWAGDDADAGDKEDTDKVKNSIALMEKHKTATMAETVCKALGLDPMGEVKASRIYFKGNNAAFPRGVVTEEVRRILAAHAGKLPKVDDALSDILLRNAATSGLELPARFKGGLLFGQYVPRFDNRIIPACRITGKNTPLKRCPEYLLYRWGRLLNNLTVFGADGQIRTLLPAERQALHSRMEADGFFTKRTLNAALKDVTGCTPANTESFFLTEEMEEALVLDPVKKLLATNQIMKDLWPQLSAESREKAQSSLSAGKKIRLGDILAEMETAGQDTTAASDALASHQKKAKKKNADLATRRLSADYPKGRAAYCREILAKTFDESISGKDSTKEGGCLYETEEIRNRLLREPLVQQTNNHLVRHRLLVFERLLAHMVEEFAGGDEKRIAATVVEVVRELQEFSGLNSKEITHKLNEKLGNFRSVVKNLEEAIANSEERVAITGSLIRKARILEDQGFVCPYTGTHLSYNHLLADRLEIEHIIPRSLRPSDALSSCVMTFRSVNDMKGQRTAMQFICEEQGREVPGHENIQITTKKAYVDYVAKHKKQYPQKSDDRRRCERRAELMLMERYDQRNADFTERDLTQTSHLNKMAIRLVKQRIGIDAKHLPGNVTAFIRQKLHIDECLFNAVPRLQTAAKGQPKSSKRKKKAEEAPVEPIQDDMPPRKLTKADIRELTYLHHAMDAVTQGLALLLFAPEDWPLLVKRNLPDSEQRHLKARYPFLDFSADKHISIQDLPEDTLHTISERLAECRVVRHIPAKMHGIIVDQTTWGIVAAGAITTLRQKTTEKNARCDENGKRFIKTTEKKRSLLLGGPDAPDGKLAKIKGAILVTENWGCALDPSPTVIPHFKVYPQLRALREKNGGRPIRILRKGSLIQVKAGTYQGIWSVASIKDNADGICLDINAADKVKLENRSDDSKINVRLDSLRKSGLKILKPKLTGACPTTSSP

SEQ ID NO: 10100 - protein, 1541 aa, unidentified
  REGION 1..1541: note = Description of Unknown: Cas Enzyme sequence
MKKILGLDLGTNSIGWALVNTDENGKPCSIEGMGSRIIPMTQDVLDTFSGGKPLETQTSARTSYRGIRRIRERHLLRRERLHRVLNVLGFLPEHYANQIDFEKHLGQFVDESEPKLAFNNRNFIFKNSFEEMLSDFRQSQPQLFYTKPNGEETKIPYDWTIYYLRKKALSQKITKEELAWIILNFNQKRGYYQLRGEEEEENRNKLVEYHSLKIVEVLADEKPNTKGDLWYSLFLENGWVYRRSSRTPLFDWKGKVREFIVTTDLNDDGTIKTDKDGNEKRSFRAPSEEDWTLLKKKTEQEIENSKKTVGAYIYDSILQNPSQKIRGKLVRTIERKFYKEELIAILKKQIELQPELFTDDLYNDCVRELYRNNEAHQLVLSKRDFVHLFVEDIIFYQRPLRSQKSTIGNCSLEYRIHKDKDGIQVKEYLKAIPKSHPFYQEFRVWQWLSNLKIYRKEDNADVTTEFLKNTEDVVNLFEFLMAQKEVGHKDILKHLVTPALKEKFPNAKPAAFNKEVDKEIAKYRWNYVFDDTKEKEEDKSKKYPCNTTGYEIRRRLEKVANIPSSFLTSEIEQHLWHIIYSVTDKKEYEAALKSFANKYKLDENSFVEEFRKIPPFPSEYGAYSEKAIKKLLSLMRLGKFWNWDAIDSKTQDRISKIISGEYDESIKTRVREKAINLTDNNHFQGLPIWLASYVIYDRHSEADIAGKWNSVDDLEKYLEDFKQHSLRNPIVEQVVTETLRVVRDIWKQFGQGKKDFFDEIHVELGREMKNTADDRKRMTEQVTNNEATNLRIKALLAELKENSDGKLPVENVRPYSPMQQDALRIYEDGVLKSNIDIPEDIKKISKSAQPTKAELQRYKLWLEQKYRSPYTGSVIPLGRLFTEDYQIEHIIPKSRYFDDSFNNKVICESAVNQLKDKQLGLEFIKNHHGEKVECGIGKIVEILSEEAYRSFVKEHYSKNKTKQQNLLLDDIPEKMIARQMNDTRYISKFISSLLSNIVRADKEDDGINSKNLIPGNGKITSILKKDWGMDDVWNDLILPRFERMNNLTNTNNYTYWNEQYQKYLPIDSINIDSKEVKIEKKRIDHRHHAMDALIIACMTRDHVNLLNNQSAESETTRYDLQNKLRNKTKETWFDKKTNRQVERDVFKEFKKPWDNFTIDAKNALETVVVSFKQNLRVINKATNYYEKWVEKDGKKVKAKVKQEGTNWAIRKSLHTPMPYGKKSYFFDLLKIAESVGKREYIIDYEIKAKVEEVLAECNGKVTEAQKRLKQFPLIDNQGNPIIQTAYRINTEKFRRRQPISMLSNRGQGGIKTIEDAKKVIDKIVDYKIRMDLLKHIEECNEDLEKAFSAEGIENFNSKRKIPIYKLPIGESGSGRFCVGNKISTKHKWVEADKGTNLYFAIYESEEGKRSYESIPLNIVIERLKQGLPPVELKGENDFFLTPYDLVYVPNEDEFLNSNLIDFSKLTNDKIERIYKVEKFSDKECYFTKYHIASLIKQYDAKSKFGELESQNKLQTTMCTERIKIIDRCIKLKVDRLGNISI

SEQ ID NO: 10101 - protein, 1060 aa, unidentified
  REGION 1..1060: note = Description of Unknown: Cas Enzyme sequence
MGSERRTRVLGLDLGANSVGWALFDFDGDEPCALVDAGVRVFEAGTTGDIESGRDEPRGVERRQARQARRQAERRSRRMANLASLLRRHGMFPECSANKGAARDKAIARLDKELHAEYRANVRNAPDALRSLQQLPYFLRSRALDEKLSLLALGRAVYHLAQRRGYLSNRKTKRDKKEEGEVESSIKTLKTRIAESGARTLGEYLSRVDPVEEERLRRRWTARGMYEAEFEAIWKAQAVHHPRVLTDDLKRQMYDCIFFQRPLKSQKGLIGYCELEPKKRRAPKALLAAQRFRLLQKVNDLRLHMPDGQVVDLAPEQRRTVADKLNTVEKQSFDQLRKLLKLPAGVEFNFERGGEKGLPGNTTAAALRKVFKKRWETLTAAQQMAVVGEVMGITSDETLIRRGQEAWGLDEEAAEALALVHLEDGYIGLSREALKKVLPHMEEGIPYATAKIRAYGEHWTRNVVDALPPVEDAALPIRNPVVMRTLTETRKVVNAIIRKHGKPEIVRIELARELKRPREERKRLTKEIQDRRANRASLVETHFADGRKASRADIEKLQLWEECNQMCPYTGKPISFESLFGDAPQFDVEHIIPFSRCLDDSFLNKTLCYHEFNRSVKGNRTPYEALGHDEEAWNQMITRVRQFRGDAARAKLERFLAQDLKAFEDFVSQKLNDTRYASRMAAQYLSWLYGSEARSRVQVSTGQITAYLRDAWHLNSILGDGGEKERGDHRHHAVDAVAIALTSRSIVKRMSESAQRRLDARGRSRGWWNDLPMPWDSFFEDIKTKLAGIVVSHRVSRRVKGQLHDDTVYSPPRKDESGKEYVATRKPLTDKFKAADIVKIVDPAVREAVREWLERHGNDPKKAFGDVANHPRLTIKRGPRAGQSVPIHKVRLKEYRGVEPIGQPPHERYVWARNNSHIEIFGVLDKEGKVTKWKGRVVNRLEAYRRLKAKKPVVDRDGGPGTRFLFSLTQGDAIEVDVQAPGGEICRFEYIVRGIWEENAKARMECVHGTDARKKQDIPRSKTEEEWARYRWTPFADGLRKVGCQKLSISPIGETIPAND

SEQ ID NO: 10102 - protein, 1087 aa, unidentified
  REGION 1..1087: note = Description of Unknown: Cas Enzyme sequence
MKEKERKIYRLGIDMGSTSLGWCMLELDQDHQPCNVINMGVRIFPDGRDDKSKEPLSVKRRTVRGARRNHDRYLLRRKALLNFFDREKWLPQTEPERHEVFLLDPITLRKEALDRQLTLPELARAFIHLAKRRGFKSNRKGNKEDKNFSAYKIAMENLENKIKESKARTLGEYLWLRNKDLPSSLQHLRKPIKFRYEKSFADEERIFPTRKMVTDEFDLIWDTQAAFNPLLTPSLKAELKNIIFYQRDLQPQEVGNCLFEIEEKRAPKASPIFQEFRLRQDINHLKLIKKEGFEVRELNNEEREKLFQKLNMKKEVAFAALRQAILGKDEYDKYRFNLEEESKPKKGKKESNPEAGEEEKKSKGKLKGNLTNYSFLRFKQLGAYWMHLEQDKQDRIISLLLDDSLTDEACVMLLQEEGMPGDLARQALDVDLPSGYGSLSKKAMLKIMPFLRQGMIYSEACSAAGYNHSGFYNGEVFDQGNLPYYGELLTRYMQKVNRKTYDEAADQYGKINNPTVHIALNQLRKLINALTLRYGAPAEIHVELAREVKLNAEQNKEINNRIKKNREENERIAKELEKAGLEASKENITKYKLWQELSPDPFDKRCVYCGRQISFLDLFTPEIHIEHILPKSRTYDDSYANKTISHLSCNIDKGEKSPWEAFGNMTGKYDWQSICIRADNLPENKKWRFLPDAMDRFADENELIGRMLNDTRYMTRIAAEYLQYVTGKLPVAVNGKLTSDLREKWKLNSLLGEGDAKERTDHRHHAIDAFVIALTDRSMVKRYADAVKRDTIASNNHSKRFLQDLGDPYPNFNRQRLQSMIDKLVVSYKPDQPNPSLLRSRRQTGGALLEETAFGYLGPDPKNPKYSLYSVRKKVSELEMKDIETVISKDLRESLLNLANTCSNDKEFKAKLPAWAEEHKVKKIKTTVKANPKTMIPIKDKNGRIYKYYQAGENLFADIYQIYLPKKNLNKWGIEICNSYAVHQPDFMPEWKKLYPMAKLIMRVYKNDIVAFTNEEGKRELRRVRKMTYGKIYLRELNIAKKEKGKEDIGEQFNINSLKTKQACKAGIDIMGRWFDPLGDKNASDRN

SEQ ID NO: 10103 - protein, 1543 aa, unidentified
  REGION 1..1543: note = Description of Unknown: Cas Enzyme sequence
MSKILGLDLGVNSIGWAVVDDEKASIIDCGVRIFPEGVENLGQGEKETSKNAQRREKRQLRRHYYRKRLSKIKLLETLIPLKMCPLSLNSLKKWKNWNNELKSDGRKFPNDPEFIEWLKMNPYALRKKALEEDLSLEQLGRIFYHFIQRRGFYSSRKGKDSGKIYQGENNTIGILETEKEIGYNKTLGTTLYEMILPEHQTYIYRTDENRRPLRARNRYTLREMYVKEFHAIWEKQAPHLGLNDKTVTIFKSFHLSGNNDSERNKQRINKIYLQYGIENVTITGKTIKVAQQISLKTLFGGRIEINDETHEILYRSQDSLLFWQRPLRSQKHLLSKCTFEKRIMFDKTTNKWIETGPTPCPISHPDFELYRAWQLINNIRYGRKEQPLDASQRQTVLNVISYQDKVFDFKVIIDALKLQNEYFNYDADQKVSGCPTIKKLKSLFPTEIWVQNKHEIWHDFMFFEDEELLTQRLIKKYHFTEEKAQKSAKITLEDGYASISLKAIHNILPFLEKGFIFQQAVLLGGIKNTFGSRWEYFKDYHSDIEQFIKDLCNGKKYHEGEIIQNIKEYLSSTVNNFGFNPNDKAFLKLYHPSREVGPEKKGDYISPVENLRNPLVQIGLNEMRRLVNYLLKKYRSMPEFGPDFCFDRIHVEVGRDLKNNKKRRQEIRKENAINEQKNKEARERIIEAGLKPSRDNIIKYLLYSEIEQKNGIVICPYTGKTIRLSDLLGPHNFFQIEHIIPYSVSLDDSFGNKTLCEANFNRSKGELTPYQFYLKNSSKSLWNADSWEEIEQRVFQILPYKKARRFTSKKPAMLDDFIQRQLNDTRYISKKSVQILREICDDVRSFPGQLIADLRRLWGLNDILSEPITDIPLNDLNINESEPTIHYLIVDENNHVKKAIPKINFKPIPMDNELAIPGEIKKETGNKFYFESDSKYYASLKIPANGFETGKYWAFIKAQAAQEFIPRFTPQPQISENVIIIKGNLKKKRFINESHGINFNTNKIIEDGYYWAIIPVIKAEIKQNDINDNRKNENKISIQGRVSNQKFISSIYSCEAQLINGFYTALLDFDVNNADFLPALNLPRPPENYYTLNGTVDSQGIFCPDMDYNWKLKADVAPGRYFIYFKIQEIINFQPIENPKPIIDKNNNEKIIESLIRVDTETGEIIIDPKKNREDQRHHAIDAIVIASATTSYYQKLSTYFGNLKNKQRNLAPKPKFEQPNPHFQNAVKEAISKILVSYRTNYRVLVPVYKRIRKNHDTYVSKGYSVKGQLHKDTFYGGYILDQGEGKIVSAAKYLPGIKPQQYHVRCNITEIKDHKHVAKIVDTTIKKLIENRLQNVFNIDISKPYNIPNGFFFDKDKNPAIRLPNRKGGDPVPVYTVRIFEYKGNAVKLKPNINCYVDPRNNHHCIIYKDVEGNLKFEMVKFWDAVNRLRHKQPLYQLPPDGSQIIATVQENDMFIFNYLYASDISEDMKIPYEELSKYLYRVQKISSTEGGIFLTFRHHLASTIKNPEEELRIQSLRSWERHQPIKVKINMDGTVNKIIK

SEQ ID NO: 10104 - protein, 1463 aa, unidentified
  REGION 1..1463: note = Description of Unknown: Cas Enzyme sequence
MSETLGIDLGTNSIGIAKRNIEKGNKIIDQLEFFSSIIFQKGVGSGKTGEFSYAAERTKHRSIRRLYQARKYRIWATLDVLMNFGYCPITEEQLNRWRKYDKGKGLKREYPVDAVEFEQWVRLDFDGDGVADYLSPYHLRAELAIIQIDFSEPINKYKLGRALYHIAQRRGFKSSKGETIKEQEKEAEENELSSDVEIQIDLKKSEEKKSKDLLEYKNINQLPTVGCCFNKLLKEGIRVRASNFQAVRSQFEEEIKYIFDFQDGLEFNSDFYKSVHKAIFYKRPLRSQKGLVGHCTLEPSKSRCPISHPEFEEFRAWSFINNIQYRKTSIDEWIVLSVDLKEKLLEDKFLRTKANFKFEEIREWIERKVGYYLSIENRTINYKDKANVTGCPISARLKNLLGENWKSFEKQTSKIRTNYKTGEVHEITYTLEDIWHICFSFEDQERVEEFAKESLGFDTTKSNEMVRLWSAIPQGYSMLSLKAIRNINRFLKRGLIYTDAVLLAKLPDIFGENNWMQHEEYILDNIAKIVEQNRKEKRTLNIVNNLIANYKSLELDEQFAYKNTDYRLDKSDYSNIEKTTIDSIGEKSWDRWDVQKKKNLLTEVELKYQQFFSSSKRDFYKLPKLGDSLKLFLTNDSKFSFLHCENGFIDPETKLPCNCKACRKLKLLYHPSQIEFYKPARVQEIEWGGATLSLKLLDSPKIGAFKNPMAMRTLHILRKAINHLLKEGTITEETRIVIETARDLNDANMRWAIEAYQREREKENKIFEEAIRELYEGTGRVITDDEIDKARILVEQSEILEFGWLENVEIMDKQKKKNKENGVTYSKDVTKYRLWLEQGCRCIYTGKMIKISDLFSDNKIDFEHTIPRSISFDNSLANLTVCDAHFNRNVKRNQIPSQLANYEEILARLQPWEDKVERLIDNVNFWKAKAKQAQTKDTKDKAIRQRHLWQMELDYWQNKLGRFKMEEVTSGFRNSQLVDTRIITKFATHYLKSVFNSVEVQKGRITSDFRKMLGVQSIDEKKNRDKHSHHAVDAAILTLIPSAAKRDKMLKLYYEIQEKEHFEDVEHLRYELEKEKRSCNLGNVSNVSEFIEDHILINHISKDQALTPAHKKERKRGKEILYPDKTGELKNRWITGDCIRGQLHKDTWFGAIKYPLTENGILQKDKEGKFVYPKDKNDDDIIIMVKRESITSLKSEKDLEKIIDPHVRFSIEVAIKKRMTENKSFLQAISEPIWMLNKSNCEVKIDKSGKQINPIRHVRCKVAAGRGFFTKDKALEVKNQAYVSTKARIHVDDKGYKRLYYAQNDGNYLCLLYEGINKGKLERKFKLLNYFDIVQGGIKSDKQLWDEPYYRDIEEKKKVFSLSAILKVGTRDLMWEETPDELLDCDLSRRLFSVYKFNFKGQDCIYLQNHLEARKDSNIVEDYTTFNSKIYQPRLTMVANSFNCLVEHRDFEVQLDGKVKFTT

SEQ ID NO: 10105 - protein, 1041 aa, unidentified
  REGION 1..1041: note = Description of Unknown: Cas Enzyme sequence
METPTRRPFVLGLDLGARSVGWAVVDLQEGEPTGLRAAGSRCFEAGVSGSIDEGRDEARGQQRRQARQVRRQLARRQLRRTQLLRTLVANGLLPPLEGFDSLAIHRYLAAFDQGLRSRHLSADDRVGHQVLFYRLRTRALDEVLELHDFGRVLYQFGQRRGFLSGRKRRMKEGEEEGLVRKSIAALAEEMQAAGARTLGEYLAGLDPFTQRLRARWTARSMYEQEFAALWASQARFHDALTDGLRKKLAEVFFFQRPLKSQKGRVGECDLVPGRKRAPLACREAQRFRILQAVNNLRVARPGESEVELSPDERKRLLEALTAKGDLTFARVRKVLGLPKETEINLERGGEKRLVGHRTDAKMAAAFGARWEALGEPERDRIVDEVLSMEDPEALGRKAEKVWGLDPAAAAVLRETTFEPGYAAFSRKALRQLLPAMEAGEAVETARRRLFPEAVAARPAIGSLPRVEEALPALRNPAVARALTELRKVVNAIVRKWGVPEVVRIELARDLRNSRERRYRMARENRERETSREKAREEIRRSTGIAAPSRSDIEKYLLAEECGWECPYTGRRIGMTELFGEHPAFDIEHIWPLSRSLDNSFLNKTLCFHEENRERKRNRTPMEAYGNDTARFEQILARVGQFRGSARFVKLARFAADEIPSDFTERQLQDTRYATRMAMRYLGTLYGGTVDADGRRRVQAGAGGLTAIVRNELGLNSILGDGGLKSRDDHRHHAVDALAIALLDPGLVQRLQRAAERAPSHRRRHFAPLDPPWEGFLPEVQRVVDEVVVSHRTGRKISGALHKETNYSREIRTLDENGGIRWVRRLRRPVHLLTARQVEKIADHAVREAVRRKLEEVGGKADRLEEDPPVLEQPDGRRIPIRRVRVEESVNPRRVGSEGRERHVETDANHHMAIFARLDADGAEVAWEAEVVSQLEAQRRLRSGEPVIRWETEPGRSFKFSLSPGDTIELELNGVRRLLHVRSVWMEGETGRIACVNLADARQIADLRKASSWFRPMLSGLRSGGCRKVEVSPLGEVFPAGG

SEQ ID NO: 10106 - protein, 1025 aa, unidentified
  REGION 1..1025: note = Description of Unknown: Cas Enzyme sequence
MQKTIWGFDIGTTSIGFAVLKHDEQRNEGEIVWMGSRIFPEGVTEKEREPRNKKRRDARMMRRQNRRKKLRRRLIEELLQEKEMLPAFDSREWRSITGADPWSLRVRALTEKLDPMELGRAIYHLLKRRGFKSSRLETNEEKKKESGEIAKEIGALAEKMEGRTLSQTLAEEPKKRNRHTGRDMVEDEFNRLWDAQKKHHPSLLTDDFKNALYQIGFTQRPVFWRTATLGTCRLEPDSPVCLKASWEGQQYTALQKLNSLRLTTGNNRPLRDEEREIVYNLLMDQQSVTFGGIRKALKKIWQEQDENIQQKFNFEVGGDKSLPGNVMEARLRKIFGKDWPEHALKDKIRDELAHRLRVVDYGEIGKKKIVIRNNPAQIEDERQKFVRYAKEHWQATDEQAEALSNIELPPGWLSHSAKAVRKMLPYLEEGRLYSSKDPENMGAMQLAYPDFRDDEQEALARLPSHPRKMPDLRNPTVNRALNELRKVANNLIGAFGKPDLIRIELARDLKLSGKKLAEVNKKLREREAERKKAKEDFADHKIENPSGSDIEKWLLWKECKEYCPYTGNKIGWDELFGSNVKYQIEHIFPLGRSLDNTFANKTLCHVDVNREKGNKTPFEYFGPEKIKEVAQRIYGVLPDNKVRRFIKDDFLEIGDAEYDERQLRDTAYIATEARKFLQRLFGNAPEDMTKVETCNGRVTFMLRRFWGLNTILGDTGEKNRADHRHHAVDAVAIAMTTRAFVKRLSDAFSPERRPDEKQFPAPWPNFRHDVEDRTGQIVVSHKVMKKVSGPLHEETSLGDTGFSHPDNPKLRRYVKRKAVKDLTPGDIKAIRDEGIKRLIVAHVCDQKLDPEKAGDLKKAFAKQVTMVSKNGEVVPVNRVRIFVDQQPHLMVQRNARTKAYADPGDNHHMAIYRGGNGKIDFEVVPLFEAARRLANKEPVIRKTSSTGAKLVMSLASGDMLCFNAENSEKAYRYVSSVWAAGRVVLHNQTRTRDDVWKRPTINSLLGENVLKVSVDPIGRVRPTND

SEQ ID NO: 10107 - protein, 1501 aa, unidentified
  REGION 1..1501: note = Description of Unknown: Cas Enzyme sequence
MKKILGLDLGTNSIGWALVDIEEKKILGVGSRIIPMDAGSLSDFNKGNTKSQTSERTRYRGIRRLIERFLLRRERLHKILNVMNFLPDHYRNQIDFQKNIGKYLPNCEPKLAWGNDILNRPTFVFQSSYDEMYEEFSRFHPDLLKSNKKIPYDWTIYYLRKKALSSKIKKEELSWILLNFNQKRGYHQMRGEDEITNQNKKSEFYSLKVVSVEETTEKKGNDTWYNIHLENGWIYRRTSKYPLNWEGKIKDFIVTTEINDDGTEKLDKEGNIKRSFRSPNEDDWTLIKKKTEYDIENSNKTVGWYIYDSLLQNPNQKVRGKLVRTIERKYYKTELELILNKQKQFHPELSDKNLYNECLKILYPNNANHQKTLSNRDFKFLVINDLILYQRPLKSKKSLISNCPLEKREYTNIETGEIIKVPVKCIAKSHPLFQEFRLWQFISNLKIYQKEKTLNEKTCLDVDITSDFLKTEEDYVEIYEWLNDLKEIDQKTFLKFPKFQLKKEYEKFRWNYIEDKSYPCNETRAAILNKLKNVNNVTPDFLTNEVEIALWHILYSVEDKTEIAKALNTFAEKYNLDESFVENFKKFPPFKKEYGSYSSKAIKKLLPLMRVGKYWDEESIDSDTRKRIQKIIDGEYEEKIKGRIREKTILLTQSNDFKFLPAWLAVYIVYNRNSDVKDVQKWDNPNDIDGYLKTFKQHSLRNPIVEQVIVETLRVVRDIWKKNGDFSEIHIELAREMKNPADIRKKLTETISKNENTNIRIKTLLMEFINPEYGIENVRPLSPSQQEIFKIYEDGILTSNISIPDDIQNILKKFSELDVKKQPSKSDILRYKLWLEQKYHSPYTNQIIPLSKLFTPAYQIEHIIPQARYFDDSFNNKVICETEINALKDKFLAYEFIKKFQNNEVELSFGKTVEILSVEAYDSLVRENYKNNRTKLRNLLMEDIPDKFIERQLNDTRYISKVVKTLLSNIVRESDETDPFSKNIITCTGQITDILKKDWGLNDIWNNIVSPRFIRLNELTNSNQFGNFENRGGNVVFQTNIPIELQKGFSKKRIDHRHHAMDAIVIACATRSHVNYLNNESAKSNAKETRYDLRKKLRKIETVSKETIKDGEKIIEKISVAKEFIKPWETFAQDVQKELENTIVSFKQNLRIINKTSNYTQYIDEKGKKKLKKQIVGDSWAIRKPMHKETFYGLINLRRIRTSNLFNSLESYEMLVDKKLKYKIRELKQEGLSNDNIIKYFKRNSDEWSIYNFSKIEFYYFTNETKEKLVASRKPLDKSFNSDFISNKIADTGIQKILLKHLEKSDNPEIAFSDEGIEELNKNIKELNNGKDHKPINKVRVHEPLGNKFNVGTTGSKKEKFVEAEKGTNLFFAIYLNDDGVRVYETIPLNIVIERQKQGLYPVPEFDSKGNKLLFYLSPNDLVYLPTPDEIIGGISIEKIDRSRIYKMVSCTGYICDFIPANCSVPILPNIEFGSNNKAQRAWSNETIKEVCFPLKIDRLG

SEQ ID NO: 10108 - protein, 1067 aa, unidentified
  REGION 1..1067: note = Description of Unknown: Cas Enzyme sequence
MGVAMTSNENYSVLGLDLGSNSVGWALLHYTDGQPSGVVDSGVRVFDAGTEGDVDSGRDTARGVERRDARQRRRQCERRGRRLENLACLLSRSGLLPKGAMRKPAERNRLLQALDREIYRKCGNNGPNGAKTAAALDQLPYFLRCRALDEPLEPHELGRALYHLAQRRGYLSNRRTKKKKKDEGKVEPAINELRENMTAAGVRTLGEFLSRVDPVNERRIRQRWTARDMYLEEFEKVWEAQRAHHPELLTDALKREVSEAIFHQRPLKSQKGLIGACDLVPGKKRAPKALLISQRFRMLQKVNDLEVIAADESRRHLTPDERARLIARMDKASTVKFDVIRKLLGDASQDIEFNFERGGEKDLPGNKTAAALRKVFKKRWDTLSRKEQDAITGEVMGIERAETLERRGREAWGLDPKSAAAFGKVHLETGYMSLSREAMMALLPLMEQGIQYATAREEAFEGGWAKNVLEELPGVREACNTIRNPVVMRTLTETRRVVNAVIRKHGKPDYVRIELAREMKKSREDRRKMTSDNQKRREANDALRQRIADATGDPRVTGRDIVKARLREECGGTCPYTQKMIPLHELFGADSPWDVEHIIPFSRCLDDSYFNLTLCYHEENRNVKLNRTPREAYEHTGRWDEIIARVSQFQGDAAKEKLRRFLMKKEDLREFEEFSARQLNDTKYASREAARYLSWLYGSEAQSRIQVSRGQITGYLRGAWRLNAILGDGGGKERSDHRHHAIDAIAIALTDRATVKALSDAAAAQFRERGRTHGFEKRITEPWQGFLEDVQRAVDAIVVSHRPSRKVSGSFHDDTIYSPPRTDEDGKPYVKVRKPLTDMFKESDIHNIADSAVRDIVWQHFRDHGEDSKAAFSDSSRHPRITIKDGPRAGQTIPIHKVRLKLTRDVIPVGSGPNERHVWTRGNSHIEIFEVLDEHGAVKKWEGRVVTLLDAYQRRKRKQPIVNRNWSDDKRFLFSLSQRDIVEFDVDAENRETCRELYLVRGISFSSGGRIEFMHICDARKKGVVPRSASDDEKVRIRMEPVVDTLRKINCRKVSVTPLGDVYPAND

SEQ ID NO: 10109 - protein, 1068 aa, unidentified
  REGION 1..1068: note = Description of Unknown: Cas Enzyme sequence
MIGGLVMKHVIGLDIGIASVGWSIINLERNRIEDLGVRVFPAPEHPKDGSSLAKKRREAGGARKRIQRKRARLLGIRQLFQEHGVLSLQEMDILFQKPLDKNPYEIRVDGLSRRLSSTEWFQALYHIAKHRGFQSTKKTPPNSKEKEKEEGALLEGIKSNASLLQEAKYRTVGEMILMDSKFQDHKRNKHGDYSHTIPQSLLREEIETMFFEQQRLGNPYTTDEFKRKFLDIFASRLHFTAPGQIESRIGPCTFEAGEKRAPCMSWSGERFILFGKINNLRIRDYFRGERSLSIGEARDLANLAYQKPEVKYKDIRKLFDLDDTAYFSGIRYSGKDTEREKSEGAVFVRLKGTHELRRAITSKLGKEAWETYASTPEILDEIAQTLTWLKNEEDIRKSLSDKNIPPYLIETVLDLDFKGTINLSFKALHKILPHMETGLRYDEAWPKAGYQGPVSEIESVRSVLLPPDDFDDITNPVVKRSLHQTRKVVNALVRKYGSPWSIHIELAREMGKSFDDRKKIKTMQDENNAEKERTKKEFIENYSREPSGTDLLKFRLWKEQGGFDPYHQVHIDSVRLFHQDDATYAEIDHIIPYSRSFDNSYTNKVLVLSEANRNKGNRTPREYIYSESRPEKWDAFVAWVEAQIRNGKKKSNLLRESFTLEDSNRMTERNLTDTRFITSYLANYLERCLVFSDPSPTSRKVLRVNGAVTATLRGKWGLHKDREAGHLHHALDATVVAVTSHGLIQRITEYDQIRNSPGAKRNNGSARERTPQPWEGFSRELLARISPNPTEEIGKVSLPSYGAEESASLRPVFVSHMPVRKARGAAHKESVRSVKLGENGGTSIRTPLAKLDFKSLEKMVGKERDRRLYESLKERLVAYEGDGGKAFGGSAPSFYKPTKDGSRGPLVRSIKVFSPGTAGVRVRGGIAENDNLVRVDVYKYKNKFSLVPYYVPDIAKGIVKKRGVLAHKEEKDWEVIGDEHKFCFSLFPNDLIEIIQKGTEKTLGYYRGMDRDNGRIALNLHDGSNKKEIRVSTRTCDSIRKFQVGLLGDYHEVKKEKPPQGKIDDGLA

SEQ ID NO: 10110 - protein, 1313 aa, unidentified
  REGION 1..1313: note = Description of Unknown: Cas Enzyme sequence
MKKILGLDLGTNSIGWALIEIDIDGIPIRIIAMGSRIIPLTSEDRDQFTKGQAISKNQERTTARSQRKGYDRKQLRKDYDFKYSLIKVMKNYGLIPNEELFNLPMLDLWKLRSMAASEPISPEQLGRILYMMNQKRGYKSARSEANQDKKDTDYIADIKGRYAQLKEKEQTIGQHFYSELKCANQNNTYYRIKEKVYPREAYIDEFDTIINVQKDAHSFLTDEVINNLRNEIIYYQRKLKSQKGLVNICEFEGFNVVYPDPKTQQEKSKFVGPKVAPKTSPLFQLCKIWEVVNNISLKIKNPEGAKYKWSDKIPTLEEKQQIANYLFHHSNLSSSELLNILNLKKENVYLNKQILKGIQGNNTFSEIHALIGDSEHLSFNFSIVPSRHEALLVDKKTGEIIEEKDALQIDPSIEKEPLYQLWHTIYSIKDLEECKKALIKCFAFDETTADKLSRIDFNKQSFGNKSNKAMRKILPYLMQGYNYSDACSFAGYNHSNSLTKDEQAKLETENILKLLPKNSLRQPIVEKIINQMINVVNALIIEFSEKDEKGEIRKYWKPDEIRIELARELKQSKEERNDSTVNNTANEVINKEIENRLKELGVKTTKRFIEKYKLIFPIRTVIDGKTGKALPKKLKDAIVTNRCIYCGKTFSLAEALTGDNFDVDHIIPKDLLPIDNSLTNKVLVHRNCNATKTNYTAYDYIAKQGETVLRQYVERVDEWYKQGIISYGKMLRLKVSYEEYIERKKNHKETEADKRLWEDFLSRDLKATQYIARKSTEILKQVCNNVTMTEGSVTATLRRLWGWDDVLMNLQLPKYKELEEKIGQKFTQIKEWESDHGKRKHQKEEIIGWTKRDDHRHHAIDALVIACTKQGFIQRINTLNASETKDAMQKEMDVAKSKLGKAYDENILKATNEIVKNHSGRLSRLDEYLINQKPFNTADVMKEADKILVSFKAGKKVVTISKYKAKGKNEQTGVITPRGALHEQSVYGKIKVIEKRKSIKYIFENPDKIVNKKIQCLVMERLANFKNEVKMAIESLKKNPIYLDEQNKKTLETAACFKDEIVIKYPVTSIKAKDVPFIVDKKIRKIVQSRLDEFNGKETEAFKDILWLNKEKQIPIRTVRCFTGLSAVQPIKKDKNGRGIGYALTKNNHHIAIYEDIEGKLIEHSCTFWNAVERKKYKIPYVIKDTPEMWNSIIDKDLPESFLNKLPPDNLKLRFSMQQNEMFILGMTNEDFAIAISEKNKSVLSNHFYLVWSIAEGDYWFRHHLETKNSELKKISGAKEGKRYYRLSSKGLLELNPIKVRLNHLGEITKIGE

SEQ ID NO: 10111 - protein, 1516 aa, unidentified
  REGION 1..1516: note = Description of Unknown: Cas Enzyme sequence
MKKILGLDLGTNSIGWALVNTDENGKPCNIAGMGSRIIPMDAATLSDFDKGNSKSQTAERTGFRGIRRIRERYLLRRERLHRVLYKIGFLPDHYAHSIDFEKRFGQFLSETEPKIAWFKNNNNQYEFLFQNSFNEMLADFKIHQPQLLENDKKVPYDWTIYFLRKKALNYRIEKEELAWIILNFNQKRGYYQLRGEDENENPNKLVEFYALKVVSVEATDEKKGKDIWYNVHLENGWIYRRTSNVPLDWVSKIKEFIVTTDINEDGTLKLDKDGQVKRSFRAPKEDDWTLIKKKTESDIDLSRKTVGWYIYDTLLQKPDQKIKGKLVRTVERKFYKAELKAILEKQKEFHPELQNKDLYTECLKELYTNNESHRNTISNRDFTYLFMDDIIFYQRPLKSKKSLISDCPYEERKYLDKETGEIKTVPVKCIAKSHPLFQEYRLWQFISNIRIYQKERWINEKLYTDVDVTSEFLKNEDDYTDLFDWLNNRKEVDQKAFLKYPGFGLKKEADNYRWNYVDDKPYPCSETRSMILNRLEKVENVPTNFLTKENEEALWHILYSVEDRHEIEKALKSFATKYNLNDGFVDIFKKVPPFKKDYGSYSAKAIKKLLSLMRMGKYWNEDFIDVNTKHRIDKILTGEYDEKIKNQVREKAINLNDISNFKALPVWLVCYIVYDRHSEAKEIAKWEKPDDIDAFLKSFKQHSLRNPIVEQVITETLRTVRDIWKKHGDFSEIHVELGREMKNPADKRKRMTEQINENENANLRIKSLLMEFINPEFEIENVRPYSPSQQEILRIYEDDVLKSGIVIPEDVEDILKKFKETDTKKQPSRSEILRYKLWLEQKYRSPYTNEIIPLSKLFTTDYQIEHIIPQSRYFDDSSSNKVICESEVNQLKDNCLGYEFIKSHHGQKVELNFGKTVEILSVEAYEKLVKDNYSRNRGKMKKLLMEEIPDGFIERQLNDSRYISKVVKSLLSNIVREDGEEEATSKNLISCTGGITDQLKKDWGLNDVWNTIIYPRFERLNELTKSNQFGQWENKNGNRVFQTQMPLELQKGFNKKRIDHRHHAMDALVIACATRSHVNYLNNEAAKANAKESRYDLRRKLRRIETVQIEKLIDGKKVLKGIEVAKEFYKPWGTFTQDVQATLENIIVSFKQNLRVINKTTNSYQHFDENGKKIIDKQNNGESWAIRKPMHKETVFGNVNLKKIKTVNLSSAIDHPELIVDRRLKSKIKELLSEGLDNKKIQKFFKDKAEEWTNINFSKIELFYFTNDTSEKLVATRKSLDDSFTSKKIVESITDTGIQKILLKHLENNSNKPELAFSPDGIDEMNRNIKELNDGNKHQPIYKVRVYEPLGNKFNVGTTGNKSSKFVEAAKGTNLFFAIYINKEGKRSFETIPLNIVIERQKQGLISVPESNEKGEKLLFWLSPNDLVYLPTPDEIDSNSLLGEIKKDRIYKMVSCSGIEGHFIPDFVANAVVQTVELGSNNKAQRAWTNEMIKEICVPLKVDRIGNIIEINGRKL

SEQ ID NO: 10112 - protein, 1060 aa, unidentified
  REGION 1..1060: note = Description of Unknown: Cas Enzyme sequence
RFCDKIVSMKRDFDYTLGLDLGIASVGWSVVELAYDEKDKVYSPKRLVDCGVRLFDKAEVPKTGESLNKTRREARSARRILRRRKARIRALRRIIEDAGFIPAREDLSTLPSDKDIWEIRGKDVFNRVLTDREITRLIIHIAKRRGYKSNRKKLDNDDTDSEKKKVLSAIKKNQQLLKSKGLRTYGELVYHLYGGSAKRDTLKHNTTDQYILSFDREGILEELQFILNHQKNLGNNKVTDQFINDVLEVVSSQRPFATGDQIKKMVGKCEFEPNELRAPKASISFLEFQFWQNAFNNLKLINIEEGRYAKKTDLTLDQKEKLFKEVFNSKKDKITFAFVREVLNIPNNYIFYNLRYEPLYRAGNKSLEKEKIFLNLTDFQNIRKAVNKIDESLWEKIRGDRFVYNTLVEALTLYKTDADIGNYLKEKGLDEYIEIAKSLPTFSKFGHLSIKALENILPYLKENDYTKACELAGYGDKLKEQKSEILPLIEYDEIRNPVVFRGITQGRKVVNAIVRKYGSPTFINIELAREFAKNSQERRKMERMMENRRRDNEKAVEEIKSLGISDPSGFDILKYKLWKEQDCKCAYSGETIPIERLFENSYCEVDHIIPYSQSMDDSYNNKVLVLTKENQEKRNETPFQYLNRIDSSGKRWEEYKARVENNAHYYQHKKDILLIENAEKYTIEDFIERNLNDTKYISRFFKNYLEDNLKMRELKYGKRQVFTFHGRFTSELRRIYDISKDRQGSDRHHAIDAIILAVANQSMLQDIVRYRELEEEHKKDWEIFKEEQKLKHPEPWKNFRQDIYNRVFEDTFEGISNISNFESLYGDIKDEIRPMFVSRMPRRKVEGPAHEETLYSPKHLDEGFVLIKKSLSDLKPEDVDNIYGDDVVKNLIKDCFEKNPEKPFEEPLYKPSPKNNNPNQIKSVKIKKITGGGGVLLNGGRAFAPHASMVRIDIFSKNKKYYIVPIYVADTVKKELPNRAILAHKPENEWILIDDTFKFEFSLYPYDLVSVSFKNEELKYVYYIKTCRADGTVTFALHDGSQRIGKGIKTALNLTKYQVD

SEQ ID NO: 10113 - protein, 1120 aa, unidentified
  REGION 1..1120: note = Description of Unknown: Cas Enzyme sequence
MTGPDGPLPKLSKTFPRHIDEQLFCGLDIGVGSCGQALVSPAGLKVRGFEDLPDRIAFLGVRTFDVPETKEQSGVKLKNPERRQKRLMRRVIARRAHRMRQVRSLLVARGVLPADYHCRADIWRARHEQATPWQWRLEALERALTPWEWAVILMHYAKRRGFKSARKSDRETKGAAGGTLQSVRANHEALQAYRTLAEMFGRDQRFNSTVQGAGDIARTVETRRNRDGNYVAMVLRADLLEEIRAVFLSQRQRGNPQAAQDFEAAYLAIVTSQKPMQDPVKLLGDCPFLPGIKRTTSYAPSFELSRALQRLNAVTLVHPDGARGLLSEHILANGGYEPFVAAFGKARSIPWAAIRTMWGIPDDIQFKDVLEGNRKSSRTGAVESIAAAEKRDFCKRSSAKGAAEGTYLLRKAVGDTTWNKLLAGDLAPADEVAFSLAFYEVLEDEESEFTILGSMAARKIPAEFVEPVRNDLLGERPTLHKFKGTCGVSAELCRRILPHLMRGLTYDKAMMAAGFKHTETVVPFDQITNPIVKSVIREVLKQVVHLFDEAGALPGRIHIEVARDLGKSIDERNEMERGIVKRTREKDKHRKEVAELKGCEPGAVAEEDLLRYELYLEQGGICPYSGESLPNAARIYGPDLQVDHILPRSRSHDNSFDNKVLVHTRANQHKQNKTPHEWLAGEPEAWQGFRTRILALPGLRFRKRRNLLDETFGTEGQEQKFAERNLNDTRYICRLVMGYIEALYGLQGHAPTREGGARRVFARPGPMTALVRRAWGLENLKKDNDGKRIGDKHHAVDALVCACLAENEAQWITRLSQAYSAMERAHVGTLAVRGLPPPWADFRSAVVAALRKITVSRRERCGAGGALHDETIYRARPGPAGETMAFKREALVGRGRTGKPEPAFTSASDLEQIAGINEERSRWLKEALLAWISQGSPLDPGRLPRDPQGCLIRKVFVKQKQIKLRRQPQGHVTSGTQVRLDVFSNKGQYHLVPVYAHQLTGRMPPMRAIVANKPETAWTLIDESFHFEFSLWKNSRFEIGFKKGTVIQGCYSSVNRNTGRITYFPPDNQKGETGEDGSIQDYGFSTKVGVASFRKIAVDRLGRAFQVKGEKRTWRGAVCT

SEQ ID NO: 10114 - protein, 1051 aa, unidentified
  REGION 1..1051: note = Description of Unknown: Cas Enzyme sequence
TKEQSGVKLKNPERRQKRLMRRVIARRAHRMRQVRRLLMARGVLPADYHCQADEWRVRHEQATPWQWRLEALERALTKWEWAVILMHYAKRRGFKSARKSDKEAKGADGGTLQSVRANHEALKAYRTLAEMFGRDQRFNTTVQGTGGTARKVEMRRNRAGNYVAMVLRADLLEEIRAVFLSQRERGNPHAGQDFEAAYLEILTSQKPMQDPVKLLGDCPFLPGCKRTTSYAPSFELSRALQRLNAVTLVHPDGARELLSEHILANGGYGPFVAAFGKARSIPWAAIRTMWGIPADVQFKDVLEGSRKSSRTGAVESIAAAEKRDFCNRSSARGAAEGSYLLRKAVGDNTWNKLLAGDLATADDVAFSLAFHEVVEDEDSEFTILGSMAAKKIPAEFVEPVRNDLLGERPTLHRFKGACGVSAELCRRILPHLMRGLTYDKAMMAAGFNHTQTVVPFDQITNPIVKSVIREVLKQVVHLFDEAGALPGRIHIEVARDLGKSIDERNEMERGISKRTRAKDKNRDEVAKLRGCERAAVTEEDLLRYELYLEQGGICPYSGESLPNVERIYGPDLQVDHILPRSRSHDNSFDNKVLVYASANQHKQNKTPHEWLAGEPEAWQGFRTRIQAMPGLRFRKRRNLLDETFGTEDQEQKFAERNLNDTRYICRLVMGYLEALYGLQGHAPTRDGGARRVFARPGPMTALVRRAWGLENLKKDNDGKRIGDKHHAVDALVCACLAEGEAQWITRLGQAYSAMERAHVGALAVRGLPPPWADFRRDVVAALRKITVSRRERCGGGGALHYETIYRARQGEDGGTLAFKREALVGLENGKPKPAFTRDSDLEQIAGINEERSRWLKEALLAWISEGSPLDAGRLPRDPQGCLIRKVFVKQKNIQLRRQRQGHVTSGTIVRVDVFSRKGKYHLVPVYAHQLAGRTPPMHAIVAHKPESEWTLVDESFRFEFSLWKNSRFEIRFKTGRVIEGDYSGVNRSDGGITYNPPDDASTRKSGDGRPVNYKFATKTGVVSFRKISVDRLGRAFPVKGEKRTWRGAVCI

SEQ ID NO: 10115 - protein, 1395 aa, unidentified
  REGION 1..1395: note = Description of Unknown: Cas Enzyme sequence
MRKILGLDLGTASIGWAFVNEKENEDEKSSIIRLGVRVNPLTVDERTNFEKGKSITTNADRRVKRSMRRNLQRFKQRRNNLIECLLEHHIITEESKLYEEGNCSTFKTYRARARAVDEVISLEDFARVLMQINKKRGYKSSRKVKDAEEGELVDGMEIAKKLYDENLTPGQLLLELFRNGKKTKPVFYRSDLQAEFDKVWEIQSEYYPEILTGEFKNSIRRFNKTQTSGAFYAVHKIYTAKNSGKERYEQALIWRTEALSRKMDIEELAYVLCDLNGAINNSSKRLAMISDRSKELYFGKLTVGQYLIQRLDENPNASLKNIIFYRQDYMDEFEAIWEKQAAFYPELTPQLKKEIRDIIIFYQRDLKSCKNLVGYCELEHEEREVAIDGKKKKILTGSKVCPKSSPLFQDFKIWHVLNNIQVFATGNKQKKLKRDESQMSLFSDADMKPLKRFLDQEEKDILYAELTVRGKMSKKDILKLLFEKSENLDLNYKEVEGNRTMEALFKAYQEIISITGNGDYDFSKMRAADIIELTREIFGGLGYKTDFLTFDPLLKGKALVQQPSYRLWHLLYSYTGDNSKTGNDALLQRIQELCGFETEYAKVLANVSLAVDYGNLSAKAIRNILPYMMKGYEYSEACKKAGYRHSDSSLTKEELNQKTTVSHIDNIRKNSLRNPVVEKILNQMINVVNEVVKTYGKPDEIRIELARELKKSQEEREQLDLAIRKNTADMEKCRKILQDEFHLSYVSRNDIIRYRLYEELKTNGYKTLYSGTYIPREELFSKRFDIEHIIPKARLFDDSFSNKTLEAHAINTEKGDKTAYDYVAGKYSDKEVEDYKTRVKELLDNKIISKTKYKNLLMEESEIPSDFLNRELRDSQYIAKKAREILEQMVPFVVTTTGAITRRLREDWQLVDVMQELNWDKYDALGLTERYVDKNGKPVRKIKDWTKRNDHRHHAMDALTIAFTKRSIVQYLNNLNARSDKSSSIYGIRQKELKRDEKTNKLLFNAPMPLENFRAEARKHLECILVSIKAKNKVVTKNINRSKTKNGYLQKVQLTPRSSLHNETVYGKIRNFEAEIKKVDGKFTEEVIMRVSNMKYRKALLQRLMENNNDPKKAFTGKNSPEKNPIWLSNEHLHFVPVKVKLFKVVDVFTIKKPVNKDLKLDKVIDARIRVILQARLDQFGGNADKAFSNLDENPIWLNKEKGIAIKRVKIRGIATGEAIRKKRDSKGEFIKDTVGNIVANDYVSTSNNHHVAIFMDANGKLMEHLVSFYEASARAIMGWPIIDKDYMHFDGWQFVFSMKQNEYFVFPNEETHFDPMEIDLMDEKNLPDISKNLYRVQKFSQGDYYFRHHLETNVDDNKNLKGVTWKRISSVQNLKGIVKVRVNHLGAIVAVGEY

SEQ ID NO: 10116 - protein, 1470 aa, unidentified
  REGION 1..1470: note = Description of Unknown: Cas Enzyme sequence
MKKILGLDLGTNSIGWALVNEAENENEKSSIIMLGVRVNPLTVDEQKNFEKGKSITTNADRTMKRGKRRNLQRYKLRRENLIEILKENGFITDEPILSENGNYTTFETYRLRAKAVTEEITLEQFARVLLMINKKRGYKSNRKAKGAEEEGVLIDGMEVAKLLYEKDLTPGQYCLQLMEQGKKQLPEFYRSDLQEEFNRIWAKQQEFYSEILTDKLKENLREKSEKATWTICKEPFNIVGIPRTTKGEELKKENFAWRTKALSEKLDLESLAVVLQKINGQINNSSGYLGAISDRSKELYFNKQTVGQYQMAVLAQNPNASLKNMVFYRQDYLDEFNIIWEKQAEFHKKELTEELKKEIRDVIIFYQRRLKSQKGLIGFCEFESRQIEVEIDGKKKIKTVGSRVIPRSSPLFQEFKIWQTLNNLEVSGKGRKSKKKKEHSLSLFTNQEDPLLIYGKRELYQEEKELLATELSIKEKLTKSDILKLLFDNPQELDLNFKEVQGNLTQAKLFAAYRDIIEQTGHILDLKKSASEILENVEQIFSGLGYNTDIIRFNSDTDNLDNDPMYKLWHLLYSFEGDNSKTGNENLINKITNLYGFEKEYAAILANITFQDDYGSLSAKAIRKIFPYLKEGNKYDISCEYAGYRHSASSLTKEELENKIYKDRLEILPKNSLRNPVVEKILNQMVHVVNAIIADPQLGKPDEIRIELARELKKNAKERQELTKSIEESTRMHKQYREILSKPPFNLTYISRNDIIRYKLYEELKDNGYHTLYSNTYISPTTLFSGDFDVEHIIPQSRLFDDSFSNKTLELRSINIEKGNATACDFVKEKYGETNNENSMENYLNRIEKLYKTGVLSRAKYNKLKMQEKDIPSGFIERDIRNTQYIAKYAKTMLSDLVKVVVSTTGAITDRLREDWQLIDVMKELNWEKYKNLGLTTEFTNEEGYRIRQINDWTKRNDHRHHAMDALTVAFTKRQFIQYLNNLNARRTDENQSISNTEEEEYDNFAITTEDVLLNTRDVLGIEKNYLYRDHRNKLRFYPPIPLNDFRAEAKHHLENTLISIKAKNKVTTQNINFTKRKGGVNKKTQQTPRGQLHLETVYGSQKQYVVKEESVNAKFDAEKIATVSKPAYREALLRRLQEFDNDPKKAFTGKNSLTKNPIWLNKLQTAQVPEKVKTISFETAYTIRKEISPDLKLDKVIDLGIRRILENRLKEFRNDAKKAFSNLDENPIRPNKEKGIAIKRVTISGISNAEALHDKRDKEGNLILDKNGKPQPVDFVNTGNNHHVAVYRKPVLDKNWNHAEDENGNKKYELEENVVSFYEAVSRKNLGLPVIDKTYKASEGWQFLFSMKQNEYFVFPRTEKVEKIDEETGEITEEEIVVFDPNDIDLLNPDNYKLISPNLFRVQKFSKLIYGNSVVREYVFRHHLETSIKNTSSVLKGITWIDFRSSKGLDKIVKVRVNHIGKIVSVGEY

SEQ ID NO: 10117 - protein, 1078 aa, unidentified
  REGION 1..1078: note = Description of Unknown: Cas Enzyme sequence
MAKKVLGLDIGVTSVGWAIIDVDENEIIDKGVRIFPERSAQENVKRREKRGSRRLKRRRQQRLIDMKELLKKHGVIDEKFVPLKNPYEIRCKGLTEKLANDELATAILHITKRRGSSFDSIDDIEEDDEKTSSDVVDQIEVDKAPELKSTKKILDYNEKMLINKNTNYICLIQKKRLEESGSVRGSLNNFKTSEYIKEIEKILSNQGLSQDFNEKVINLIKRKRAYFEGPGSEKSPTPYGRWYYEQGEIKYVDLIEKMRGTCSLFPLEKRAPKDSYTACLFNILNDLNNLKINQEKITQEQKEQVIELMKKEKGDFTVKKLCKFLNVEETFISGFREDKNKKNLISQFTGYKKIRNVVNNEGFNKIIFENEDYVDKIVEILTVKRGIDERKNELKKINPEVFSEAVADALAQITGCKEYHSLSFKAMKKMIPDLLATTDNQMQLITKYGIQKQNIGVFKGKNEIVLDQKAIISPVALRAQNEAIKIINAIRSIHGELDTIVIEMARDKNSAEEKKRINEQQKRGEELNKQALELAEGKPLTGSLALKLRLYKEQDHRCIYTGKEIDKDLLMTDPFAYEIDHIIPISISLDDSFNNKVLTTSKINSDKTNMTPFKFFSSGKIQGVSFGEFTSRVINLEKRGLISKNKLRNLLFAEDIDKQSVRAEFINRNLVDTRYATRVILNTLTNYFRANEIDTKVHAINGRITDNIRNRAGLKKCRDFFYHHIVDAIIVAAVKKHKYFSKLLNLYESSDGIIYDNETGEIITSENQKDFFDEKLFSFLSKIRRINDLTNYDETIKISHKIDKKFNRQFTDETIYSTRLIDGVDYLVARFKDIYGEDGIKLAKMIKKDEENKILMKRNDPETFELIKQIVLKTDYTEKENPFALYKEQHGEIRKKAKNGKGPVIKSVKYLKEKLGNHHPITHKYQSVRPGNKVVLLQVSPYRTDFYVSPSGLYRFVTIRYANVKMSNKEGTIDLVEYEQMKQLKKIDDTYQFCFSLHRNETIKITKKGENPHTYRFVGTNSDKLNRIEVKELYCNVLKEERRIILTIGKEICLLEKFSCDILGNMKKIESEVLKLKI

SEQ ID NO: 10118 - protein, 1329 aa, unidentified
  REGION 1..1329: note = Description of Unknown: Cas Enzyme sequence
MNNQKNQTNYCIGLDIGTNSVGWAITDPSANLLKIRGKSAMGVRLFDEGQTAESRRGFRSFRRRAERRKERIRLLQELFSPLVLPVDDAFFIRLKESFLHLGDFGREHRANLFVRADFSEKEYYAKYPTIYHLRSALINEKRKFDIRLIYLAVHHMIKYRGNFLHDGEINFDGSELANSINEFINEYQTVTESTVFSELDVSKLQNIITDTKTYKSKKKEDIISLFAEEYKKDKSVLAFINSILGYTFSMNHLFAVEDILDDEEKEIKLKLEDSDFDTKQEFYLDKAGDYASLLIILKKIYGQALFYEILGGESTLSEAMIKKYNKHKEDLTNLKNVIYMHFPEYYNDIFRATTGNNYVNYIKDKSGKERNGCGYEEFSKFLISILKNKSDISEVSEVIKALEDKSFLLRLNSPENGAIPFQMNLHELKRIFDVQSSYYPELKSIFEKVQTILCFKRPYYIGPINPSSPYSWASEKPSERIYPWNFDKLIDSDSMAERFILRMTNYCSVFPDEEVLPKQSIIYSMYSVLNELNKIKLNEKPISVDLKKFIFDNLFKTKKSVSKKVLLDFLKKSNFGIFNSVSGLSDEEKFSNSLSSYIDIKNILKEDFNDNLIDLYEKVVRTITLFDDIPMRKRNIKKILPDIEEKKLNQLSKLRYTGWGRFSNKLLNGVLSSEGKTILSTLYDSNMNYNEIIFSESLGFLEIFNKDKRTIDKITYENCIEPLYCSPAVKRGVWQSIRVIEELEKFMGKAPSKIFIEVAKGEEEKKRSKPREKFLFELYSSINSDVALYNKEVHTLLKERITSKDSFESERVLLYFLQYGKCMYSGEPLDLSNLGSYQIDHIVPQSLTKDNSFENKVLVKSIENQYKSDNLAISSAVRNKMKPFWDFLFNQKLMGKKKYNALLKEAYDENDFAGFINRQLVETRQTTKEVINLLQTIYPDTYIHGIRAGLVSELRSSYGFYKSRLLNDYHHAHDAYLNAVVGCFIKSVFTEWGIDYKINSYYLKNAWIEYSSKQKNSVEQRNKFTYIVGKMGGRITDTAGEIIWEDSIIENIRRNINNPFCYVSKKLDIDANTDFYDQTLYQKDSNRKLIPRKSYKGIELPTNKYGGYTSTKPAYMCAISYIKGKKEKQELINVPVKVTYEQKVNTSALQEYLISEYGPSVKVLKDRIKKHQLVKYKGQLLHLSSASEAYNAVQLVINPRFMEFLEALDKNNLFLETNEKDFTKTAEDFLDHFLEKLEKMYPLYSNELGKLTAFRDSGEFKKLEYNDKCRFLKSILLITKASPQNAILSSFSIAGTLGRKTNYPIDLSSAGFVSRSITGIFERTDTIKT

SEQ ID NO: 10119 - protein, 1401 aa, unidentified
  REGION 1..1401: note = Description of Unknown: Cas Enzyme sequence
MRRVLGLDLGTNSIGWALVNEAEHCQEQSSIVRLGVRVNPLTVDEIQNFEKGKSITTNADRTLKRSMRRNLQRYKLRRDSLIEVLREHGLINDDTILSENGNKTTFETLRLRAKAASTEISLEEFARVLLMINKKRGYKSSRKAKSQEDGQLIDGMSVAKRLYEDHLTPGEFSLKLLQSGKRHLPDYYRSDLQREFDKVWTKQREFYPDILNDSLKESLKNKNKTQTWAICREPLRIVGIKRVTKGLNMAIENYVWREKALSQKMGMEQLAIVLQEINGQLKNSSGYLGAISDRSKELFFNRQTVGQYQMAILDHNPNASLRNMVFYRQDYLDEFETIWEVQSAAHPKVLTKDLKEEIRDVIIFYQRRLKSQKGLISFCEFESRKIDVEIDGKKKVKRVGSRVVPRSSPLFQEFKIWQILNNVEIFGKGTKSKKQKSPDLFCETENPLDSGGRRPLYQEEKDLLAMELTIKKELKKTDILRLLFDNANELDMNFASIQGNMTQVALFEAYRKIIEESGHEIDFEKKTAKEIVQSVEEIFNSLGYNTDILHYNSEIPSDEQPMYKLWHLLYSFEDDNSKTGNEKLIDKISELYGFEKKNAAILADVVFQVDYGSLSAKAIRKILPYLKAGHKYDVACEYAGYRHSASSLTRDELENKMNQDRLALLPRNSLRNPVVEKILNQMVNVINSLIETYGKPDEIRIELARELKKSAKEREELTNSIAQTTRVHEEYRQILSKPPFNLTYISRNDIIRYKLYCELKDNGWKTLYSNTYISPDKLFSGDFDIEHIIPQSRLFDDSFSNKTLELRSVNLDKSNRTAFDFVKEQYGETGLDAYTARIEMLFKQGSISKAKFNKLKMREKDIPDGFIDRDIRDTQYIAKYAKTMLADLVKIVVSTTGSITDRLREDWQLVDVMKELNWGKYTMLGLTEEFTNEEGYRIRKINDWTKRNDHRHHAVDALTVAFTKCSIIQYLNNLNARSDKSSSIYGIEHNELYRDGKGKLLFKPPLALDVFRNEVKKHLKNTLISIKAKNKVVTQNINKTNKSGGTYKKAQLTPRGKLHLETVHGSQKRYVTTEEKINGKFDEAKIASVAKSAYREALLSRLHLFGDDPKTAFTGNNALAKNPIWLDEFHTEQVPEKVKTVNFETIYTIRKEISPDLKIDKVIDPKIRTLLESRLKDYGGDAKRAFSNLNENPIWLNIARGIAIKRVTISAISNAESLHYKKDKDGNLVLDNNGKPQAVDFVNTGNNHHVALYRDAEGNLQENVVSFFEAVTRRNLGLPIIDKDYKQNDGWKFLFSMKQNEYFVFPNSTTGFNPHEIDLLEPDNYHLVSPNLFRVQTMSKVSYGNNVIRDYKFRHHLETAVKDVSTLRDITYKQYKTLSFGEIVVKVRVNHIGQIVSVGEY

SEQ ID NO: 10120 - protein, 1585 aa, unidentified
  REGION 1..1585: note = Description of Unknown: Cas Enzyme sequence
MKKILGLDLGTNSIGWALVQQDFENKQGKIIGLGSRIIPMSQDILGKFDKGNSISQTAERTRYRGIRRIRERHLLRRDRLHRILNVLGFLPEHYATEICFDKHYGQFKEGTEPKLAWKKNEENKFEFLFQKSFEEMLADFKQKQPDLLNRKNIKGEYPKIPYDWTIYYLRKKALTHKISKEELAWLILNFNQKRGYYQARGEDDETANKKEYVEVLKIVNIEKGEIDKKNNKRTWYNIRLSNDWIYSATFTTEPQWLNTEKEFLITEELDENGNIKIVKDNKKDSSGKEKRKITPLPTFEEIELMSQADKDKIYTKIKAKTELTISNSGKTVGAYIYDTLLQKPNQKINGKLIRTIERKFYKDELNQILQKQIELQPDLFNDDLYNDCVRELYKSNEAHLLTLSKRDFVHLFLDDIIFYQRPLRSQKSSIGNCSLEFRLHKINKKDDKGNPIKNVFEKDDNGKDLEIKEYLKAIPKSNPYYQEFRLLQWIKNLIIYKKNDDSNVTSEFLNSTDDFEKLLEFLNNRKEIEQNNLLKYLIEQKYPKLKSKEVNAEIEKYRWNYVEDKKYPCNQTKTQIQTRLEKVINAPANFLGIIDTKDKANKKGEKISLGTREYQLWHIIYSVTDKDDFEKALKSFSKKYKLDETSFVKNFIKFPPFKKEYGLYSEKAIKKLLPLMRFGNYWKPNDITNEVRNKTNDIRERLKTIKEEKEIENVADDDIPKQILKSFFGVDDLTQGLRLYQASYLVYGRHSEAETAEKWNSIENLKTFLNEFKQHSLRNPIVEQLITETLRVVHDIWQHYGKGTDNFFDEIHIELGREMKNTAEDRKRMTKQITENEKTNLRIKLLLYELKNDNNIENIREYSPTQQEILKIYEDGVLSKYSEQELKNEKTGEFRKDKDGKQKEVTIYDITKSAQPTKAELTRYKLWLEQKYRSPYTGKTIPLSKLFTTAYEIEHIIPQSRYFDDSFNNKVICEAAVNKIKDNQLGLEFIKNHGGEIIDLGRNESVEIFKEEIYITFVKEHYEKNRNKRNKLLLEEIPEKMIERQLNDTRYISKYISSVLSNIVRAGKEDNGINSKNLIPGNGKITATLKQDWGLNDVWNEIILPRFERMNTLTNSESFTSKNKEGHAIPTVPLELSEGFQKKRIDHRHHALDALVIACMTRDHVQYLNNENAKAQKFHLQKGLAQKLRKYEKVLKTLYEKGSNNDWRIKKDINGNQLKKEIEVPKEYYKPWNSFTIDAKNELEKIVVSFKQNLRVINKTTNRYKKFENGKKVEVKQKGMNWAIRKPMHKEFVFGKVNLPWVQVPKGKNNVAIRRNLDTSFDLKKIKTITDIGIQNILKNYLEAKDNNPILAFSPEGIEDLNKNIIIYNNGKQHQPIFKVRTFEISNRFPLGQKGNKVRKYVEAAKGTNLFFVIYEYEEENKKTGKKETTRLFETIPLNEVIEHQKQEIAENTQKNTRTLIPLKSAKGKFLFYLSPNDLVYVPTAEELSNNCAIDFTNLTTEQIKRIYKFTDGSGAMANFIPATIAEVIFNLNKEKQKKIGVDIPIQNEIGIGSQGSKNERAITGEQIKSVCIKLKVDRLGNIIK

SEQ ID NO: 10121 - protein, 1074 aa, unidentified
  REGION 1..1074: note = Description of Unknown: Cas Enzyme sequence
MKYKIGLDIGITSVGWAVILLDEMNEPYKIDRLGVRIFDAAENPKTGASLAAPRREARSARRRLRRHKHRIARLKNLLVDYHVLSANEMGSLYLDTRFQKDIYSIRVESLDRLLDATEWARLLIHLTQRRGFQSNRKSEENTKETGALTDAVAANKKSMDINRYRTVGEMLVNDPRFAEHKRNKSENYLSTVSRTDIRNEVNMIFDAQKSYGNQFASDEIRGKAIDIIFSQRPFDVGPGKGSPYYGDQIYKMIGKCTFEPEELRAARATYTFEYFQLLQKVNHMTILHNANKRPFNESERLKVIELAFSTKDLKYRQIRKHLSLAEDCFFSDLNYGQKSTEEAEKSSFGTMQAYHKIRLALDKVTKNRIHTYSKEMLNTVGRVLSTYKSDEKIRTELAENGIPQEDIEAILSVESFSKFGNLSIKAMEKITPYLEEGMSYDKACVCAGYDPLAQHGEKQFTLSSEILKALNIPNPVVVRAISQTRKVINAIIREYGQSPAYVGIELARELSKNCMERRQDEKRMNDNQALNTAAKQTISSLYGKVNVTGMDIVKYKLFQEQDGICPYSMKPLEAEKLFDVGYCDIDHIVPYSISFDDGYKNKVLVRSEENRQKGNRLPMEYLNEKGKADEFTVWVTANIKDRQKSSRLLKASLTENDIAGFKERNLNDTKYIAKQMYSILNNYLIFDTKGDEERKKRVTAVNGAVTAYMRKRWGIAKIRQDGDLHHAVDAAVVACITDGTIQKVTQYEKRRYNPKNETDWNAKFPLPYPEFRTELDARLFDDPVSVLEKLKLPNYTAQEIQQLKPVFVSRMANKKVTGAAHEETIKSPRLINENCALKKIALTDLKLKDGEIENYYCPQDDTLLYSALKEQLIRFGGVAQKAFVAPFYKPTSDGKQGNIVKKVKIFETQTLSVPVHGGKGIAKNDGMIRIDVFRVPNEGYYFVPIYTADVKKKTLPNNAVVQAKPYTEWREMSDEHFLFSLTKNDLIRITAKKEQSFSVINKDSTLPKTMNANSFLAYYIKAGISTASVRVITHDNAYVINSLGLKTLVSLEKYMVDPLGNYHKITKEQRQYFN

SEQ ID NO: 10122 - protein, 1354 aa, unidentified
  REGION 1..1354: note = Description of Unknown: Cas Enzyme sequence
MSNKEYYLGLDMGTSSVGWAITDTDYNLMRKKGKDLWGIREFEEADTAEKRRSFRVSRRRRQREQVRSNLVRNYFAEAVEAVDPYFFQRLDNSKYYIEDKDSDVRTPNGVFNDDRYTDKEYYQQYPTIFHLRKDLIENTHAPYDVRLVYLAVSNMFKHRGHFLNSSLSDEGGKIRFTDAYQNFISLAEELLGVYFPDEDQESLSGILSNRSLSKTKKSEELENLLGIKKSERSKVECCKAISGRTADIAKIFTDVDFSEKVSFSFADYEDDKVDKVIKAIGDERYQLISAMKDVYDAGILSSILGEYDYLSFARVDAYEKHKKDLAILKRLIKKYGEDNQYDSMFRSEVPGSYSAYVNSYNTGKVCRRDFKSRKKEDFYDYVKKQIKNYPDCKDKKYILNEIENESFMPKQLTSSNGVIPNQIHARELKAILGNASEYLPFLNEVDESGLNVAERLVRLFSFQIPYFIGPVTENSKKYGGNGWVVRKEEGLVLPWNIEEKIDMSETRSRFISELVRNCTYISGEKVLPKSSLLYERFCVLNEINNVRVNGERLSSDIKQDIFNTLFKTGKKVSRNALFEYLRTRGLVEEKEQISGIDIQINNSLASYGKLKSILGDTIDTDAGEAMAEDIIYLCTIYGDSQKFLKEQLSMKYDCLTEKQLNRIVQARFRDWGRLSGEFLQLPGIEKGTGEIRTLITALWETNYNLMELLDGGQFTYKDALADKQTETLSALSDVTPEALDEFYFSAPVKKMINQAVKIIREAEKIMGCAPERLFIEMTRSDEEKGNKGRKDSRKKQLLELYKNVRDESRDWKGLIESEDQTGRLRSKKMYLYITQMGRDMYTGKPIDLDSLFDDNLYDIDHIYPRHYVKDDSIHNNLVLINKPDNAQKSDNYPLERSIRNNPEVTELWKYLKDKGLITEEKYRRLIGNKEFSDDQKADFIARQLVETGQGTKGVADLLKQVLPDTEIVYSKASNVADFRHRYDLPKSRIANDFHHANDAYLNIVVGNVYYTKFTRDPMNYIKNEYGKSDENREYNLGKMFESDVIRNGKIAWIASKKGGASGTIETVKRTMARNTPLMTRQTLTGHGGIADQTLYSKRKAAGSGYIPLKTSSDPKLVEVTKYGGFSKASTAYFCLVEHTSKNKRIRTLEAVPLYIVESIKKDPGYLMKYLKDQGLVDCSVRVERIPLQALIRWNGFDVHLSGKTGNQLVLRNAVNLYLSSRWIRYIKKLENYRTTGRLPHEINTESNIGLYEQLKEKHTEGIYSRRPNPIGGKLVNGEKTFRELSLEDQCTILLQILRISAIGPDSQADLRLIGGAEHTGVMNSGKNISNCSECLLINRTVLGLTEQAIDLRTV

SEQ ID NO: 10123 - protein, 1567 aa, unidentified
  REGION 1..1567: note = Description of Unknown: Cas Enzyme sequence
MTKILGLDIGTNSVGGALINLEEFGKKGNIEWLGSRVIPVDGDMLQKFESGGQVETKAAFRRQMRMARRLKQRYKLRRTRLIKTFKALGWVNEHFPENFKEIKKNNPDFEFNINEYLPLQEETVKEALIELIGRKEVNQLLSENNGNIPKKPDGKLDIPISEDWIIYYLRKKALYKKISVQELARILYMMNQRRGFKSSRKDLEETSVLDYQDFNKMVDNGIFIDEDEKTLETHFVEITKIKSIKQKDDEKDNKGNFTFIITPESEKVEPWEEKRKKKPEWEGKEFKLLITLKTKKNGKVDQLKPKVPSSEDWNLTMVALDNELQDTGKHVGEFFFDKLCEDKNYKIRQQVIKREKYEKELKAIWDKQLELNKDLKELNEKPELLEKLAATLYPTQAKIKGPKYKEITSNNLYHLIANDVIYYQRDLKSQKGLIDECRYEEKQYYDKNLGEIVTKGYNVAPKSSPEFQEFRIWQDIHNIRVIKIEKEINGKSLPDVDVTYEYIDDDVKSKLFKLFDSTKELTQSQLLKSIHNDLNEKEFKINLFANRERIKGNETKAAFRNALRKCNREDLLDDQNKFYKLWHILYSIDGKDADQSIRKALTNPKHDFKLTNEVIEELSNLQEFPKQYAAYSSKAIQKLLPLMRSREHWNKNSVSNECQERLVKVITGEEDENIDYRTRNQITNYFKKQKRKDVREAEISDFQGLPVWMACYAVYGKHSERKSDEKFKSWEDLGVNKMIPNNSLRNPIVEQIIRETLHVVKDVWKNYGQPDQIHIEMSRELKNPKEERERIANNQNKNKDEKERIRKLLGELKEGNPNSPIDVNKFRLWKQNGGINAEDKFNELFNNKNEVAVSENEIKKYRLWAEQNHISPYTGNPIPLNKLFTPQYEVEHIIPQSKLKNDSLSNLVISESVVNDFKGDRLARTMIEEHGGQPLQHKNSTFTLLSKEEYEAQCEKTFKNQRGKLKNLLREDIPDDFVERQLNDNRYITRKVGELLYPVANEKEGIVFTTGTITDELKQKWGMNTIWRELMKPRYERLEKILEKQLIVPDEKDVNKFHLNSPEPNDPVDIKRIDHRHHAMDAVIVASTSRAHIKYLNSLNSHKHIQQYKYLANKGVRDFIQPWKGFSEEFKKHLQRLIISHKVNCQYDPDYPEYSGVIARPQNKYKKWTNRNGQWRKEYQWQQDNPNWWAVRKSMFKEPLGLIYLKEIKEVSLKKALEIQAERQKGIKDHSGKPRDYIYDKLARQEIRFLIEDKCGGDIMQAKKQSNTLKDSKSNPIKKVRVAFFKEFAASRVPVDNSFTYKKIKAIPYAEKTINRWEEWEKNGKNYKGQIFPNDTTKWPIAFLLKKHLDGYKTLNGRPDPNAAFSGEGYEALTKKNGGQPIKKVTTYESKAAPIKFNGKILETDKGGNAFFVIYKDKNTGEHIDWYTPPLYSNEEATGKDKGVINRLVNKEPIAEPQEGLEFFTLSPEDLVYVPKDGEDINANDWNGKDKQKVFDRTYKMVSCTGKQCFFIPHNIARALESNDKELGPNNKAEKSWDEKMIKKDCVKIELDRLGNIIKANNEPVNI

SEQ ID NO: 10124 - protein, 1127 aa, unidentified
  REGION 1..1127: note = Description of Unknown: Cas Enzyme sequence
MENYQYRIGLDIGIASVGWAVLETNAQGEPKRIADLGVRIFTKAEHPKDGSSLAAPRRSARSVRRRLRRRKFRIQRVKGLFEREGLISKQELEKSYQTNAVENVYELRVKALDRRITNEELAHVLLHIAKHRGFKSNRKAEAKDNETGAVLSAIKENEQRLSEGNYRTVGEMIAKDESFREDAPWNENHYIFTPRNKAGNYKHTVLRDMLVKEVHSIFESQRSFGNDAASEKLEREFIDIFTAQRSFDMGPGGDSPYGGNIIERMLGKCTFEKNEPRAPKGSYTAERFVILPKINNLRIKDSAGSERGLTEEERKQLLTEAYKSKELKYTKVRKLLSLDDDEFFKGLNYGRKEIAEVEKATFVKATATLTITKILAASGEYDFSDLADGLDEKRAFLVDEIARLIATYKEDAKRREGFEQFDLDNETIDKLLELNDSKFQHLSFVAMQKLMPYLEEGFTYNEACERVGYDFKDEYHGEKFHTLRGKEFQDIYQEELADITSPVVKRAISQTIKVVNAIIDKYGSPQAINVELAREMSRPFNERSKMEKDMLANQANNEAILKRLREEYGVAHPTGQDIIRFRLWQDQDGRCLYSGEAIPIDKLFAVGETDIDHIIPYSISFDDRLSNKVLVKAKCNREKGNRLPYEYLGNNPAEWEAFKSRVDTYVKDSRKRNNLKKEKLTEEDRKGFKERNLTDTKFATVVVTRLLRNYLEMAPIEGKHKHVTAVNGSVTAFLRKRWGLSQKDRRTDTHHARDAVVIAACTDGMIQKITRFSQLQELKHTRDRRIIDPDTGEELTLDEKYEQEWLNMYGKHLPTPWPEFREELELRMMPHPEDVVLDDPRKFNQIIGYKEDLWGKPYEQPIFVSRMPNHKTTGAGHAETIRSARLFDSEGVVITKTALQDLKLDKEGQIDGYYNKESDRLLYDALLRRLQMYSGDAKKAFPEGEDFHKPTSTGEEGPVVKKVKIMKKQTAGVSVGKGGIAENGGMIRVDVFQVNKKYYFVPVYYADAVAKHLPNKASVAYKPKSEWKEMEDQFFIFSLYPGDLLHFKHKKGMKVTYFDKAQGLVSEDYIYFTGADITTASFAGDSNDKTFSLRGMGIQSLEVLEKCQVDVLGNITKVNKETRMTFR

SEQ ID NO: 10125 - protein, 947 aa, unidentified
  REGION 1..947: note = Description of Unknown: Cas Enzyme sequence
IEIIKCLVGLNADACKMFRLERDEKVGVELSSATFDEKTAELEQSLGEELFDAINLMKKIYDACAWNAIISGSSYLSEARVKAYQKHHEDLVILKRIVKKIGEEEYERFFRSSELGTYGDYAGSVNSHNKKTRRLGNHKQDVLYSEIKKLLAKAPDSKDVEYVLSEIEKGTFLPKQLTGENGVIPYQAHLAELQRILDNASAYLPFLLNKDEESGLTVKEQIIEVFKFRLPYYVGPVTTNSEKNGGNGWVVRKAEGPVRPWNIETKIDLEKTSERFIKRLIRKCTYLSDEKVMPKCSLLYEKYAVLNELNSICIDGERLDPEIKQDLYEELFLKGKTVTKNAIAKKLQERGLLESKDQISGMDEKINSTLSSYKKFHKIFGDDLKKDSYKEMAESIVYWGTIFGDSKEQLQRKLTQEFASKLNENQLQSVLKLKFKDWGKLSREFLLLQGMDCDTGEVLSLIDALWNTNHNLMELLHSPQYTFGQALEEKTNKSLKPLNEMTIDDLAELYISAPVRRMVWQTLLVIREIEHVMGRPATRVFVEVTRGDGEKKRTTSRKDAFLALYKNIKEGTDWKAIINKADADGTIRSKKMYLYLKQKGKDLYTGKEIDIEKLFDDNLYDIDHIYPQSLTKDDNLDNNMVLTDKTVNNHKQDDYPLEESIRKGRHGLWKELHNAGFINDEKYKRLTSSSPLTDEQLAGFVARQLVETSQATKVIADILKNALPDSKVVYSKAKVVSDFRNKYGIYKSRSVNDFHHAHDAYLNIVVGNAYYCKFTDNPIRFIKEKYAKDKTTYQYNLAKFFERDVTNGKETAWIGSGKQKDGESNNQGTIVLVKKMLSKNTPLLTRRTYVDKGMLSEQTVYGKNSVKAEGYRPLKQIGAASDMFKYGGYKSPRVAHFMLVESDYKGKKIRTLEAVPIHLANKQTLGLSQLEAYCVTELGLENPVVRL

SEQ ID NO: 10126 - protein, 1102 aa, unidentified
  REGION 1..1102: note = Description of Unknown: Cas Enzyme sequence
MGVIFGLDLGVASVGWAVVNENYEILESCSNIFPAGEAAENANRRGFRQGRRMTRRRRTRVNDFKKLWGKHGFVLPNNELNEVLEIKNKGLNEALSEDEIYYVLLYSLKHRGISYLDEADDGNLSSDYARSIARNEEELKERFPCQIQLERLQRYGAYRGNITIIEDGEPVTLRNVFTTSAYRSEIEKFLEVQKGFNTRISEEFIAEYLEIFNRKRAYYIGPGNELSRTDYGVYTTVLNEDGTYITEKNLFDKLIGKCSVYPEEKRAAGASYTAQEFNVLNDLNTLKITSDSKYVEEGKLTEEAKRIIVDKIKTAKAVNVPKIIKDVINDKDAQINGARIDKNEKEVFHSFEVYNKMRRAFEAIDVDITKYQRETLDKLGDILTLNTDKDSITEAARELELSDEVLECLIKLRRNNSSLFNKWQSFGYRIMLELLPELYSQPKNQMQLLTDMGVFKTRPKRFAKYKTIPADVITEEIYNPVAAKTIRITVKILNALIKKYGYPELIVIEMPRDKNTDEEKARINKEQKNNENELKNIKAKIKSEYGRDITDADFKQHKNLSLKLKLWNEQGGVCPYSGKTIRIDELIDNSNLFEIDHIIPLSISFDDSRSNKVLVYASENQNKGNRTPYAYLTNVNRDWDFHNYMDFVLKNYKDVTKRKKKENLLFEEDITKIEVLAGFVNRNINDTRYASRVVLNSLQDYFRAKDCGTKVKVVRGSFTHQMRMNLKLNKDRDESYVHHAVDAMLIAFSQMGYDSWRKLTEQFIDYENEEYINKSGFEKLLSNDEAYKNALYQSKWMKIKANIENAAEKNKYWYQVNKKCNRELCNQTIYGTREYDGKVYKISKLDIRTDDGVKKFKGIVEKKPECLLVCKNDPKTFEILMDIWNNYKDAKNPFLQYEQENNDVIRKYSKKRNGPKVGVLKYEDGEVGSCIDISHKYGYERGSRKVILDSLNPYRMDVYYKTDEEKYYFVGVKQSDIKCDGDLFVIDEQKYAEALLAEKMIAKGQCRGDLQELGYEYKLSFYKEDIIEYEKDGEVNTERFLSRTMPKVRNYIETKPLNAAKFEKRNPVGLSKTKSVRKIVTDILGNKFYVDKMKFSLVVGKQ

SEQ ID NO: 10127 - protein, 1084 aa, unidentified
  REGION 1..1084: note = Description of Unknown: Cas Enzyme sequence
EKKLETFRLRKIALIEQVELEHLAIVLQEINNEINQSSGYLSEISDRSKELHFNDITVGQYLYNQISKNPHASLKNQVFYRQDYLNEFQSIWNKQAEFYPELTDDLKDKIQNEVIFYQRRLKSQKGLISYCEFESWEQDVSIDGEKKRKIVGHRVTPKSSPLFQEFKVWQNLNSIRITNIKTSEVYHIEEDSNTELFQKLNWTDKLSDKQILKEFGLKPEEWKINFQKIEGNRTNHNLLEAYKEILKIEGYDNINFTNIGADELQKTLEQCFNEIGIDIQILDFNASLEGNGFSKQKSYELWHLLYAYEDDFSRTGTTSLEERLKSNFGFKDEHLPYLINIRFQDDYGNLSARAIRKLMPHLQDGKIYSDACELAGYNHSNSVNKKQNEERELKPKLEILKKNSLRNPVVEKILNQCINVVNAIIKDEQMGRPDEIRIELARELKNTKDQRSEMTRAIGRATREHEQYREEIKTKFGLPHVSRNDLIRYKLYKELESNGYRTLYTDEYIKPEDLFSKKYDIEHIIPKSRLFDDSFSNKTIETRESNLDKGDETALDFVERKYGKEGLDKYRNQVEQLYKAGKIKGSKHRKLLMSLKDIPEDFLNRDLGNSAYIAKKAAEILLDVTRRVSLTSGTITSKLREDWGLIQVMQELNWSKYEKVGLTYYKENKEGKKLPRIKDWTKRNDHRHHAMDAITVAFTKPGMVQYLNNLNAKSNKEIYKLENAYTFKDERGKRKFIAPFSDIRKASKEHLSQILISHKTKNKVTTKNKNKINIKGKNTYKYQSVQTPRGQLHKETVYGKTNYYETKTEKIGGKFDKDYINLVANQTYRNALLKRLEEFENNPKKAFTGENSLAKNPLYLNGTKETVPEKVKLTCLEDRFTIRKEITPDLKINKVVDEGVKQILQKRLKDFNNKPKEAFADLDKNPIWFNKEKGIKIKRVKITGVSNAEPLHHSKNHLGEEILDKNSKPIPNDYVSTGNNHHVAIYRDEKGNLQEEVVSFYEAVARKNARLPIINKDHEKGWEFLFTMKQNEMFVFPNEEKGFNPNEIDLLNPDNKALISENLFRVQKISTKNYMFCNHLHTLA

SEQ ID NO: 10128 - protein, 1219 aa, unidentified
  REGION 1..1219: note = Description of Unknown: Cas Enzyme sequence
MENKKIVGLDVGTSSIGWAVINEAEGQQTKILGIGSRIIPLATDEKSEFESGNAISKNQKRTLKRTQRKGYDRYQLRKENLGKRLIELGMMPDTSLFALSALELYGLRAKATYEKITLPEIGRILFHLNQKRGYKSSRKDESKDKKETDYVAEVNSRHEKIKQDKITIGQYFYSRLQKDERYRIKDQIFPRAAYIEEFNAICSTQQEFYPEVLIDNTIRQLRDEIIYYQRPLKSQKGLVSICEFEAKWFRNKEGREVLSGPKVTPRSSPLFQVSKLWETINNISINSKRGEPFTISIEKKKELFNYLDNNEKLSEAELFKILGIGKNEGYYGNKQLAKGLQGNLTKTAIAKVLQGSNPLVQLLTFDLTEENYQRLDIDSGELAERIRVNVDLEQQPLFKLWHVLYSIPEEKDIVKKLVADFDIPEDLANQLAKLDFTRGGFSNKSSKATRHILPYLQQGAKYSDAMTLAGYSHSDSLSRAENLIRPLKDKLKLLPKNSLRQPVVEKILNQLINLVNAIIDKYGKPDEIRIELARELKQSLDERNTAFKNNNKRETENKGIAERLHKEYHVKANRRNIEKWRLYDQTNGNCLYCGNKIELADFLNGDESDVEHIIPKAKLFDDSFQNKVISHRRCNKAKGDSTAYDYMLTQSTEQLSRYEESVAQLFKDRRITKAKRDKLLMAEAKIPSDFIARQLRETQYIARKSRDILQEVCRNVWATSGSVTEKLRKLWGWEEALMHLQLDKYKTAGKTEWVEYESNGQTHKKERIIGWTKRDDHRHHAIDALTIACTQQGFIQRINTLNSKHTRNEMLAEVKDQTYREKLTLLEKSLLNKRPFDTASIEKHLSQVLISFKSGKKVAVIGKRKVKKNGKKIVRQEGIVIPRGPLSEESVYGKIKVRKYETVKLSPAFDNAEAIINKSHKALVNKRLDEFNQEPAKAFKGLAKNPIWIDASKTQALTSVDVISFKDEYVIKYPIGNITLKDLPSIVDKHIRQVIEKRLSLYNNNAKEAFKDLENNPVWFNEEKRIPIRTVRCFTGLDAVAPVKFNDESKAVGFVKPGNNHHIAIYQNEERKKQEHVVTFWDAVERKMNRIPVVIRNPKEIWDIVLSNKEKYSQDFLAKLPEDGWTYTTSIQQNEMFVFNLSNETLDEAIRNKDNDLISKNLFRVRKLTEGAYWFNHHLETEPKESVEDKKLGKCVQASLTSMTGIKVKIDCLGNISRA

SEQ ID NO: 10129 - protein, 1055 aa, unidentified
  REGION 1..1055: note = Description of Unknown: Cas Enzyme sequence
MSGLVFGIDLGIASCGWAVLRLPAGEDQPGEIVGMGSWMFDVPETSKERTPTNQVRRSNRLLRRVIRRRAQRMSGVRRLFRDSGLITEARADALAFANLNPWELRVQALERRLTEEELAVALGHIAKRRGFKSSAKGKSANTAGDDQKMLKALEATQERLARYRTVGELFVRDPGFAGRKRNRDGIFDRTQNRDDLAREVAEIFRAQRRFGNPAASNDLEAAFTEIAFTQRPLQDAENLVGMCLFEPAEKRASRFAPSFERFRLLTRLVNLRVLSATGERPLTPAELAAVLANPGKTAKLSVKEVRKRIGLPADQRFSAFRPDEEDRDVAVRTGEAMAGTRKLRETLGETLWETLLPTPLLLDEVARVLTFFETQEVIHRELERLSLPDGAVEALVRGLESGAFAKFKGAAGISAKAARSLIPHLEAGLRYDQACEQAGYDHAASKWAGREQVTDRAAFNRLVADLAADVANPVARKSMTEGLKQAWAMRNRWGLPDAIHIEMARDVGNSAEKRREIERDIEKNTASRERERQEARELLGITDITGDTLLRYRLWKEQSGRCPYTDQAIPAAAINANDNSHQVDHILPWSRFGDDSFANKVLCTASANQQKKGRTPFEWFQASKNEEDWQTFVKRIEGNAAFRGAKKRNYVLKNAREAEERFRSRNLNDTRYAARLLAEAIKAFYPPGERQDRGGIRRVFTRPGALTAALRQAWGVESLKKVDGKRVDDARHHALDALVVAAVGEAEVQRLTRSFQEWEQRGLARPLRQVPPPWGDPAGFRREVEDAYRDIFVARPERRRARGEGHAATIRQVRHRDGAAVVYERKAIADLKESRLEDIKDAERNEGVITAIRAWIARGRPADDPPVGPSGQVIRKVRLRTKAKPAVEVRGGAADRGEMVRVDVFSKPNRKGKDEFYLVPVYPHQVMNPRQWPTPPDRAVVQSKDEEDWVRIDNSFAFRFSLYPRSLVEVVKGSGEILLGYLQGLDRSTGAISLVNHRDPRLTVDDLGNTTRGIGAKTLVSLEKFSIDRFGGRARVRSEVRTWHGVACTSPTPPG

SEQ ID NO: 10130 - protein, 1058 aa, unidentified
  REGION 1..1058: note = Description of Unknown: Cas Enzyme sequence
MASELVFGFDIGTTSIGSAVVRMDSTAETGGILHLGVRIFPEARDPKGIPLNQERRKRRMMRRQFRRRRVRRRDLNSLLTDSGLLPPFTKASGSPWSNAMAQDPWALRAQALDRALSPTELGRVLYHLAQRRHFRGRDLEELEVDLAESKEAPTADEQKAASQREEDRSALKASGLTLGAFLSGIPERSGRRRGHHFAREDVLAEFRAIVAAQSPHHSKLRDPDFAAALEQTVFNQRPVFWRKATLGKCRFLEKAELAASSSWVAQEKRMLEKLNNLRIEEGNGRPLDDQERAAILSLLRKQDHVSWAGIHRHLKLYWRKNDLSEKPTFNLQRGGEKGLAGNRLENRLANIMGARWEAEPEVRERMRREIHARLYAADYGQIGGRIVIRREAERRLERTTERERLKADFKLTDEQADEISKLSIAPGWEPFSEAALWQFLPRLQEGAVFGTLLAGPEEENWRAKTFPNRVQPTGAWVDRLPSPGNSRDEVDRQKSVRNPTVLRVQNELRKVVNNLIAVYGRPDRIRVEVAREVGKSAREREEEKTRNRKREIVRKEAVTELQANKIAQPSRDDIEKWLLWKECRHTCPYTGENINFSDLFGASPRFEVEHIWPRWLSGDDSFANKTLCRKDINLQKSNRTPLELYAGDIAKLEKVLQRVRNFDDRYGPGGRKARRFSEPVPQDFLARQLSDTGYAARQAVSFLKVLFPDLGQAGEVRVATLSGRVTARLRHNWCLNNILSDSGDKTRADHRHHAIDALVAALAHPGYTQRLSQWFQARDSATPQVEPALNPPFPDVRGQAEKKVAEIVVSHRVRRKVSGPLHKDTTYGDAGPAGGTGGIAYRWFVTRKSVDTLSKSLLADDEAWPDTHVRDRVRAWVAANGGDPKKAFANGYPTVSEGGAPIRKVRVMVKQQQNLMAKLKNGYADKDLIHHLAIYKTSTGKFRAEAVKLFDAAARVRDRLPPVDSKNSEFVMSLGKGDQIFITVDGKRELWVVTGIESDGRAALSPSTDARPTESKVALAAGFDAPKTVFRPRLGGLMSANPQKVAVDPIGRIRPARD

SEQ ID NO: 10131 - protein, 1345 aa, unidentified
  REGION 1..1345: note = Description of Unknown: Cas Enzyme sequence
MKKILGLDLGTTSIGWSFIQEAENDTEVSTIINTGVRIVPLTTDEEADFRKGNTISINADRTLKRGARRGLQRFKQRRNALLSIFRNLKFISDDFVYAENGASTTFSSYEIRAKAASEQVSKDELVKVLLMLNKKRGYKSSRKAKTVEEGEAIDGMAIAKELFDNNLTPGQWVYISLSKGEKFIPDFYRSDLQKEIEKIVGFQGKFYSEVINSQLLEDLKGKSRTLTSQHFTKTLKIELTENKGSREETKLQHYKWRKEALETQLDLKVLAYIFTEINNQINQSSGYLGAISDRSKELYFNKQTVGQYLYGQLKTNEHSRLKNQVFYRQDYMDEFETIWETQTAFYPELTETLKTEVRDITIFYQRKLKSQKHLISKCEFEKGHKAIPKSSPLFQEVRIWQNLNNIVVKNEATKEPFLLSEELKKQLANALHFKDSMSEAQLIDFCGLKKNSHTVNFKKIEGNRTNTSLFKAFEKILIYEGYDELDISKMDADDILKTFKNAFEDLKLSTALLEFDASLQGNEFDKQPYYQLWHLLYSTEEDETLRNVLVTKFGFKPEHVAFLLNVGLQADYGSLSARAIKKILPHLKDGHIYDKACLLVGYNHSSSLTKEDNDKRALKDKLDLIKKNSLRNPVVEKILNQMVNVINAIIDNPEMGRPDEIRVELARELKNNNEQRNEMTKQINKSTTEHEQIRHLLHKEYGIARVTRNDIIRYKLWKETDGISIYTGKPIEPTKLFSKEYDIEHIIPKSRLFDDSFSNKTICERQLNIDKSNKTAYSFLKEKLSPEEFDQFEKRVKSLFGKISRTKQNKLLMADNEIPEGFIDRQLRETQYIAKKSKELLLEVSRTVTSTIGSVTDKLREDWELVEVMKELNWDKYHKLGLTQEEIGKNGERLYKIKDWTKRNDHRHHAMDAITVSFTKPAYIQYLNNLNARNAEDKKGAEIYGIETKYLEKDKNNKLRFKKPIPNFREEAKKQLENILISYKAKNKVVTKNKNITKIKGGAIEKIQLTPRGQLHKETVYGKLQHYVTKEEKVNANFTVDYIEKVAKKAYREALLKRLEENGNDAKKAFTGKNVLSKNPIYLNNDKRIVVPEKVKLVWLENDYTIRKDITPDLKIEKVVDAGVKTILQKRLTEYGNDAKKAFINLDENPIWLNAAKGISIKSVTISGVSNAQALHTKKDHLGNDILDKNGNPIPVDFVSTGNNHHVAIYRDEKGNLQEEVVSFYDAVIRQNLGLSIINKNHEKGWDFLFTMKQNEFFIFPSESFNPSEIDLLNPKNYSLISPNLYRVQKFTIKDYFFRHHLETTVEDKKELKDVSYKRLGLNGINNIIKVRVNHLGQIVQIGEY

SEQ ID NO: 10132 - protein, 1006 aa, unidentified
  REGION 1..1006: note = Description of Unknown: Cas Enzyme sequence
VKYRLGLDVGTNSLGWAILKLDRQNNPVSIEKIGVRVFTDGRSNDGKTTLAAHRRQKRLERRMRQRFIRRKKTVLNQLVRMKLFPSTIQEQLALKNIDVLTLRSRAVEQPLSAFELGRVFYHLNMKRGFRSNRREKLDEDVKNKISERIESLRQQIDKENVRSVGQFLYRRYEQGLSTKSVIENNFHLSRELIESEFDAIVEFQKKNFSEISDADWLALRRRIFYQRPLKPIATGPCSLYGKDGKSFRAHKFYPSFEEFRFLVELYNLSYLDEQFQPVLLSSEQVIDVFKKFKYSTKVTFSQLKRHLNLGSVLFAYEKSASRKEIKVSSTNEHFYEILGDRWSNLSLQDRDLITGICFSEDAREIKSSKLKSLNKLELTEMELAEITDLERLPMPTEGACQYSLRALQDIVALTISEGLRPDSVIADLESNESLEQGLGNTLEYYGKVLSDSTQPVPEHVKVNGSNIDPMEREYGRLTNPTVHSAMNQIRHVVNELFSEYGKPYSIHIELARDLKRSKNERDLIIRKQRENQALNEKIRKFIQQKKAKPTAFNFERVKLWFELSIAGKKTCVYSGKNISASMVLSDQVEVDHILPFSKTLDDGLSNKVLVLASENRIKKNRTPYEAFHSDDEKWAQIQERVKFLPVSKQSRFAPDALRRFSEENAFLERHLNDTRYISKLARKYFESVLDGSKIVVSRGQITSLIRRKLGLSQFGSDADGVKDRDDHRHHAIDAIAVAIVSRSFLNEVAVLSSRGKGVNRIKAPTPWRSFIRDVRNSYNNLIVSRKLDHAKEGPLLEETAYGIRVDSRGKVQRVTSKRLLDDKTKNVRRKEIKNTSEPFEMVGSLESYMAKISHTSKDGRIHTKVYDKGEINHLAVWYLPRHITLNQDGNKSRSSDYLFVAVRNFDLNVRDHLDFRPHPAAKLVGRFYKGDTVILEHEKEKRLYVIKTIKSSLSNSVLQFLSVERARPSKTHKEFSSAFSKLIVYKFRKVHVSPAGKIYDPGPILK

SEQ ID NO: 10133 - protein, 1111 aa, unidentified
  REGION 1..1111: note = Description of Unknown: Cas Enzyme sequence
KEHNMFPNDNLFRLSTHDLYELRANAVTKQISLEELGRVLILLNQRRGFLSNRKSNSEEENSTDYKKRIAELQHELNGKTIGQQLFSEIENTKNSFEIILRERTYLRASYIEEFDRIWECQKQFHGKVLTGGINEDDNKGTLYNTIRNRIIFYQRPLKSQKGLVSNCPFEKHHKAVTKSSPYFEIFKIWQRLNDLEVTYENGSKTKPTLEQKQELFKLLFFGEKLNNKYKLTVTEIKRVLGLKRNEGYLNFSELDGSRTYSILKNALIKANITTPEDYLFFNLDKNDEKGGLMELWHITYSIPNENDVIKTLIQRFKFTKEQSEIISKEVGYTSDYGNLSTRAIRKLLPHLQKGLNYSEACDAVKYDHSGYKTKIQLEEKLKPIKQNTLRNPVVEQVLNQVVNIVNLAIAKHGKFDEIRVELARELRNSAKTRKNITNLNSKNKKENDKVREMLQKEYGYKIVNGRDTQRYKLWNETDKQCLYCSNPITKTDFLTGNGEIEHILPKSRSFSNNSNNFILAHRKCNSGKEGKNQMTAYDFMESKGKEALEQYIKKVNEFYKDGKGTISKSKFENLMCKGEDIPSDFVERMKKDSQYISKEAVKMLKNVCENTYTTTGQITDFLREKWELKNVLQEISFDKYKTIGQIETKEYKDGQGNIKTYETIKDWSKRDDHRHHAVDALICALTDQKIIFKLNNLNKIYQYQRDALSNEELEKIKSTYDFEKLDIKSFADLIDDYYYSPIKNLREEATKHLENIFISIKKSSKVLSKNINEPKNAKPQTTWTPRGRIHEDTVMGKVKRVAEKKAKLNEKFTITDYIVNPEIKTLIKNHLSQHQNNPEIAFNSKTLKKSPIKYKDQELKEVQVYEDTCTKRVVINDKLTSAQIEKITDKQIKELINARLKENGGKIKEAFLNLKENPIWLNKEKGIQIKSVTVYDENKVENVRNGYVKTGGNHHALIFRNDDGKYLDKVVSFWEAINIGNLNIQQTGKPYPIINKKDDSILGTFQFSMMINDLFVFDLKHSKNPSENEINFLDKKNRPIVSKKLFRLQKMSKSSSGQFLIDFRHHLETTVNRNDKELKDITWFTISKNSDLSRLTKISINHLGEIIKIGE

SEQ ID NO: 10134 - protein, 1187 aa, unidentified
  REGION 1..1187: note = Description of Unknown: Cas Enzyme sequence
MIALGLDIGSNSVGSAWVDAEQGDIHLAASVFPAGVDEQDDKRGAPKNQARRLTRSQRRTIRRRAQRKRLLLRFLMSRGLLPRDAEGLRRLFDIDPWFLRRKALSEPLSPHEFGRVLVHIAQRRGAVGVMTDPDDTEEGKVKDGMDRLNELMRERGAETVGQLLAELIDERRRVHGEKSWHEPIRNRQYRIAETDQLFAGRELIRSEFHRVVEAQRAFRDSPLVALLNEDLLKKLDDPNPTDTWRHRGLLFGQRRTYWDTGTLGRCAMEPTERCVPIADRHASYFRVLETVNNLRIGRPGNARQLTPEQREGIIKLLRGPLGQRQSRGRSVPKKSVSVSEIREALGLGKRKSKGDPIQLNIEVDEDREINTDWFHREIVHGAISETVWNSWDEHQKESVNRAILKFNPDQSDDAQKLREGANRWWGLDAAAADRLVAAWKDRPRLEKRLNLSRRAILNLLPFMERFDAEKNRWPTQQEARKAFAAVLWNRFNQTGDCAYEHAARRYETGALGLTAADRYYMRQQKHQLKDENGRLIRDACGNPIPEPPPAPMLSNPVVRKAIHEVRRHLLAWMRKFRRKPDRVVIEFARGVKETAKQRNLQLASNREREKERRQIEENLRAWNIAPSNWDRAVLRVRLCREQRGVCPFSLTGPNANRKITERMAAEGTEVEVEHIIPEALTTRTMAFNNLVLCYREANRGKGMRTPADWLGPEGIRAVLQRLEKAPIKDNRAKWKRLQAPTPEEADFRNSQLTDTAYAARQVAAYIADALFDGQGLPERGGERRIFTTKGEYTARLRADWGLHESTIDRVHNLEQPPSPEQLAADPHLEQATRRARKEPKDRRDHRHHALDALVIALLGPELLSVVGEQARENRVYRERTGYWPRRMPLPHPPAWRNVEAFRAAVITAFDKLVVSNRPVKRRLTGALHEETHYGPVLAPLPAHRTEKAETLFTNRISADRLTPNHLRVPDGWDELSARLDDPALADPEKRAIRKQLAALPDPSPAKSGIVRDRALRDRIRKCLRANKLDPDGFAANQLKELVRAGKLTQSSGVPIKGVVLLRTNTDPVIIPRKRWDAVSGRMVREDDPRTARVYIGGNNHHVEIREDRGTGKWSGRIVSTFAAAQRVRIQKLPAVDRSHDDDSRFVMSLSEGEMIHARRKDRPDEPPDYYYSEHSIVDIADVSDILL

SEQ ID NO: 10135 - protein, 1168 aa, unidentified
  REGION 1..1168: note = Description of Unknown: Cas Enzyme sequence
MSGNSAIPCEKKKLYRGLTREHINTLGPLTFGFDIGIASVGWAVLSGTRIVDLGVRAFDKAETADKGESLNLARRTARLMRRRLRRRAWRLVKVARALKRHGLIIDSKLFLKQPSYVDSVWQLRKSGLDRLLTPAEWVRVIYHLCKHRGFHWTSRSEALQADGDTKSENGKVKQGLAGTAKLMKEKGYRTAAEMVLAEFPDAQRNKRGEYTKALSRVLLAQEFSLVFARQRELGSIHATAELQRELLGDGDQRSGLFWAQKPALSGADLLKMLGLCTFEKNEPRAPKASFTAERHVWLTRLNNLRITVDGVTRPLIDVERAIAIPLPYTRAEKFTYKDLRTALQSAGLSTEFRFAGLSYPSLRQREENKAKDPEAETLTKLAAWHELRLAFKRASLETIWQQLSTPALDGDPIWLDQIGWVLSVYKDDDEVLRELRQLSLPGGETCVNVLLGVRFDKFHALSLKALRQIVPKMEAGLRFDEAVAAIPAYGHHSQPISRESERAQYLPAFYAHRDKDGRLKFNDDLDVPRNPVVLRALNQARKVCNALIKVYGAPHAVNIEMARDLSRPLEERREVLAAQKEFRERNDKAREQFEETFGHKANGATLEKWMLYREQMGKCAYSLDAFESPDRVINDASYAEIDHVLPYSRSYDDSKNNKVLVLARENRDKGNRTPHEYLTALDGGDDGPRWRSFVGFVDSNKAYRQAKRSRLLRKDFGKDEAKSFMERNLNDTRYICKFFKNYVERFLQLAETSEAKRCVVVSGQLTAFLRARWGLLKIREESDRHHAMDAAVVAACSHGMVKRLSDYARRRELSAVSRGFIDLATGEIVDAAMYQQLERHFPEPWSHFRHELEARLKLDDVNQMREQIVVLGSYNEPALAALKPLFVSRAPQRRNGGAAHKETIYAQSETLKETGSVKQKVALSSLTLKVADIDKFIEKLVDPHRNAMLYEAIRDRLIAYAGKGDKAFAANSPLRKPDKLGEQTGPIVRSVNVLIDKMSGVEVRGGVAKNDTMLRVDVFQHKQDRKFHLVPVYVHHRVAGLPDRAIVQSKDEDEWTIMDDGFNFLFSLHANDLVRIVQRGNIQTLGYYRSCHSGTGNLNIAVHDRARSAPRSSSLTYSQKNPGKDVPNDKLGLIEGVGVKTAISVEKFNVDTLGRVYASPRETRRDLA

SEQ ID NO: 10136 - protein, 1475 aa, unidentified
  REGION 1..1475: note = Description of Unknown: Cas Enzyme sequence
MKKILGLDLGTNSIGWALVDMDEKKIEGIGSRIIPMTQDVLDTFSGGKPLETQTSARTHYRGMRRIRERHLLRRERLHRVLNILGFLPEHYTNKIDFEKHLGQFVSDAEPKLAYANGEFIFRSSFEEMLNEFKELQPQMFYTKPNGNETKIPKDWTIYYLRKKALSQKIEKEELAWIILNFNQKRGYYQLRGEEEEEQQNKLVELHRLKIVNVLMDEKPNSKGENWYSLQLENGWVYRRSSKTPLFDWKDKVRDFIVTTDLNDDGTVRKDKEGNEKRSFRAPNENDWTLLKKKTEQEINKSHKTVGTYIYESLLNNPSQKIRGKLVRTIERKFYKEELLSILRIQIKLQPELFTDELYNSCVRELYRNNEAQQFVLSKRDFLHLFVEDIIFYQRPLRSQKSTIGNCAMEFRFYKDNEGNQVKEYLKAIPKSHPLYQEYRIWQWISNLRIYRKEDEADVTGDLLKNADDVVYLFEYLMTQKEVGHKDILRHLLKPSIKQNFASDKLSLFNKFLDNEATKYRWNYVFDDSKEKEEDKSKKYPCNTTGYDFRRRIEKVEDVPANFLTPEIEQHLWHIIYSVTDKNEYRLALGKFARKYTLNEDSFVANFENFPPFKSEFGAYSEKAIKKFLSLMRVGKYWSWDAIDEKTITRIEKILAGEIEENIKSRVREKAINLTESYHFQGLPVWLASYIIYDRHSEADIATKWDSVSDLEKFLMDFKQHSLRNPIVEQIITETLRVVRDIWKHFGHGAKDFFSEIHVELGREMKNTAEDRKRMTEQVNNNESTNLRIKALLMELKDNADGRLQVENVRPYSPIQQDALRIYEEGVLSSKIDLPEDIIKISRTAQPSKSELQRYRLWLEQKYRSPYTGQVIPLGRLFTEDYQIEHIIPKSRYFDDSLNNKVICEAAVNQLKDKQLGLEFIKSHRGEKVECGMGKIVEIFTEEAYQTFVKEHYSKNKSKRQNLLLEDIPEKMIARQMNDTRYISKFISTLLSNIVRSDKEDDGINSKNLIPGNGRITSILKKDWGVDAVWNDLVLPRFERMNKLTNSSAFTYWNEQYQKLLPVDYSPLDLKRIEKKRIDHRHHALDALVIACMTRDHVNLLNNQTAKSETSRYDLQNKLRNKSRETWIDKKTSEPIERIVFKEFKKPWDSFAVDAKNALEMVVVSFKQNIRVINKATNYYQKWVVKNGIKSKESVKQEGMNWAIRKPLHKETVSGKVELSRIKVPKGKILTATRKSVDTTFDLKTIDSITDTGIQKILRSYLAYKGNNPELAFSPEGLEDMNSNIKLYNEGKAHQPIRKVRIFEQGSKFMLGETGNKRSKFVEAAKGTNLFFAIYHNHEGRRSFETIPLNISIERLKQGLKVAPDENEKGERLFCFLSPNDLVYVPGEDEKIYQQLIDYHRLNSEQIKRIYKMVSSTGSECHFVQHHIGSLVKSYDSKLKTGELGSLNKLETSFEGIRIKEVCIKLNIDRLGNISF

SEQ ID NO: 10137 - protein, 1366 aa, unidentified
  REGION 1..1366: note = Description of Unknown: Cas Enzyme sequence
MEKVFGIDLGTNSIGWALREINPELENQLIDKGVLTFEKGVAEEKGNEVPKVKNRTTSRGTRRNYQARRYRKWRLLKLLIEENMCPLTIEELNEWRHYKKGIGRKYPLKNEFINWLRFDFDGNGVPDFERFGFSKHESFYLFRKLIIDETKVEIFKLEPQIIGRVLYQLVQRRGYNDGEDIDENEREELSNTIMNGGGDSGALGVNNIKDYIIKYKTLGAALYEIQKEKNVRIRKRYNLRSDYKKEIEEICRVQNLQHLQKNIMSAIIWQRPLRSQKGLVGICTYEKNKRRCPISHPLYEEYRTWVFINNLKIKPIIKNDIPINKISIEDCLTTIVYPQFFKAADFKLSSIKTALARVGFQITAKFPNDTKVSNLSFLYRIKDVFGEDWEIKTGWFNILNGITKNVQYNIEDLWHIHFNKTDNKHTGESAINFIKRFAKEKLLLDDIQVDSFSKIKLKQGYATLSINAIKKILPYLQKGFIYSEAIYLANLSKVMGAKFKQEDIENYDRILKEIFKQDKEDKKKAEIYNKLITLYFEDKEQFVQNKIAIIEQQLKDSFGKITWEKFSAEKQSIIENNIFNDINSFLAQPKQKIEQHFIKTKRLHDKIFNKLMDEFGLPSENIKYLWHPSEQDTYENAKYFQEINFNNKKYYIEENKVDTFLKKNQSAEKEAFFGKLLGSPIPISKGFKNPMALKTLYYLKNLINYLIKTGKIDTETRVVVEIARELNDANKRKAIELFQKERDNENNNYKKKIEEINQECNTTFDVNDKVLINKIRLWVEQKQQCLYTGKTIKLCDVLDGSKYDIEHTIPVSISFDSELKNLTIADKTYNQQIKIKKLPTECPNYSDDALGFSAILPRLDFIKDKVEHYEDAYDKCKYFAKVAQTKEQKDLNIIKKHIAKMHLEYWQYKLFSFTTNEYKVSWRNSQLRDTQIITKYALHYLKTIFEKVEVQKGIITDEFRRIYKIQNRLEKKDRTKHSHHAIDAAVLTLIPPASIREEILKKYNEAKENNISYHETPRKWHQFQESFIRSIEDEILINFQAEHRTLTPTYKVVRKRGKVQKYIDKDGVKKNIIAKGDTIRGRLHKQSFYGIIKNGDDLNVVERCPISTFLSINDCKHIVDDKIKVIVKSELEKRVAAGTSFEKAKLLPIYFPNSNTIINKVRCKVAAGRGNLTPDKSIPIKMHTFKSKQDYKQFKYAQNDENTLCLYYELNHENKIKRAFKIVGLFELSKLGLKNISAIKQIPAYANIETGRGINKIQLPMVEILMVGTRVIYYKEHLEELKELTLKELSRRTYVIYKFNDVASTKYIYLQSHIEARVDKELGDGETEINIDKYQSRLKLTSEKFYFAIENNHFKLMPDGKIIWNF

SEQ ID NO: 10138 - protein, 1123 aa, unidentified
  REGION 1..1123: note = Description of Unknown: Cas Enzyme sequence
MSRLVLGLDLGEASVGGALLEVNDDDEILKVLWANSRVFSGVVDEKSKITLNAKRRGFRGQRRTIDRRAKRRRNVERALTIIGLLPEDAVERDRVLGRCSPKKEGRFLNPYEIRSRAIGEQVELFEIGRALQHILQRRGFRSNRKAKLADLIAPGSPFAGDEELRQWVRETDESVDVDEETDTMSAQIAGTDARSASQVVDGNESDVALQVDVGDDPRKTLDAINALKERWERSGLSTIGRYLHSLPEGQKKRKVNRLSREWLEDEFDRIWDFQSQFYPDILTTANKSLVRSAFEQRPLKPFRVLLPKRGYVAGVSSNEALRQFRACSLLGSAKPVARRGHWVSHRYRILETLRNLRLVVGDDVRELTPEEFVPLADELQSTPFLTWPKIRERLRVGRAGRFTIEGSKGSPNGIQGNTTEIALKKVFGEKWRADLHLTKDVEHAQLDFMQDLETYFGDPIHLFKLLQKPKSKHNPLYPLSKRQAFDVLCESFSTSTTNLSIQAMRRLHKDMLNGLLPHEAKDLQRAELQPEGKCEELPPPPPLRNPRVHRALTELRKVVNALIKKYGMPDLIRLELATELKETKADRDRVSKLTSDNKKLNKQAEEWFRAQPGQAGSQVSRKDKIKYRLWLQQREICPYCLENIGSTDLLNDTADIDHVLPIRRSGDDSISNKVLAHRDCNARKGDRLPAEVWKPGTKEAKDRLAVIKKTGNRALLRKFQMEKVDEDFVARQLQDTRYITKEAVKYLKQLKMAGIEWGEDRLTVWPTNGQATGFLRRVWELNDLLPPLLTKKEVKAIEEANENGDGAEAEEIKRKNRNDHRHHAIDAIVVALTNPKRFKAAVEAYRGPKEHRPKSKANLYKPDKALIRTVINKAITSHAVNKGIRGALHDGSYYGRKELNGTILYVRRISVKELLKPDAKRPKLEETRKQIEERVYDPDLKRALLQRLSMGDWEEAFSHPPVKLVDGKGSSFLLESVRVNHGLTDLSMLNLPEMPGYVKPNSNHHGEIVRTASGRLELRGVRMIDAARAVRHGETLYGLSIREGEELLQTVAVGEIIEVRGSPLRVSGVTEGSNPEVKFRNPNDARTGSEPGLRRVTSQDDLAAITFKMVSDPLGNLNPFDGP

SEQ ID NO: 10139 - protein, 1016 aa, unidentified
  REGION 1..1016: note = Description of Unknown: Cas Enzyme sequence
MGTIRYRLALDLGSTSLGWAMVRLKGNEPFALIRAGVRIFSDGRDPQKGSSLAVNRREKRAMRRRRDRLLKRKHRMMALLLKHGFFPADTAKRKALELLNPYELRAKGLDNALTPAEFARALFHINQRRGFKSNRKTDKKDNDSGALKTAISTLRQQLDPSGADGKARTVGELLWRRMQAGQEVRSKNKSAKPNKVQYDLYIDRAMIAAEFDALWTKQSALAPSVFNETARADLKDCLLHQRPLKPVQPGRCTLEPNEERAPLALPSQQRFRIYQEVNNLRILRDDLREQPLTREQRDQIVIMLERPKKDKKTAHEVTFDQIRIALNLGGNTKFNLEDAKRTSLKGNSTSSNLSRLHLFGPDWVIWTLERQDEIVWKLLTEESEATLITWLQNEFGFDEIRAEIIANTGLAEGYGSLSRKALARILPLLQAEVVTYDKAVQAAGYEHHSHISHAATGEILPALPYYGEYLQRHVGFGTGNLDDPPEKRYGKIANPTVHIGLNQTRVVVNALIKRYGHPSEVIVEVARDLKQSREQRKEDQEQQTKNQKRNERLRGDAANILQISPERVKHADIQKLILWEELSSDIAERRCPYSGVQIGARMALSDEVEIEHILPFSQTLDDSLNNKTLATRRANRVKGDRTPVQACRDFEREGWIYDAILQRAERMPKNKRYRFGPEGYEKWLREDKDFLARALNDTRHLSRVAREYLSLICPQGTRVIPGRMTAMLRAKFGLNDILGLQGEKNRNDHRHHAVDACVIAVTDQGLLQRFAQASASAREKQLDKLVDAMPLPWPTYREHVARAVRNIWVSHRPDHGYEGAMMEATAYGIRKDGSIKQKTKADGEEGREIKSLIRVCEPKQLQRHGVDADGKPLPYIGYVGGSNYCIEIVSNDKGKWEGEVISTFEAYQLVRQQGLKRLQHPSLSISCKPLVMRLVIGDYIKASFKGDLRLLTVKKIKSNGGVFVAAHQEANVRQREDAKDASLVYGSFTAGSLFKAQGRQVTISPIGELRDPGFKE

SEQ ID NO: 10140 - protein, 1080 aa, unidentified
  REGION 1..1080: note = Description of Unknown: Cas Enzyme sequence
MNWRLGIDLGTNSIGWAAVELSIKGEPVGLLAAGSRIFSDGRDPKSGASLAVGRRDARAMRRRRDRLQQRQRALMKYLIADGLFPVDPTERKALETLDPFALRARALDEALPLPHLGRAIWHLNQRRGFKSNRKTDKPDDDSGKIKMGVGRLQAAIADSGARTFGEWLHSRRQATQDHPEGLSIRTRLRPEEDTDAKGTGYDFYPDRALIEEEFETIWAAQAQHHPAVLTPEVHDRLFEIVFHQRPLKAPPIGTCTFGNGETRLAKANPLFQRRRLLEEVNALKIVRAGEVAQRLTPEQRDLLVLKLKDKAEVSFESMRKTLKLDDDACFNKESENRTKLKGDEVAAVMGGKTRFGNRWAHLSPDEQWAVVERLEAAESDADIVAFRDWIAETYDLSAEAAKAVANARLPQGHGRFGETVTRGLIDALTHERDPDGRVIVYSEAVERLGLHHSDFRTGEIHDSLPYYGEVLDRHVMPGTGNPADPDDRRIGRLTNPTVHIGLNQLRRTVNKLIERFGRPAEIAIELARELKLTDEEKKRRNRENNENRLAAEERSAKLTAIGQLDNGGNRALLKLWQELNPGNVLDRRCIYTGAHISIERLFSGEVEIDHILPFTATLDDSNANKLLCLREANRFKRKRSPWEAWGGTPQWAEIAERASRLPKGKRWRFEPDAMARFSADGGFLARQLVDTQYLSRLARDYLSALYPETGEGSGNVWVSPGRLTEMVRRKLGLNDLLPDHNYAGGADQPKNRLDHRHHAIDAIIIAIVDRGMLNAIARASGLEGQEGRERIQIPAPWDGFREEVAGAVRAIVVSHRPDHGTAGHGTGSTAGRLHNDTAYGLTGETDAKGNAIVVRRKPLGNLKPADIPAIRDPDLRAALFQATEGVSGKAFEQALTRFSKLGPLQFRGIRRVRLTEPLSVIPIRDATGRIYKGYKGDSNYRYDVWEMPDGKWRADVVSMFDAHQPGERARPHPAARRVLSLHQDDIIAIEPDGGERRLMRVVKFGQNGQVTLAAPNEAGDLKRRDAASNDDDPFKYIAPTPGGLKKARARKVGVDEIGRVRDPGFPARTARRATRPKAAE

SEQ ID NO: 10141 - protein, 1010 aa, unidentified
  REGION 1..1010: note = Description of Unknown: Cas Enzyme sequence
MAKILGLDLGTNSIGWAIRDTMAQGNQIIDKGVLTFEKGVAEGKSGEFPMVQKRTESRGKRRNYQAEKYRKWELLKILIENGMCPLSIEQLDEWRHYKKGVGRKYPQTDAFIQWLRFDFDGDGKPDFERFGFDKHESLYVFRMLASGADEQIRKIFQNEPHILGRVLYQLVQRRGFRGRDEEESKTIMEGGGDSGAKGVNEIAPYLEKYRTLGAALYHLQKETGQRIRKRYNLRSDYEQELRAICEVHEIGEDLYKRLWKAIIWQRPLRSQKGLVGICTFERAKSRAPISHPLYEEYRTWVFINNLKIALPAGVNREEYLTHTVYPLFYNTARDFELKKIRDRLKKDGRVIEAKFNDDTKVISCTLLNEFQKLLGADWKEKYGWYEALANKPQSAGYSFEDIWHVLATFDSKEKLKEFALQKLVLSEEDAEQFSKIKLPQGYATLSLAAIKKLLPYLKRGFKYSHAVYLANMHKAMGVQSLNHELAAHLSETFSAIEKQVEHRKKVDEIVGSLIADHQNAAQRWGMDPAYQLDDDDRNDIEKKAIAVLGEKTWEGWKAEEKEEIRQSVVTAYQTYLQQRINTPLAKIFPKKERLHDAIFKHLQETYNLPDGARKLLWHPSEQEKYAKAQEVNGVKFLGDPQPISRGFKNPMALKTLHQLKKLVNYLLQTGKIDEDTRIVIEIARELNDANRRKAIERWQREREKENDEYRKRIQETLTECGVDYDINKELLDKYRLWLEQNRHCLYTGKQIGFCEWFNGNLYDFEHTIPASMSFDNELKNLTLADGLYNKQIKGNRLPTELPNYYDDIMIDGKEYTAIKPRLKFMEEKVEALEKLLDDWVKKTSDDKSIKDAIIQRRHMIRMDLDYWRRKLETFTITEYKAGWRNSQLRDTQVITKYALPYLKTVFNRVDVQKGSVTAAFREIYKIQPRLEKKDRTKHSHHAIDAAVLTLVPPAAIRDKILLRYNEEKDNNRHNTYHEPVRDWRDFRTEHILGIEDDVLINFQPKQRTLT

SEQ ID NO: 10142 - protein, 1111 aa, unidentified
  REGION 1..1111: note = Description of Unknown: Cas Enzyme sequence
  MOD_RES 52..98: note = Any amino acid
MRIKHDFGPLTFGFDIGMASVGWAVLNATQIVDLGVRCFDKAETAKEGESLXXXXXXXXXXXXXXXXXXXXXXXXXXXXXXXXXXXXXXXXXXXXXXXGLIEGKETLYAPRPDLDNPWVLRVNGLDRKLTVDEWARVIYHLCKHRGFFWQSRAEEKKAEGDAKGEGGKVKQGLARTRALLADKGYRSAGEMVLNEFPDAQRNKHGDYGKALSRVLLGDEFRLLFNRQRELGNAYATADLEKELIGTPERRSGLFWLQKPALSGEKLLAMLGKCTFEKNEYRAPKASFTAERHVWLTRLTNVRLIDDGRTRSLNEIEWHTALTLPYESPEKFTYKHLRKVLVKLGASESFRFAGLAYPSARQRDEDNAKDPEIETLVKLPAWHELKAAFKKAELESEWQQISTAAIEGDAKTLDDIAWILSVYKEDDEVVRELRKLNLPNAEKMIDALLDIRFDKFHSLSLKALRNILPHMERGLRYDEACIKAEYHHSQIFKLGEGNKKYLPSLYKGRDNKNRMIFNEDIADIPRNPVVLRALNQARKVLNALIHAYGSPAAVHIEMARELSKPFDERRDIKKDQDEYRARNEKDKSSFASEYGIIGSPRGGDFEKWKLYREQMGKCAYSLDTIDINRLLEEGYVEIDHALPYSRSFDDGKNNKVLALTRENRNKGNRTPYEYLDGASNSERWRNFVGFVESNKAYRVAKRSRLLRKDFGLEESKEFRERNLNDTRYICKFFKNQVEQFLKLHDDSEQKRCVVLSGQLTSFLRARWGLIKVRDESDRHHALDAVVIAACSHDMVKRMSDYSRRRELRHVSDGFVDVTTGEIPNPVMYDKLNEHFPDPWPHFRDEVQVRLKIDDAKLLRQELTRFGSYAPEVINQINGVFVSRAPQRRSGGAAHKETVYGQPERLKKEGSVTEKAALSSITMKDLERAIDPHRNEKLYAAIRARLDAFNGKADKAFAIDNPLRKPDKSGEPTGPVVRTITLVIDKLSGVPVRKGIAKNDTMLRVDVFTKAGKFHLVPVYVHHRATGLPNRAIIQGRDEDEWTLVDDSFAWRFSLYPNDLVRVVQKGKEPAHGYFSSCNRSTGAINLWAHDRNKSTGKDGLIESIGVKTALQV

SEQ ID NO: 10143 - protein, 1265 aa, unidentified
  REGION 1..1265: note = Description of Unknown: Cas Enzyme sequence
MFSQRNNPYCELLQIVRTNIYKYYSYMKKILGLDLGSASIGWAIVSENEENSSNKTQILGMGSRIIPYEGTEGKDFAKGTGESRNALRTKARTARKGYDRYQMRRRSLAEILSINSMMPDEELKALPKIQLWELRNRAVSSNVSLKELGRILLWLNQKRGYKSSRSDSTLDKKETDYVAAVKSRHEKIKELNLTIGQYFYRELKNDESFRVKENIFPREAYIEEYDTICKTQQQYHPELTCEFINKIRNEIIYFQRPLKSQKGLVSVCDFEGFWTEKDGKEIFVGPKVAPKSSPLFQLAKIWENINNIKICSRSGNNIILSPEQNFDIFQYLDNNEKLTLTDLFKILNLKSNDCFVNKQLAKGLQGNITKYAIRQCLDDVNKYEQLLKLKIKVENGKGDGYLYDRKTGEVLSSKPIQFINPCIEKEPLYQLWHTIYSINDEEECSKALQAKFNIEKSIADRMAVIDFSKFGYGNKSAKTIRKILPYLMEGDGYTEAMSYAGYDHSNSLTKDQNLQRKLLDQLKPIPKSSLRQPIVEKILNQMVNVVNAVIEKYGKPEEIRIELARELKQSKEERNDADKAMSKRQRENETIAKRLAEYGLRATRNNILKWRLYEEIDNEDKKLNAVCIYCGQPISLTEAIKGNDVDIEHIIPKSKLFDDSQSNKTLAHRHCNSNKNDQTAYDFMKGKSEQAFNDYVDRVNLLYSNKVIGKAKHDKLLMTESKIPDDFIDRQLRESQYIAKKAREILQSVCHNVWATSGSVTSELRHLWGWDDVTMNLQFEKYKELGLTEIKEWGSDHGKNRHKKEVLKDWSKRDDHRHHAVDALTIACTKQGYIQRFNTLSASKTREDMQFDVDSRSVSFNEKLSLLEKYIISQQPIAVNEVEKAVGNILISFKAGKKVAVLGSRKIGRTGSKKVVQSGIVVPRGSLSEESVYGRIKTKEDKRNLKYLFENPHLIFKPYIKELVEERLSQFDGNSKKAISSLKKDPLFLNKENNLQLEYGTCFKDEYVIKYSVNTNFNKVDKVVDDKIKEILTNRLKKYGGNPKEAFKDVQMEEKKLIKWYEDEGLEYPIKSVRCFTGLSAVVPIKKDDKGKEIGFVKPGNNHHIAIYIDNDGNYVEHVCTFWHAVERKKFCIPVVIKDANKAWDKIDNEPEDSYSDSFLENLPVANLNLRLSMEQNEMFILGMPQEEVNLAVEKNNYNSISNKLYRVQKLGASDYTFRHHLETQIVDDNNALMSKRFYRIRSIGALMALQPIKVKVDRLGNISL

SEQ ID NO: 10144 - protein, 1410 aa, unidentified
  REGION 1..1410: note = Description of Unknown: Cas Enzyme sequence
MEKILGIDLGTNSIGWAIREINNSLANQIIDKGVLIFDKGVAEDKNGEHPKVQKRTESRGKRRNYQAEKYRKWALLECLIKNEMCPLTIEQLDDWRHYKKGIGRKYPQSEKFIQWLRFDFDGDGKPDFERLGYSKHDSYYLFKTLIVDENKKDIFKKEPQIIGRVLYQLVQRRGFNDCDEMDENEKNELSKTIMNGGGDSGALGANEIEPYIEKYKTLGAALYQIQKDHNVRIRKRYNLRSRYEDELKEICRVQEIENLYKLLWSAIIWQRLLRSQKGLVGICTFESNKRRCPISHPLYEEYRTWVFINNLKIDYIDKVVGNSENSTKELNAIIKKEVYPEFFKAAESFKLVVLKKKLNKLGLDITARFPDDTKVVTVSFLYRMKEIFGNDWSDMLGWQDIQLNNPKKAKYNIDDLWHLHFAKTTNKATGESPFDFLKRFALEKLNLENSKAEVYAKIRLQQGYATLSLNAITKILPYLQRGFLYSEAVYLANIAKVLGVSNVSEEVVTHFAEEMRKIMKERFIQKNYLQAINELISDQLFAENRFGMYPSYKLDDADRKEIEGKFVAAFGQTTWEAMDELEKKNANNYVSTKYEEFLQKRIYAKDVFEKTERLHDIIFAWLKNTYNVPQNNIKYLWHPSEQETYRKAPEKDDIKYLGSPEPISKGFKNPMALKTLLRLKKLINYLIETRKIDENTRIVVEIARELNDANKRKAIERWQREREKENIVFKKKIEDINKECNAKFDGNDKNLIDKVRLWEEQKRICLYTGRTIDLCDLFNGSKYDIEHTVPASMSFDNEMKNLTLADKLYNQQIKGKQLPSECPNYATEQTFNGVRYSPIVETLQLVFGQLVEVEKKIKGKRTIIKQFQKIIDLEKEYQEWMDKTSDVKEIKDNIIIKRHYLKMDLDYWRYKLSTFTITEYKAGWRNSQLRDTQIITKYALPYLKTAFKKVDVQKGSITAYFRKIYKIQPRLDKKERTKHSHHAVDAAVLTLIPPSAIRDKIILKYNEAIENNKQYHEKPLNWDNFVTDDVLRIEREVMINYLPDHRTLVSTYKNVRKRGKIQFVKEKLENSRWQYKLDRDGNKIPLVAQGDSVRGQLHQETIFGAILKPKFDQNEKAINVKGEFLHDEKVSFVKRVHLAISAVNGFKYDKKEKDLTKFLKQFEDIIDPQVRNIVLTNINERLNNNCSPESVLIEPIYMLDKNGRNVNQIRRVRVFQGNINPPEIKKIGGSEGVYLSKHKHKQFAYAENTDYVSIACYKAITDGNKEKFHFKPFTALNFAKEKSFPTHEIQEGIEFSLFWELKPGRKVVLLKTKGEKLSELSKDAIRKRVYIVNNVYPAYVKKYEYFYANLNYHLVVVSSSIKLPQMGKSVNFDNPLEAPLVRLNLDPLKSYFAIEGIHFEIMLDGEIIVK

SEQ ID NO: 10145 - protein, 1427 aa, unidentified
  REGION 1..1427: note = Description of Unknown: Cas Enzyme sequence
MKKILGLDLGTNSIGWALVNEAEAENEKSSIIKLGVRVNPLTVDEQQNFEKGKSITTNADRTLKRSMRRNLQRYKLRRENLIEILKEKGFVSNDTILSENGNRTTFETYRLRAKAATEEITLGQFARVLLMINKKRGYKSSRKAKNTEEGVLIDGMEIAKKLYNEDLTPGQYCLHILQSGKKQLPDFYRSDLQEEFDKIFDKHILFYPEILSFELKEELRDKKRDAVWAICAKAFKEKDFELVGTKRQGNTAEQKIENYAWRAKGISEKLDLEQLVVVLQQINIQLNSSSGYLGAISDRSKELYFNKQTVGEYQMAVLDKNPHANLRNMVFYRQDYLDEFNTIWEKQAEFHPELTKELKHEIRDVVIFYQRRLKSQKGLISFCEFESRKIEVEFEGKKKTITVGSRVIPRSSPLFQEFKIWQVLNNIEVFGKGKKSKKQKVATLFSETEDPLEYGGQRELYQEEKELLATELSIKKELKKADVLKLLFDNSKELDMNFTSIQGNLTQAVLFNAYKQIIELSGHEIDVEKNAASAILKSVEEVFNAFGINTEILNFDSDNKLDQQPIYKLWHLLYSFEGDDSKTGNEKLIKKIAEHYGFEKEYAAILANITFQDDYGSLSAKAIQKILPYLNAGNKYDIACNYAGYRHSASSLSKEELDKKVYKERLEILPKNSLRNPVVEKILNQMINVINSIIDAYGKPDEIRIELARELKKNAKEREELTKTIAETTRLHEQYREILSKSPFNLSFISRNDIVRYKLYEELKDNGYKTLYSNTYISPLAVFSGDFDVEHIIPQSRLFDDSFSNKTLELRSINIEKGNKTAYDFIKEKYGETGTDNSLDNYLNRIENLHKSGILKRAKYNKLKMQEKDIPDGFIERDIRDTQYIAKYAKTMLCDLVKFVISTTGSVTERLREDWQLVDVMKELNWGKYNQLGLTEELINEEGHKIRKIKDWTKRNDHRHHAMDALTVAFTKRKFIQYLNNLNARRTNEELGISNTEKENQNQFAITSDDIKLNTRDVLGIEKKELYRNAKGKLLFKPPFALDEFRAEAKRHLENTLISIKAKNKVVTQNINTTKKPGGVNIKIQKTPRGQLHNETIYGSQKKYAVKEEAVNAKFDAEKIATVSKPAYRVALLQRLQQFDNDPKKAFTGSNVLSKKPIWLDELHTKQVPEKVKTVCFETVYTIRKDVSPDLKLEKVVDKNVREKLEVRLKEFNGNAKQAFSNLDENPIWLNKSKGIAIKRVTITGISNGEPLHDKKNKEGKLILDEDGRKQPVDFVSTSNNHHVAIYRDAEGNLQENVISFYEAVSRKNLGLPVIDKEFKASEGRQFLFSMKQNEYFVFPNTVAGFNPNEINLLDPDNYYLISPNLFRVQKIGEKDYWFRHHLETKIIEASKLVETTFKRRRNPKSIENIIKVRINHIGQIVSVGEY

SEQ ID NO: 10146 - protein, 1021 aa, unidentified
  REGION 1..1021: note = Description of Unknown: Cas Enzyme sequence
MAKILGLDLGTNSIGWAVVDAQDEKNPIIDKGSRIFSEGVKIEKGIESSKAAERTRFRSARKLKFRRKIRKINTLKVLIENKMCPLSLDLLQLWKDKKIYPKTDEFIAWQRTHENQNPYYLRAKAIEHKLTPEELGRIFYHLSQRRGFKSNRLEAPSNDELIETYKQHIEQILQNAERIEELVLEFKDYFENFDTEDPKAKTLKNSIEKIVKSWAKNTGLKMDDEKKKIENILNKKENLGPVKKAIRELSEKIEENGFKTMGQYFHTLYIRGERIRTHYTHREEHYEHEFNEICSAQQLPDKIKSDLHKAIFYQRPLRSQKGLVGKCTFEPSKARCAISHPEFEKFRMLCFINNIKIRDNIKSDLRPLNLEERKKIISLFYRRSKPSFEFADIMKELKIKDSDDKIKLVNYSPRTSVSGNSVSAYFKSIFGENWENIAFEYEYKISEGIVKKSKSDIFDIWHVLFTYESNEKLKEYAEQRLRLTPTQTNLFLRTPIKQGYANLSLKAIRKINIFLEEGYIYSFAAFAAKIPDILGEKVWRENKKQIKEQLNDLIDNHNDYKLQKQIVNELIGWHKNEFNNAHSKYLIDETDKKSILDKIISFYGNKTWSKKTELDKSTIVNEITNEFKSLIQNSYVNSYQFAKIDRVDEKIKMYLKSTFNLTDKEINKLYHPSDVEMYQTPKVNPKDGKRYLGSPLVASVKNPVAMKTLHQLRYLINALIKDNIIDEETQVHIELARDLNDANMRKAIETNQRQKETKRKEFYNEIKKLYKDHTGNDIEPTNDEILKYQLWTEQNHICLYTGDNIGISEFIGADPKYDIEHTVPRSLSYDNSQLNLTLCNNRFNRETKKNKIPTELANHSEILPRIDKWKKNINDLHFQLEQTKKAARGASTKEAKDKIIQKRHLLKFEYDYWKGKYNRFVMEDVPEGFKNSQLNDTRIISKFARSYIKTIFGKVFTVKGESTAAFRKLWGIQEYSEKKERVNHIHHAIDAITIACMTKPKYDILAKYYQADEHHNSQEVH

SEQ ID NO: 10147 - protein, 1500 aa, unidentified
  REGION 1..1500: note = Description of Unknown: Cas Enzyme sequence
MKKILGLDLGTNSIGWALVNEGEDEKKEILGIGSRIIPMTQDTLGKFDSGITESQTAVRTSFRGIRRIKERHLLRRERLHRVLHVINFLPEHYENSIDYVKRFGKFKAETEPKLVWKENENGGFEFIFKSSFNEMVEEFKSIQPQLFENDRLIPYDWTIYYLRKKALTNKIEKEELAWLLLNFNQKRGYYQLRGEEEEENPNKLVEFHSLRVVEVTADELQKGKTDIWYNVILENGWIYRRSSKIPLFDWKEKIKDFIVTTDLNDDGTIKVDKDGKEKRSFRAPSEDDWTLVKKKTETDIDRSHKTVGCYIYETLLQNPNQKISGKLVRTIERKFYKKELQAILDKQKEFHAELNNKDLYQACLEELYSKNEAHRNSNADRGFTHLFLNDIIFYQRPLKSKKSLISNCKFEYRLYKDAKSGEYVKDSIKCIAKSHPLYQELRLWKFVQDFRIIEREKMIDGKLKTDVDVTSEFLKNEDDYVTLFEFLNKTKEIKQDTLFSNHFKIKKKKGEEKLSHRWNYVEDKEYPGNETRAQFITRLAKVSNVTADFLDKDKEIALWHILYSVEDKLEIEKALKSYATKNELGDDFIDIFKKFPPFKKEYGAYSEKAIKKLLPLMRKGKYWSESCIDEKTLQRIDKIRTGEWDENMQNRVREKSIHLTEVIHFKGLPEWLASYIVYDRHSEVGDITKWKTPDELEDYLRTFKQHSLRNPIVEQVITETMRTVKDIWKMYGDFSEIHIELGREMKNPADKRKSMTAQISENENTNLRIKSLLAELANHNEVENVRPYSPSQQEILKIYEDGVLKSGIEIPDDIAKIAKTNQPSKSELIRYKLWLEQKYRSPYTGEMIPLAKLFTSAYEIEHIIPQSRYFDDSLSNKVICEAEVNKEKDNALGFEFIKNNEGRIIELSFGKKVKVFTISQYEDFIKQHYSKSRGKMKKLLMEDIPEAFIERQMNDTRYISNVVKGLLSNIVRVEGEQEATSKNVISCTGGVTTILKQDWGLNDVWNRIVTPRFERMNELTQSNSFGQWTNKDGKRVFQTEMPLELQKGFNKKRIDHRHHAMDALVIACATRSHINYLNNESAKPSAKMSRPDLKVKLCFKSKTDSKGNYKWLFYKPWDTFTQDAQFAFENIVVSFKQNLRVINKTVNKYQGYEAGKKVIKTQEMGDSWAIRKPLHKDTVAGLVNLRFKKIVTLSVGIDQWEMLVDKNLKTKIKQLINEGLDKKKIQKFFAEQENKWMGKEIAKVELYYFSNDKDVMVASRVNLDITFNSKKIESITDTGIQQILLKHLSCFDENTGSKTIEHPELAFTPECIEEMNKNMFILNNEKQHQPILKVRTYEPMGNKFSVGNSGNKSSKYVEAAKGTNLFFAIYADEDGKRSYETIQLNIVIERLKQGLGEVPEVNEKGDRLLFHLSPNDLVYVFDDEEVLNGYKTNDIKSERIYKMVSSSSYQCFFVPNNIASPIIQTTELGANNKSEKTWDGKMIKQACLKLKIDRLGNISL

SEQ ID NO: 10148 - protein, 1187 aa, unidentified
  REGION 1..1187: note = Description of Unknown: Cas Enzyme sequence
LERDKAVKNLLSIYFFLNFFTKMNTTIGLDIGTNSVGWAVISPENMENMILGLGTHIFPEGVTEKSKESRNKVRRDARLTRRNLFRFRLRRKSLLNFIQEKIQIPTDFPPQKVYQVYEWRNKAVQERIQVEQLAQIWLLLNARRGFKSSRKDQAKDEKEEKELGKVKGGVESTKKQLEKADVQTIGQLFWRLLYSRPLDFLDEIALLNTLKEGEQKKYFDSENNLGQNQALRRRYVGRKLLEDEFNLIWDKQKAFYPQLLTEENKAILHKIIFFVRPLKSQKGLVGKCEFTGKRRIQKSMIEFEEFRIWQILGNLRLTHFNKDSQQIEIRPLFLEEKKAIFEHCQQKSEGVKIDDIVKKFFKKGFVDATITGLGKKALPSMPTTYRLRAILGQEEFEKALESYHKSNYEEKNQHILFQMWHCANFFDNDEKLAQKAQKDFGFTEAQAKEYIKFNPVDGYGSLSLRATVHILAKMKEGFEYDKACLELGFHHSQKDTEKNTEKKIPTPQNHELRNPVVQRAVTETIRLVNELLKKYPQTNQIKVELVRGLKKTAEERQNIDNKNNAIHERRLKIAQFLTKNSKKIFGYEKDFSLDIFSDKSMISKFELWAELELSDDVVFDRKLAEKFADVSKKIKDEDLDKFHFWLEANRMSVYTGKRIPLSQLFDENKYQIEHILPYKRFRDDSQSNKTISETWFNKDKGNSTPYECIFLRGKNKEKWDEFAARAKHFPKAKANKLLSNKSETDDFLAEQLTDTAYIAKEVRKYLERIKGVEVEVMGGAVTGLVRKAWHLDSLLYPEQRNEEGKTIGLQDDAQQRKNRGDHRHHALDALVVALTNPHKVHQIWAKFCKENPDADYKDFFRKKPNDTYYLPFPYESKQGSFRNEILQALKSILVSRRPEKNLIFRRQDRTIKKQNLERTKQGLPKLPQKYHIGIRGELHEQSNYGKLNPENAPKHIKANKNKDQDIFVIRKALSSLSDKDLGNIMDKTLRETISQHLKNGGSLTDKILMPPDRNGDRIPIRKVRVAVYKSPTSMIELYPNGGKDGSHSKNLFVPSGDNYCLAIYHKQGLDDRHLIINFYEAVQKKIKADSVVPLTYEGRELKFTIRKGDYVLLYDKTPAELEKNWNNKHYLSQKLYRVREFSGYAVYLNWHILAKHQKGDDKVLVEGCPLVKYFNAKEFKGIPVTVN

SEQ ID NO: 10149 - protein, 1528 aa, unidentified
  REGION 1..1528: note = Description of Unknown: Cas Enzyme sequence
MAKILGLDLGRNSIGWAVVEKMGENEKGKILSCGSRIFPEGVENLGQGEREKSLNAQRRESRQTRRGFFRHRLRRIKLLDTLIELQMCPLSIDELKNWKLYDKTKGKSGKQFPHSVAFIQWLKQNPYELRTRALSDNLSLDELGRIFYHLIQRRGFLSSRKEKDTGAIFKGKDDKVGIEETMKKIGNETLGKYLHSILPKHGEPYKTITDEAGKELRVRNRYTLRDMYIAEFKQIWDKQAAQLGLQNKVKRVERQLILKGNLKNKKNQHRLNYLLQKYGNENITMKGNTISISYQKPLEEFFAGKIYTENETLKHKSKDSLLFFQRPLRSQKGLLSKCSFEGKKYFDKKSDKWFVSGPTPCPVSHPVYEEYRAMQFINNIEYGSEKRLDDFQRKNLLDLFNSKKANFEFSEIAKELKMNSEKFNFDMKSKVPANKTTAQIKPLFDEKTWSQNKEQIWHCFYTYNDSDKLIEKLQKDFGLKIKDFDKDFDKVDGISIEEGYSSVSIRAINNILPFLHKGYKFSMAVILGGVRNAFRDTIDGEAYDRWENFAHKHTDIEKNICKIADDKNNKEGEAIERIKKYLIENFSFELESKCFKKLYHHSQDIEVKELKQKVGKVENLRNPVVQQTLNELKRLVNKILTEFRQKYPDFKFDRINVELGRDLKNGKIKRQQIQKVINENTELNEKAREKLTEFGLSHTRDNIQKFLLYDEIQKRNGIAICPYTNKTIGLNDLLGRDNKFQIEHIVPLSTSLDDSFGNKTLCDAKFNGMKGNLTPYEFYQKNQDAAIWGAKTWDEIRERAFKLLPYNKAKRFSMEKIAEKSNFIERQLNDTRYISRKAKEILSEICTDVRVLPGTLTAELRHLWGLNNILQPAETLSFSGIEIDSREPVRHWVEFDENNTPVGFYPLQNKRPQLKENQTFICGHIFKNQFSDRSINNIIETHNKADGKYWLPIRILGSPIDIVNVYAPKPETDESKIVLKGKINNKKFENDSIALKPFADAANGMYWGVFDIAKITFVLPEKNAKPKSNSKQVVLYGDVKSGVFKSYIFSCKAMQPEGNIWAIIDLNFDKPQYINYFMPRPEIDNQSVVIEGTVNTEGIFTSDTDYNFHFETTQPAGKYRALFNFDFDILDLAPVVNLPPTIDNKHSIMEGSIWVDKQGEIKFDPKKNREDQRHHAIDAVAIAVSEQSYLQKLSSYSANKAEKMRNNPHDKPEFDEPWVGFANDVKKAANEILISYRKSDKVLTKIKKRIVKNNVKRISIGAAPADQLHKEFVYGKRQAPSEKEVSFHIRKSLTDLKTNKHVDKIADNTIRTIIEQHLKDKFSIDISKPYKIPNNAFFDNGKPLVFLPNKKGEPVPIKKVRLCENIGNAVKLKNTEVWAENKADNVELNQYVNPRNNHHVALYKDKNGNMIEKIVTFWEAVALQKKSLPVINTNSVDGYEFVVSLQINDMFLIGLKDVLDIEFYSKSELLKHLYRVQKLSSMYYTFRHHLASTLDNQEQEIRIQSFKAWLETSPIKVEIDILGNIKPI

SEQ ID NO: 10150 - protein, 1141 aa, unidentified
  REGION 1..1141: note = Description of Unknown: Cas Enzyme sequence
ESLNLHFENLLLLGFIEKTILQLKKSFSSYWFRSAFYSLLQRFSLTLFGLASFLILIRSLSIPQMATWALFLTIITLLENTKGALLKNAHIKYVSEDKEGKEKRSFRSPGTDDWTLVKKKTEAEIERTKHTVGTYIYDTLLQSPGQKIKGKLVRTIERKFYREELKLILDKQQTFHPELQDRKNYAACLEELYQNNQDHRNTYGQKDFTHLFINDIIFYQRTLKSKKSEISECRYESRSYLDKEGITQTDALKCIARSHPLFQEFRLWQFLQNLTIYQREKYIDGRLYTDINVTAELLKSEDDWVALFDFLNDRKEIDQKAFLKYPAFNLKKNVELYRWNYVEDKTYPANETRSQMLSKLKASNIASEFLTKDIEEHLWQILSSIDDKAEIEKALTTFAGKRGLPKEFIENFKKFAPFKKEYGAYSAKTIKKLLPLMRRGKYWSEEAISKETKSRISAIVERLDSIDYDKSKIANITDDDIPKQVLKSFIECRNPLTALNTYQACYAVYGRHSEEGEVVKWEAPTDLEHYLNHTFKQHSLRNPIVEQVVTETLRVVADIWKQFGNGEKDFFDEIHIELGREMKNTAEQRKRLTSVVTENENTNLRIKALLAELKNDNTVQNVRPYSPSQQEILKLYEEGVLSAVTDIPDEILKISKNAQPTSSELTRYKLWLDQQYRSPYTGEIIPLGKLFTSSYEIEHIIPQSRYFDDSLSNKVICESVVNKDKDNKTAYAYIKEQHGKIIELDFGKKVTLFTLDAYEDFVKNRFAKNRSKMNKLLMEDIPDDFINRQLNDTKYISKLIKNLLSNIVREEGEVETTSKNIAACNGSITSTLKQDWGLNDIWNELITPRFERLNDLTKSNNFGHWTNKDGKRVFQTEMPLELQKGFTKKRIDHRHHAMDALVIACASRSHINYLNNESAKSTSKETRYDLKQKLCFKTKPDENGNYKWSFYKPWDTFTQDARHTLSTTIVSFKQNIRVINKTSNWYQRWETQEDGSLKKVFTKQETGDHWAIRKPMHKETVAGLVQLRFKKTVQLSAALDLWDMIVDKSLKNQIKTLVKQGFDKTKLRKFFKELEDKWDGNSISKVEIYYFEKEMVASRSSINEAYNTNFIKSITDTASQKIMFNHLEKYNETKDGKVIEH

SEQ ID NO: 10151 - protein, 366 aa, unidentified
  REGION 1..366: note = Description of Unknown: Cas Enzyme sequence
MGKETIKLTRKIQLLVDAPTKEERKEALDTLYRWQNRSYRAGNLIVTHQYIQEMIKDFFYLSEGIRYRLVDEKKAEDGILNRSKSNCTYRVVSDRFKGEVPTNILANMNYNIMNNFNKNLVQYRRGERSLANFRRDIPFPFGTIGIHGLSYKKEKKAFCFRLFSIPFKTYLGKDYTDKRSLLEQVVSGNIKLCTSKIQLNKGKIYWLAVFEVAKEKHNLKPEVIAEASLSLEHPIIVKSRKATLSIGSREEFLYRRLAIQAALKRAQNATAYCRSGKGRKRKTKAVERFHEKEKNYVSNRLHVYSRKLIDFCIKHEAGTLILLNQEDKMEIAKKENGFVLRNWNYYELMTKIKYKAEKAGIELIVD

SEQ ID NO: 10152 - protein, 1409 aa, unidentified
  REGION 1..1409: note = Description of Unknown: Cas Enzyme sequence
MGNRNPTKIFIVNFKMLKIKRMKRILGLDLGTNSIGWALVNEAENEKEISKIIKLGVRVNPLTIDEKTNFEKGRPLSTNADRTLKRGARRNLQRYKLRRENLIEILIENHIITKETPLTEIGKDTTHQTLSLRAKAARERIDLEDFAKVLLAINKKRGYKSSRKASNDEEGQAIDGMAIAKELYERGITPGQYVLELLENDRKYIPDFYRSDLKQEFNKIWSNQKTFYPEILTDELFKELDGKNKSQTWAICQKPFNIKGIKRITKGREKTIENYHWRVKGLSGKLDLEQLAIILQEINNDINQSSGYLGGISDRSKKLYINKETVGEFLYKQIAKDPHTSLKNQVFYRQDYLDEFEQIWKTQSNFNANLTDELKQEIRDVIIFYQRKIKSQKSLISFCQFESWEQEYFDKETGKAKTRIVGRRVIPKSSPLFQEFKIWQNLNHLVFTNSETDEKIEIKEVEQEIRKELFEELNLRGDLNPKDLLRILRSQFKIGKLSNWKCNFEKIEGNRTNAALFNIYQKISDFEGYGIDWNKSNAKIIRKELKATFPEIGIDASILEFDAYKKQLTNQSSYELWHLLYSAEEDFKISEHDKLIYGNSSVSLKKKLHLKFGFNPEYAKMLANLSLMSDYGNLSAKAIKKILPYLEDGHLYSEACRLAGYNHSKSLTAEELDNFEPKAKLDLLKKNSLRNPVVEKILNQMVNVVNQVIDTYGKPDGVRIELARELKKSAKERAEMTKGIADGTRRNEEIKKIITQKFGIPNPTKSDVVRYRLWQELESRGYKDIFTDKYISPDKIFSSEIDIEHIIPKALLFDDSFSNKTLSFRNVNLKKANRTALDFITQDYQSDLEAYKERVETLNKDNHISKGKRNKLLMYLKDIPDGFIERDLRNSQYIARKAKRMLYEVFPNEVLATSGSITDKLRSDWDLINVMKELNLPKYKALGLTEYEERLDKGTEELFKHEVIKDWTKRNDHRHHAMDALAVAFTTHNHIQYINNLNARRDVTQDNHPIIKNIENLITEVNSKGKRVFKAPMSSFRENAKEQIEAILVSFKNKNKVVTKNINKTKKEGGFNYQKAKTPRGQLHKETIYGKSKQPLEKPVKINSRFSKKQAGLIINFKEHETVLHHLKKYDNNEKIAFSNKTLKSDPIQVNGSPLREVKIFEEIFTIRKDINPDNFKTQKHLDKIIDKGIKEVMKKRLEEYNGDFKTAFSDLDKNPIWLNQSKGITIKRATISGVSNAEPLHQAKDHFGNIILDDKGKEIPTDYVSTGNNHHVAIYQDESGNLQEEVVSFYEAVIRKNQDQPIIKKQHPKGWKFLFSLKQNEMFVIPSENFNPNEIDLLDEKNAAIISPNLFRVQKIATKNYMFRHHLETEVTNNLDFTYKHFQATEWLRNLCKVRIDHIGRIVQIGEY

SEQ ID NO: 10153 - protein, 1354 aa, unidentified
  REGION 1..1354: note = Description of Unknown: Cas Enzyme sequence
MKKILGLDLGTNSIGWALVEINENGIPIRIIAMGSRIISLTSDDRDQFTKGQAISKNQDRTKVRTQRKGYDRKQLKKSDDFKYSLKKILEIYGIYPDKELFNIPMIDLWQLRSKAASEPILPEQLGRILYMLNQKRGYKSARSEANQDKKDTDFVAEIKGRYAQLRDKEQTVGQHFYNELACASQNNTYYRIKEKVYPREAYIDEFDTIINLQKDAHRFLTDDVIETLRNEIIYYQRKLKSQKGLVSECEFESKIIEYKQDEFIIKECPFIDFRNKKITILNHYGIKIRIEENLVNDLFEKINESSQLNLQAFKSFLHISDTQKLFYKLYQRVAPKTSPLFQLCKTWEVVNNISLKIKNLEGSKYKWSDRVPTLKEKDQIADYLFHHSNLSFTELLNILNLKKENVYLNKQIFKGIQGNITYSEIHTIIGDSEHLAFNISIVPNTHNAILVDKKTGEILEEKDALQVDASIEREPFYQLWHTIYSINDLEECKKALIKRFGFDEAISDKLSRIDFNKQGFGNKSNKSMRKILPYLMQGYNYADACSFAGYNHSNSLTKDEQAKLETKDKLELLPKNSLRQPVVEKILNQMINVVNALILEYSEKDENGTIVKYWKPDEIRVELARELKQSKEDRNDSTLNNTANEVINKEIENRLKELGLKTTKRFIEKYKLIFPIRTVIDGKTGKALPKKLKDAVVTNQCIYCGKSFSLTEALTGNNFDVDHIVPKDLLPIDNSLTNKVLVHRHCNATKTNQTAYDYIAKQGETALQHYIERVDDWNKRGIISYGKMLRLKVSYEEYLERKKKHKETEADKKLWEDFLARDLKATQYIARKSTEILKQVCNNVTTTGGIVTSKLRKLWGWDDVLMNLQLPKYKELEEKTGQKFTQIKEWESEYGKRKHQTEEIIGWSKRDDHRHHAIDALVVACTKQGFIQRINTLNASETKDEMQKEIDSSKLKYGKHYDESILTATNEIVQNHSGRLTKLDEYIINQKPFSTAVVMKEADKILISFKAGKKVATISKYKATGKNEKTGVITPRGALHEAGLYGRISLTQKGGIKEDHIIKKYKVGISAQDHIFTGKETYSVKIDKNGNRKIEDKIEIVLNSIVDKKIREIVLNKLNEGFTDNQDYRNDVKKAFDNFRNLEDKPLWYNECKGIKILSIKMKTGLKNDSVVPLRTDENGKKITFVKTGNNHHVAIYENKVGSLSEHLCTFWNAVERKKYNIPYIIKDTHEMWNSLLNKDLPESFLNKLPSDNLKLRFSIQQNEMFILEMTNDDFEQALKENKKALLSRHLYCVKNISESQYRLSNHLETKFDVSQMNKSHNRFLNIRSVTALIKLNPIKVRLNHLGEITKVGE

SEQ ID NO: 10154 - protein, 1139 aa, unidentified
  REGION 1..1139: note = Description of Unknown: Cas Enzyme sequence
MSKKILSLDLGITSIGYSILEEKEYNKYSLIDYGISMFDKATDEKGNSKKLLHSAVTSQKRLYDLRKKRKQKLANLFEEFVLGNSNDFIEQEKQNIYKNKWELRAKEIFERKLNIGEFFTIFYHIAKHRGYKSLDSGDLLEELCEELDIPFNTTKTTKKDDEKGKIKQALKTIEELRTKYPKKTVAQIIYEVEIKKDNPTFRNHDNYNYMIRREHIDQEIENLVLVQKKFGLFDDNFDDKKFTTELKQIITKQNQSTNDLSLYGDCEYYQDYKVSHQYSIVSDIFKMYQNVSNIIFNKNTKITKEQINTIANDFFNKIKKGKNISEIKYKDIRDILKLEDDIKIANKEDTYLDKKGKKVHHTITKFHFLNNLSKFDNTFIIKNLEDENGLKNLADIFEIVTRTKNPKAIYEKLKDKIDDKTIIELIKNKSGNSLKISSYAMLKFIPYFKQGFTIDEIKEKLNLNRCEDYSSFKKGIKYLHINQFEDDDNLEINNHPVKYVVSAVLRVVKHLHNTYGAFDEIKVESTRELSLPTKEQVSKAKKDGKALTKGQKSRESIDKANREFEKQKQDILNNKEYQKIAQHYGKNLNKYIRKILLWQEQEFLDIYSGKTIGKEDIFENRVDIDHIVPQSVGGLYVKHNLVLIFRDTNLQKSNQLPLNFIQDKQSFINRVEYLFKNYKINWKKRKNLLATTLDETVKDTFESKSLRATSYIEALTAQILKRYYPFPSKEHQKNGRAVSHIQGRATSNMRKFLDIKTKTRDTNIHHSIDAILIGLINKSWLQKISNTFRQNFGIIDEKARENIKKELPTIEGVEPKEIVKMIEDNYNIYGEDSIFYKDIFGKTKVVNFWVSKKPMVSKIHKDTIYSKKANGIFTVRENIINNFIALKVTATDKKVTTSQEFEDNFKKNILNKMYLFKTNPKDKVCIAIQQRANEIKALLSSFEELDFKNKEEQSQAKTKLDNLIHSDIFDNNNKPIRKVKFYQTNLTGFDIRGGIATKEKTFIGFKANLENKKLKYERIDIANFDKIKKQNDNSFKVFKNDIVFFVYKNRSFKGGTVVSFDINFINPKYPSPIKFQPDSFVEINKKTGLRNGNRASCSFKSAIGIIKLNLDILGNIKSYSLIGDCKSEILDFIKDNIRK

SEQ ID NO: 10155 - protein, 1230 aa, unidentified
  REGION 1..1230: note = Description of Unknown: Cas Enzyme sequence
VLTGLVTCLEQKALTEVRAKASESLRHKALLRKGDKKSIFSHPKYTVGKCILRTCTTDFLSITMERGLGLDVGANSIGWAVIESNGTDGHILGCGVYVFPEGVENLGQGEREISLNATRRSARQRRRQLYHRKLRKRALLKLMGDAGLCPSLSPEELRTWQNTGTFPERPEFLQWLKLNPYQLRRRATTEKVSLFELGRIFYHIAQRRGFPSKSRSAASDDRSVIEDGDPKSGKIGIAQTKKLLESNGHPTLGAALGALYPPDGKPFSNRYTRIRNRYTDRQMYIDEFEYIWSVQEPYYPDVLTEELKTALGGRRIDGYKRDGILFFQRPLRSQKHLVGRCSFEPSKPRCQKSHPLYERFRAYQTANNIRCNDLPLTADERENIVRLLLTKKQITFAKIRKALKKTSAEFIFNYDDTDTFVGSPTTAVLSSKNIFGARWFELSDDEQHKIWHALQSFDNVEKLAEHARTHFQLSDNAAQAYAQVRLVDGYASLSLKAIRLITPFLEQGYPYHIAYALAGVRRAFGNEQWNALDPTEKKTLCDSVESIISTSTTGGYIEKLRSFLQERYGLSERALQKLAHHSSIASAAQLLERIPTDKNYTSTILSWRNPIVSNVMFALRRLVNELLERFGPFDQTVIELARDLKLSKKQRAAIRQEQKRNEYIRQNIKQLLENNGIEPTAENILRYRLWLECEKQCPYSGRTISFDQLYSGQIQIEHIIPYDRSLDDSYLNKTLCFSDINRKKGNRTPYEFFIQDYGPDHWNKVKEHLNKIFTPKRRWDNDDCLNYFPDRRRKYERFIAEKLPEGFASRQLNDTRIASRRAREMLELVCPSVHTALGPATAKLRRFWGLERVLSTNDNTADSKERSDHRHHALDAIVLACTRQSHIQMLSTASARQRNIEKPIHLPWNSFRQDVMDALAGCIVVHHRSDRVLTRRRVHVTIGTTTRTYRSIVACGQLHKETFYGLHTDPETGKQFYHVRVPLQELKKRKDVEEIVDPTIRKLVQQRIEELGGYRNDAVPNTFFETTPEGSPKPTIFLPNRRGDMVPVYKVRTRRTISNAIPHRKGTNRYVDPSNNHHAIIYRLPNGALELNVVQFWEAVQRKLRGEPLYQVPSNCELVMTLHINDMVLLGCTDELLERIWQNYPPQERCREIMPYLHKVQKLSYSNNRGFELCFRHHTDARPSTIAQHDYVLIRNWGTGKQGWYTYNPIKLRITPSGLCFRWDESSATS

SEQ ID NO: 10156 - protein, 1525 aa, unidentified
  REGION 1..1525: note = Description of Unknown: Cas Enzyme sequence
MITLGLDLGTNSIGWAIVDEGNKNIVDSGVRIFPEGLEPDTIGSGDREKSKNAARRESRQRRRHYFRKRWRKVKLLETLIRYDMCPLNYEELKPWKNWSPKEKSEGRQFPESKEFIEWLKLNPYDLRAKAVHEDIDLREFGRILYHMIQRRGFLSSRKDKDTGAIYKGDDEKAGINETLAKKGDKTLGEFLNEIRPKDNQPFQLITDNDGKEERVRARYTLRKMYIEEFERIWQQQAEHLDLETKTASYTKTRYLEGKAKNSRNSFKIDYLQRTKGAENVEVRELDIDGATMTEVKTKEEIPLKEFLGGSIWWEDGELKFKSNESILFWQRPLRSQKSLLSKCSIESREFFDKSKNEWITIGPTPSPISHPDFERFRAWKFVNTVDIASVKSDPLKSTLTDEQRQKVYEVFNQKQKKKFGEIPKKLELTFDKFNYSDDTYLPHNKTISQLKPLFDEVKWNNHYQDIWHCFYFYDDNDKLFEKITKDYGAKVENPDELDKIKLEDGYAGVSLKAIRNILPFMEKGYKESTAVVLGGVKNAFGDRWEYFKTSHDEIESRVVKILRSPENKEGEAIEKIKQFLSDEDNGFSFKPNDKAFNKLYHHSQQVTDKVKHYKIPEVENLRNPIVQHAVNELRRLVNELIDKYGSFDHIHVEMGRNVKAGKAKRQEMTFQINENRKKNDEAREKLTEFGLSHTRDNVQKYLLFKEIQDKAGNVVCPYTNKTVSPSSLLGPSNAFQIEHIIPRSISLDDSFANKTLCDAKFNQLKGEKTPYQFYKENSDPNLWGGSKSWEEVAYRAFRVLPYGKAKRFTAKKDFESTDFIQRQLNDTRYISKQAKDILSKICDDVRVMPGSVTSELRHLWGLNNVLQPVKEVKLDVKTNEKEAVPHYAVLDENKKVKYALPFYNELPRAAEDDLTVAGYITKEKEFKSKYLEFSTAVEELDPGSYWAKLKVGNDPRLIKRYADRPETDEEHIALLGQVNKEKFSHNSLAKNLPAVGLDGSKKYYANFKVLDKELEPAEASKRPKAKKDELLLYGQVNGGQFKSYIYQCQTNLPDDAYWLKLKLDFEEVEFIPSETPKPEFDKDKQILISASVDSDGQLSTHVDQRFTLETSNDPGIYWCIFDIKESPYDFTKMKNEPPKVSADEKLVEGNIWVDGNGEIRFDPKKNREDQRHHAIDAIAVALAKQSYLQQLSTYYGNKDEQNRGNEAEKPTFEEPWSNFRADVEDSVSKILVSYTKQNGDLKKVTKSIIKDGYKRKSIGYAVRGQLHKDFVFGKRKPELKEEAYHIRKSLNSITKATHVEKIVDDKIRKLIINHLKETGVDTNDPKYTIPKDAFFKDGKPRVFLPNKRGEPVPIKKVRIREHLGNAENVKPSKDINKYVNPRNNHHVLIYEDENGELHEDVKTLWEVVERRMNKEPVYKLPPAKNLMHVPKRIVQVLEINDLFILGLSDEEFESYKNNHSLLSKHLYRVQKISSKFYDFRYHLASTLDNKEEEIYIRSFGKSKTGWYSYNPIKVKLDRLGNITQA

SEQ ID NO: 10157 - protein, 1079 aa, unidentified
  REGION 1..1079: note = Description of Unknown: Cas Enzyme sequence
MEIEKSGNVSVGLDIGANSIGWTVFSCAGKDEGDYKQMTGLLDAGVRVFEEGVEGGLDALQKGQEQSKNTARREKRQIRRQLERRAMRTFKVFRLLREQGLLPEGSGPAAEEGMSDRQKTTLERAQREEVLQALDRELLEKWKAKLEKENSPEEEVLLLPKRFHYVLRARALDEKLSEYELGRVFYHLGQRRGFESNRKVSKKDEDKGTVKKEIERLSQDISRQGARTLGEYYSWLDPDDHRIRNRWTGRQMYKHEFEAIWEAQKEHHPSILTDDFKDKLEKAVFSQRPLKSQKALVGPCEYEKGKPRAPKACLEFQRFRILKQVNNAMIQDKDFRKRDLTEEQRKALIEELEKRPKLTLKQAKNVIGIKSNEKFNYEGGTFTSFMGNTTASKIRDAIGEKWDALSGPDKYKLVEDLLSIKKEEALIKRAMNFWGLTEEEAKKLAETEPEDGYCHLSRKAINKLLPLLEKGIREMEAVNVTFDPEPPVPHDFLPPVKKAMPEIRNPAVERVLTELRKVINAIVREYGKPAAIKVEMARDMKKSRNQRKEISNKNLKNQKKRENARHELKKIMNTEEPKRRDIEKYLLWEECKKQCPYTGQYISAEALFSQNSRFDIEHIIPFNKSFDNSFLNKTLCENEENRRKGDRTPWQAYSGNPQKYEQILKRAQEFQGDAAEEKLRRFMMEDDELEEYIGSFKKRQLNDTRYASKLAVNYLGMLYGEVIDEEGTRRVHVSNGEITHHVRNALGMNSILNDGGIKTREDHRHHAVDAAAVTLISQGLIQAMSNAAKKADRTAGHHLFTPIEEPWEDFLQDLKKTIDNITVSHRVSKKANGPLHEETNYSPTGYDEKGKPYVHVRKPLEKMSKNDVENIVDPVIKKAVKEKLQELPKPDAKLFQDPENLPALKAGDGRKIPIKKARIKKSASPMTVGAGPRERHVSPGSNHHVEIFEVKDKKGKVKWDGEVVSRFEAMRRKKDKEPIVKKDHGPDKKFIFSLALGEVIEIDEENGKRGLYVIRGVTPAKISNKLMPRLSFAKINDARLKKEIIAAKEWSTSLLDPLRKLNCRKVTVDPLGRVRPAND

SEQ ID NO: 10158 - protein, 1275 aa, unidentified
  REGION 1..1275: note = Description of Unknown: Cas Enzyme sequence
  MOD_RES 3..20: note = Any amino acid
MDXXXXXXXXXXXXXXXXXXPKLSDEELDLWRYKKIYPQNPQFRNWWLTDDKENKHPYFFRSLAITQKLDLNKENDRHKLGRAFYHMSQRRGFLSNRLDTTPENENGKVKSSIKELHQKKGNKTLGQYFYEDCYLKGKKIRDQYTHREEDYLDEFNRICEFQNIPQEIKTKLHKAIFYQRPLKSQKGLIGKCVFESNKPRCSVSRPEFEEYRMLCFINNIKIKTPNDDKLRSLNDEEREKVFPLFFRKSKEHFDFEDIAKQLAPKKQYKFYKDNNKKPEDYLFNFSMKTTVSGCPVSARFKEIFGDIFIDEAYTYTKDNTGKTPKIINDAWHALYTFDSDKKLKEFAQKRLGLNEEQSSIFSEKIHLKQDYASLSLKAINKITPYLKEGLIYSHAVFLANMEDVVPAHIWKDDDNKQLIRNEIKRIILNQNDDKLISNTVNGFITKAKRNNEIWSEEAKDLLFQDLEKQIRKAYGAIRYDAFSDTRKAQIKEKSEKLLSQNMQKDYGKGEHIKAYRIDDAVTTFLKDNFGDIRTDKIYHPSAVETYKPAQRKKDGKLYLGSPMTASVRNPMAMRALHQLRIVVNELIKEGIIDTSTKINIEMSRGLLNANERAGLRKWQDEREKKRKSYAQKIKEFFTNDYTPSEDEILKYQLWEEQKHICLYTGKTINLEDFLGSNPKFDIEHTIPRSLSYDNSQINKTLCDSNFNRAIKKNAIPFELSNHSEILSRIEHWKKDIEKLDKEIEKTVRQARGAVDKAQKDRAIQTRHKLTNERNYWRNKYDRFTRKDVPDGFKNSQMVDIGIITKYSRLYLQTVFSKVYTVKGSTVADFRKIWGLQNNYTKKARINHVHHCIDAVTIACMDKSNYETLAKFYHDWEEFHTAGTDKLPQVKKPWRTFTEDVLNFENEILVSHYTPDNLPKQSKKKLRKRGKIQYNEKGKPIYQQGDTVRGSLHKETFYGAIEREVTNKKGETEKQIKYVVRKSLDGLEDSALKNIVDEKVREIVINARKAEKLIQKEIDALTKKRKKAEEWEETEIDNEVEKLKSQITALYSLPNKNGAPIPIKKVRLYQPTVTNPLHIKAQRDKSTKGRKEYKEHFHVANDGNYLMAIYEGKDAKGKTIRDFELVNNLDAGEFFKLSVKKDLKGQELGKLEGLVPKTKTTKKIEIPLKAVIKVGTMVILWENSPEEVWEFDQKEIKRRYYKIVGMSIQRIKSGQKTYDFGIITMRHQQEASAASDLKTQDGAFKHDEEYMAQRKMNHNQFNALIEGIDFSISPLG

SEQ ID NO: 10159 - protein, 1411 aa, unidentified
  REGION 1..1411: note = Description of Unknown: Cas Enzyme sequence
MNKLSIAINIGAKNNGIFVIKSCNNKIIDKKAAYITIDKNSINFSKKSRRENRHKNRNNKRKKLAKTLLKELINFSKYDKDQQEKLLGLLNNRGYTFISTKVEFKCLNEQSVNFNKKYLKGISSLKTKEEFEEYFANEFEDECSLLQFLKKYSELIIKYLNDLGNFLKKRKILKDLEAIKSNNIPKKFQNFSYVKHILHKYNYIGKNEKEIMINLTREDFDNSNIDFEKELNYINNLNFTGLDKNNIKYIQADLKKLLDFFVNIYKEIETGSKPRKKYLKEIKNEIRTFHFIQEKEKLYNLVGNISNMQLKVLRKFFNYSSFHKDRFKILDRYFKAFHYNSDDEKIRKKELFKYLKQYTNFEDFLKNTNPILTIPPYEDMNNRNTYKCNTMLINPSKITDDLKVAIDEILKNEYFSSLLISNEGEFKKEKEFRVKPKTNNKYEKIDFTYSKYLQRILDARSNITTKELNPRNVFKYKKVINEKNISAVEEFKKVFGEKIYFTLEKFALRYYKEEELIKNGLYEESNSVFIKCNSNTPHKNNAKHIMLKPLYSYNFTPEESESFINNIVKTRGLKGFLQLISEEAKKYQNSFCNVLISCYQNEKYIDDKNIKKIVNNLPKTLDLIKNILHKLNIDQSIFEDIEKIDITNIKRIVNIFKQTYEILFKQLSGFNKTCKHCTRENAIRSDKKFVLCRKLLSDITKPFDGMLDMILDRVSYEIISFIDEKKLDDIDLIEIILKQNKIEFEMNLNEIKRYNNPLIKKYSIENENRLKSNYCPYTGKRFEIGDYDFILNQEDNFNKSKANIIYASIEGIASKQNKNYRLEDLNIEHLRDIFKTSNINEIIKKIRKGLFSINKDEFKNFDNLNISQQIAVRYALFMRDSLEFEKAFEIIKMDKLKTIINGKQKRVSKIIYKKLLQNYFDKMERIEVNVKAIDNELVGATRNLLALSNESLRKEKDQKKHSHCIDAMVAFYLSNLEIEPTFDFNDIYSNESLIRNVSKNKTFINSTFKERRSIPLFKETIYAENFYIIEKKKDKFYSKGKELKGKNVKLLVEHKILYKNIKNKKYFFNNIKEIKICDKCKIDISKLSNLLYIFFINKDKNSIDQLKFLDNLRYNTIRKDIANIFFDDKGTKLLDFEKVKDIPPFSKNLFKAVYKKLKNTPNLFRINSDNNQFLNYDILENILKNMFESKQKEDNKQKRKRAKKKEKYTLPCLGKNAQYKVKRGDVWQILGGKKIATKSYIINNDIKPIPYFTKNVLPLKICDLSNCLLLERDAKPIYEVSVDMSNFKEIKELTYFITEASRYTVKVVFNKKYFSDIQFDKIKTFDCAKDEIFKNFVDNYIESNLEYTNYINSMRNNKFDKKGDGENKELKAVATLLTNNKTEISLLYKVEKNNFKKQVILDTFYKNKREI

SEQ ID NO: 10160 - protein, 1051 aa, unidentified
  REGION 1..1051: note = Description of Unknown: Cas Enzyme sequence
MAWRLALDMGTNSLGWAAFDLSNSGEVTTLKDAGVRIFSDGREPSANGRVGESLAVERRLARGARRNRDRRLARKNQLLERFVMLGLMPEAIAKRKVLEALDPYQLRSAAIERTLSPHELGRALFHINQRRGFLSNRKSDGNDEETGKIKPKISELRAALNGQTLGQWLYDRLQNGKPVRFRGHDGDLYPDRAMYLQEFNAIRNRQEPHHDLSPNDWDDLRNGNKEQRFDGIFFQRKLKPVERGRCQFFINEYRAHKDLPIAQEFRILQEVANLQYYGDDHQKFELNGDQRSRLLQCLDTQKTLSFNAIRKLKKSDDGFLFPRGCLFNLETGPRDKLNGNSTAIDMRKPDMFGDHWDKMSPDDRNDILEVLHDAEDDEQLIEDLMARFLVSENQAKSISKFTLSSATTHLSRKFMTRCAEIMRQTGKRYDEAVLDVWDDDGVLQHHSHREVDQLLEKLPYYGALLRGSTIGGKPADFDAEKYPEQHYGKINNPTVHVALNQLRKLVNVLADRFGPPTEIHVELVRDLKKTAKAREEISKQNRAFAKANERRATLFRDINGGRDPSGLDLKKIQLWEELGPDQLTRHCPFSGRVISAAMLFNGEAEIEHILPFSRTLDGSAANLTVSIRQANRLKGNQTPHEAFADNQHAHNGMVWSEIAERVKSLPRNKRQRFDADAMDRFNQEGGFIARQLTDNAYISKVTKRYLSHICDQNRIATIPGGLTAMMRGKWQLNGLLGDHNRKERNDHRHHIIDAFVVGLTDRGTLNQVSRHTSRGTDDRVHIKLPDITPLHDQLRDRLDSIIVSYKPDHGVNGKMFKETAYGLVAEDKMDADLPGHALVTRKKIESLTEKEVSAIRNQGWRTRLLTQVDNARSKAGKLDENALAKVLAKFGRVNNIKTMRILVSNQSAIRISSAPWKAYAPESFVCVDIWQIPKGKPGKWKVGECEWHGAFWSYAECKGETPDKNNGSIKGVPIHPAAKFISRLFKNDLVELLEGGQSKIMKVAGFSTTNNKIDLRPQYETDGKQTYISINALRATFRKNLRISEDGRPRG

SEQ ID NO: 10161 - protein, 945 aa, unidentified
  REGION 1..945: note = Description of Unknown: Cas Enzyme sequence
MQRYRLGLDVGTNSLGWAVVELNDDNDIVGVIDMGSRIFSDGRKPTNKQSLAVDRRIARQARRRRDRFIRRRQRLMRQLVEFNLFPSSELDRKALEEIDPWEIRARALDEKVSLPELARAIFHLNQRRGFKSGRIQEADGDNEGGMVKDAIKRTADEMMNAKVRTLGEYLYYRKEDNLSVRARPSSDGSSYSLYVDRSMIEKEFDLLWASQQRFHGSVELSQAAFDALKDTILYQRPLKPVDPGWCSYEEGEHRAPLALPMSQQFRMLQELNHLRIVRNDRSERAVTLEERNHLLGLLERQSDMSMAKIRKELGCEKEDKLNMELGDRKKVKGNGTSVKLSAQDCFGEAWFDFKFEKQNEIVEKIVGSRTNEELIDYLESVLKLDRHRARAISEVLLDDGYGQLSRKAILKINEHLKEEVVTYDKAVVAAGYSHSSQGLSGKMARLPYYGEVLPKVVSGAEPAEEVNEEIRFGKIANPTVHIALNQIRKVVNTLIDRYGRPTEITVEVTRDLKQSLERKKQIQAGQKENQNKNDGYRETLKDLGLPDNYGNRLRLKLWEELNPDDVLDRRCPYSGAPISASMLFSAQVEVDHIVPFSKSLDDSVGNKVVCLARTNQDKGNRTPFEAFGNSPGEYSWVEIKRRASLMPRSKARFKFSEDQETTPDAWLARQLTDTAYISKVAREYLTAVCSPNHVWAIPGRLTAMLRHSWGLNSILGDTLQKERNDHRHHSLDAVVVACTARGTLQRISRASSKGFAEKVSKYVEPPFEGFREAVANRISKVVVSHKPDHGVEAALHNDTAYGLITEPNDKGVSLVAYRKKLSDLSKNSLDKVADSKIREGLIAAVQDKTATKAVTEAILAYGASHGIRRVRLHERIAVIGITEQKTGFSSVDSTDETETRAYKGYKPDGNYCVEIVETKDGKWSDEIIRNFDANQPEFRKFRLDV

SEQ ID NO: 10162 - protein, 1024 aa, unidentified
  REGION 1..1024: note = Description of Unknown: Cas Enzyme sequence
MNWRLGLDLGTNSIGWCVLKLNEELEPCELVNLNSRIFSDGRDPKTKEPLAVARRTARGIRKNLYRKKLRRRQLFRILQENNLYPKSKQEASKLKSLNPYLLRIKALDTKLEPYELGRALFNLGVRRGFKSNRKDSPDEKVTSANINTETTTQKQETTDTSKMKQGEKCLHLAQAIEESNYRTLGEFLWNERENNHGIRFAPDRTSYYPLRKLYEDEFDLIRKNQEQYYPNIKWDIIKDKIFYQRPLKPQDRGKCQFMKDHERTFKAMPCSQKYRILQEVYNLMYYPFSQTPTKLTRDQQKTVIHELDIHKELSFNRIRKILKIEGHFNLESESRIKLNGNNTACILRNDKNFGDVWDNFSLHEQDSIVEKLITANEDIEVLDMLKKYDLSEEQKKSITRIVFPSGTTSLCKELTENLVKEMSEKHLQFDKALMLLGYEHYEETVEHFDLLPYYGQVLTGSTIGGSDDQNEKNPEIRYGKIGNPTVHVALNQTRVVVNALVKKYGKPTQIVVELSRDLKNSKKAKDKINKTIAENTKRNAITNKSITDMSPSMLYPNRQDRQKYRLWEELGANSTTRRCLYCGKVISASEIFSKNIEIEHILPYGRTLLNAESNPLLNAESNLTVAHAHCNAFKGDRSPYEAFGSNPPGYNWNEILARVSELKNKTKQSRFSEKAMENFEKDSTFITRQLTDNMYLSKVARRYLTCLMDNSKDVWVIPGQMTKILRDKWHIDEILKRKIGQEEIINLGLKDDEIGKYKKNRYDHRHHALDAMVIGLVDRSLVQQIAKANRQRKTERLVVPQIPFTREEIVEKAKKAVVSFKPDHGLQGKLSKETLLGCIKIESIKSIKELKENDIQNIKLNKVREKFEELTAEFGFKKAKKTLQEEYPSIIVFDKKFVSRTPITSLKGQKNIGDIVDKKIQKQLSDFVALNANKKFDKIMQDFSQQTGIKKVRCLNHDQNPIDFPAIINGKESHRYYGSDSYVCVIVWQIPPKKMGGQPTYTGQFVRYDQITYDKVSKKQQLPN

SEQ ID NO: 10163 - protein, 1046 aa, unidentified
  REGION 1..1046: note = Description of Unknown: Cas Enzyme sequence
MLHKMCYRLALDLGSTSLGWAMIRLDAHHQPCAVIKTGVRIFSDGRNPKDGSSLAVTRREARTMRRRRDRLLKRKTRMMRTLIEYGFFPADETQRKALETLNPYMLRAKGLDEALTPPEFGRALFHINQRRGFKSNRKTDKKDSDSGAMKVAISQLRQAIDPQGNDGKPRTIGELLYKRFTDSNKRPEERTVRARYRQDKTIKDNGGTKIDKYYDLYIDRTMIEHEFDALWKKQAELNPSLFSEAARADLKDVLLHQRPLKPVKPGRCTLIPEEERAPLALPSTQRFRIYQEVNNLRILREGLKEELLTLEQRDKLVAKLEHGNQSFKSAIPKTIGVSGAVGFNLADAKKTELKGNTTSAILGKKEHFGEAWFAFDEAKQDTIVLQLVKEENEAKLVRWLQDETGIDEKRAEVIANVGLPEGYGSLCIKALAHILPELRHDVVTYDKAVQAAGFEHHSKLNRNAEIPGITFKFESVDQESGEIKEFHIHKELPYYGEYLQRHVGFGSGKPEDSIEKRYGKIANPTVHIGLNQIRVVVNALIKRYGHLREVIVEVARDLKQSKEQRKEENARQAENQKRNERLRKDIAGILGISEERVRRDDIKKMILWEELSFDPADRRCPYSGVQVSTTMLLSDEVEIEHILPFSQTLDDSLNNKTVALRQANRIKGNRTPWEAFGAQNIPDFDYAAILTRAELMPKAKRYRFAEDGYQRWLKDDAGFLARALNDTRYLSKIAREYMRLICPNTRVIPGQMTAMLRKKFGLNDVLGLNGEKNRNDHRHHAVDACVIAVTDQGLLQRFAKASASAREQQLNRLVERMPFPWESYREHVQRAIDAIWVSHKPDHSHEGAMHNDTAYGLRGNGKVSFHKMVEGKREHVEDNLKVIEITNAKTIDRHGLLPTGKPRPYKGYKGDSNYCIEIIRNEKGKWEGEVISTFEAYQLVREHGTTQLRHSDFSVSGKPLVMRLMIDDVLRLDVDGQFRTMRIATLSGNGQIFMADISEANVDARNRSKEDLFAYVSKMAGSLQKAKARRITISPIGELRDPGFKE

SEQ ID NO: 10164 - protein, 1041 aa, unidentified
  REGION 1..1041: note = Description of Unknown: Cas Enzyme sequence
MANKMAYRLALDLGSTSLGWAMIRLDGQNNPTAVIKAGVRIFSDGRNPKDGTSLAVTRRNARAMRRRRDRLLKRKARMMRALIEHGFFPADEVERKALEQLDPYALRAKGLDEALTPAEFARALFHINQRRGFKSNRKTDSKESDSSVMKGAIHSLRALLDGGEARTVGEWLHQRTQRGEPTRARRRENIITSESGRNKKEVRYDLYIDRAMVEQEFDAIWAKQSSLNPAIFTETIGRELKDILLHQRPLKPVRPGRCTLIPTEERAPLALPSVQRFRIYQEANNLRVLARGLEAVALTLEQRDKVVDALERNGKQTFAQLKKLLALGGSATFTHEDVKRTELKGNGTSAALSKASHFGKAWFDFDGNLQDEIVTRILTEESEVALVNWLMTNTGIDEAHAESIAQVGLAEGFGSLSRAALARILPELARDVVTYDRAVIAAGFEHHSNLSPAATGEILPELPYYGEPLQRYVGFADPRATESDPPEKRFGRIANPTVHIGLNQTRKVVNALIRKYGHPAEVIVEVARELKQSKEQRDEESKRQRANQDRNERYRDLIAGQLGISEEKVRRDDLQKVLLWEELNLGDALNRKCPYSGVSISLGMLLSDQVEVEHILPFSMTLDDSLNNKTVAMRNANRDKGNATPWQAFGERTVPGYDFDAILQRAELMPKNKRYRFGKDGYQQWLREDKDFLARALNDTRYLSRVAREYLRLICPGARVIPGQMTAMLRGRFGLNTVLGLDGEKNRNDHRHHAVDACVIGVTDQGMLQKFARASASAREKHLTRLVETMPEPFPNYRAHVERAVKAIWVSHKPDHSHEGEMFDATLYGLRGVGKVTYRHEVDGIRMRPILNRDVVAFSDPAPRNDKGARHGVDELGNPKPYMGLWSRSNHCIEIVRSEDGVWSYDVIERYRAYQIVAKIGVRAFNSRALGQSGKPLVMRLHIGDSVKLTLDGQVCTLRVLKINATGQVTLVGNADANVSARYAAKLAAQKLAKLGKPHSLDALTDTFFQRSISPSGLQSARARQVWISPIGEVNDPGFKG

SEQ ID NO: 10165 - protein, 1002 aa, unidentified
  REGION 1..1002: note = Description of Unknown: Cas Enzyme sequence
MNQRILGLDIGIASIGWALVDYDKDNLTNNKIIKSGVRIFTIAENPKTGESLALPRRLARGARRTIKRKRKRLINIKNLFVKYLNISTNDIFLENNIYNDTNLKDVWQLRDKALKRKLTNNELARVLTHIAKRRGYKSNRKVQEQGDSEGKKVLNAIDENKKLLSSYLTIGQAIYQSTKQTKIRRNKKDDYNHSISRDMLTDEIKIIFEKQIEFGNNLSDEFKNKYMELFLNQIDFASVDNMVGTCTLEGKSEKRASKRAYSSEEFVTISKLINTKLIDENGNERSFTKDELTKVLDLCKQSEQPTYLKIRNAINLNHNTTFKILDYLQVDTKKNTGEFINPEKEKFKSAFIGFHTLRKRVEKSLSKIHWHNLSNDKELLNEIAKIFSYHKNDVTIREELIKLEFKSLNINEKDILINDLISNINFDKFLYLSIKAIEKLLVYMRDAKRYDEAVILCGYKKEQSNKNRLLRALNKDEMNTLTNPVVKRAISQVRKVVNAIIRKYGQFDKVHIELTRDIKKSHSDRNKILKSQNEYRDIKKDIFNKFIEDYARKPSGNELLKFRLLQEQDYKCIYSMQHIEPKKLLETGYVEIDHILPFSKSLEDGMFNKVLCLTKYNQDKKDRTPYEYFTQENKDWHKFEIFIKSLHLKKAKYTRLLKKNFDENSQKEFRLRNINDTAYMSRYIKSFIEDNLELTSKDKQKVSCINGTLTNMLRHNWGIGNKSRDNHLHHAVDAIIIAFATNSEVNRLSKLSSKLAEFAYKKSEEKAKLLQFKAPINNIRDEVQKSIDDIFVSFAPRKGVSGEAHEQTIYSPNDFKANKKLDKQLVLSGGSTIRNVKLNNNTKIAKQSSMPRIDIFKHKTTNKYYVVPIYTVDFIKNLLPNKAIVAGKNKDDSPKDWIEMDENYEFIFSIFKNELVEVKTKKEEFIGYFVSAHSGTGALELKSHNNISSDIFKRNSSNVCIKSIGIQNALYIKKYQVSPLGEKSEIKKEPRIGTKKQNKKDM

SEQ ID NO: 10166 - protein, 920 aa, unidentified
  REGION 1..920: note = Description of Unknown: Cas Enzyme sequence
MNKLTIAIDMGAKNNGIFIVKTKDNKIVDKKATTIIIDKGALNFSKKSRRENRHKDRNYKRRKLVKRLLKELIDYSKYDNNQQELIQGLLNNRGYTFISTSTEFEQLNDNTVEFISKYLIELKDLKTKENFENKISSFDNLEELQEFIKNINTKINIERKKKKADFYKEFQDSFSNIIKKDLKLIQDLFNDIINEIQTGSKPREKYLEEIKDEIEKYDFIEDKKQFFNLIGNISNLQLRVLRKYFNNKFDDKLDLEKLNIKIRRYFKAFHYKSEKEKLQRQELFKILDNKTDILDFLFTTNPALTIPPYEDMNNRNTYKCNSMLIKPEYITDDLKSAIDTILENKHFSNLLISNDGEFKKDDNIKVKPSKDNQYIKTDFTYSKYLQRILDITPDISTKELNPRNVFKYMKMFDYGKISSIKEFKKTFGDKIYFDLEKIATKYYKEETKIHNGIYQEDISIFVKCNTNTSYKNNVKHTLLKPIYSYNFTPQEADAFIDNIKVTYGLKTSLELISSEYKKYQNRFYNTIISCYENQQCVDDNDIKKIIKNLPNTLKSIQEILNNQNISNTYISDIKELNPENLSRVLNIFIQTYRILFQELSGFSKTCKSCSSENAIRIDEKLTICKRLLSDVAKPIDGMLDMIIDRLSYEITNEIDRVDDIDEIEILLEQNRFEFEESLNDIKRANNSSIKKYKREDKNRLNSKYCAYTGDEFTKGEYDHILPQSKEVYNSKANMIYVSSKGNRDKGAKSYTLDNLSEKHLKDIFKTINKNEIKEFIKQNLAKKEDFKNFESLKLTQQIALRYALFMRGTDEFKKAFELVKLDKIKTITNGTQKRLAKIIYKKLVEKFPNNFQTININSKTIDNMLVSTTRKSLAINQETGETNHLFKEDIQDSHSHCIDAMVVFYLANSKIKNKNSYKET

SEQ ID NO: 10167 - protein, 988 aa, unidentified
  REGION 1..988: note = Description of Unknown: Cas Enzyme sequence
MKPYTLGLDIGSKSIGWALLQDVKKQPIVDIGVRVFPEGVERDTKGLEKSKNTTRREARGARRVHQRRNLRRDQLVKVLKSAGLIPEDEEQLSELFKKNPYQLRAKGLDKKLELYEFGRALFHINQRRGFKSNRKTVDSKEDNEISKEAGQLQKEIEDSGYRTLGEYLANINPEENKVREQYTFRSMYEREFDLLWEAQKESYPKLLTEDLRQKIRSEIIFYQRPMRWDLETIGKCKLEVGEPRCPRGDWHARRFRLLQDVNNLKICNPDGSVETLTTEQRKVLFEELNKKNKMKFSAIRKKLGLLETQRFNVEYEINEKGKKNEKINGDVLNAAMRNKKIFGPKVWETMDKAEKIRLNDWLVELEDDDLAEKLAGEYSLDKDKIENIRKISLPQRYMSFSRKAIQKLLPLMEAGKRTDEALKKVYPGREKEIDAGKITELPFPEDLRNPIVNRALFEVRKVVNAIVREYGKPENIKIEMARDARGSARERRELHFKMMENEKRNKETGKRLMEDMKIRNPSRDDIIKYNLWEECGHTCPYTGKHISQTALFGENLEFQVEHILPYSKSLDDSFMNKTLCCVKENRLKGDKSPYEYYSGDTEKFEQLIQRVNKTAMPYWKKRKFWQKEINTDEIISRELNDTRYICREVVKYLKQICKNVSGTRGKVTSELAYQWGFVKDRDDHRHHAIDSTVVAVTKPKHLRQLGESKYSKEGLAFAPPWLHFREELAEKVKHINVSHRVSRKVSGALHEETAYGPTGQKDEKGQDIFVYRKKLEDLTIPMVAKIVDKIVRGIVENRLVEKGVDLNKGGKIPKEVWGDPLYMKQTKSKKKVPIKKVRIRDVFNNMIILKDKSGKTYRAVASGNNHHIEIFECRDKKGQTKRDGKVVTMLKAVQRSQKGEPIIQRDHGQGTKFICSLSINEMFMLESDDSLTNLYRVQKISQNGQVFLRPHTYAGDLKKQKSVSKLPNKLKGHKVTVDMLGRVHLAND

SEQ ID NO: 10168 - protein, 1115 aa, unidentified
  REGION 1..1115: note = Description of Unknown: Cas Enzyme sequence
MGHKMSIDKVVLGLDVGVGSVGWGLVKLTEEKYINEKTNGTIDERYKISDGKIIDTGIREFQLPQDRQKKSLALQRGTARRSRKTTRRKVRRLKRLIRLANEFNLITEDFNRDKILKPKRGDKESKWDIWLIRKQALERKLKDAELLRVLYHIAKHRGFYFHTKAEEIQKEKEGSEEGKAKAGLTRIRKKLEDSDCETIGQMFWEEFKQTNPKNRRKRNTKDKYENSIHRLLLKEEIEKIFKKQQELGNTKAKEELKNRYINEVLMYEEGIDEDKLQKMMSRCEFTGDLCAPKESHTSERFTLFNRLNTLELVDTKNKDKHLQLNDEQRKKIEALAYKNTKVTFAQIRTATGLQDDLHLRFNLCSYREKNPEYNKKLECKIENGQLQFEDKHKVPIVEIHTDEVTIFDREIKDIFKSKKLWSNAKKIHVYYSDIRKQLRLSGDFRFKELSGYTKSAEEFGSEAKYIKQFENDTFVELKGYHKIKKAIEKECGSEKWEQLSKDGAKLDVIAEALTYHKSDQTRTNYLQEKGISDQNIIDAVSTINMKQLANFSKEALEHLLVPMEADKLLFNEAKQKCGYGKTDHEKQAILEPYSGFFENNPVVARVISQTRKLINAIVRKYNDKYPIDQIHIEIATELASSEKRKSQIAQGQRRYKEDKKAAEERCREFGLDPEEGQNLLMFRLAEQQNNLCPYTGKAITFYPTGADNEVYIQDCEIDHIIPMSRSFNDSLNNKVLCIQQANQNKTDRIPFEWFEDTYGKDSKQWMDFERRVKKMYGIPYSKRKNLLRKSWTEEDKERFISRNLNDTRYAARHIADYLRKYFDFSKSQRDDIKDVSRIQLRSGGVTAFLRHMWGLNKDRDKNDLHHALDALVVACSTYGHVYLVSILAKAIERKGKNWYKHFGRDKFKPWNSVREDIQKAVGEVFISRMPRHKATGAAHKETIASLRESPSTKRVIRLKGGYAEMGDMVRADVFVDEAGKNYVVPIYTVDIFSNKPLPDKYVPDDRTIPYKQWPSIFDDGLNFRFSFFKDDLISINGKMYYVSFFEATTTNVNVKNIDGSFFPDKKNAQDPYTKKTCYRPKSKKKKIVLRKYSVDMLGNYKEIKEEKRLGNKFEK

SEQ ID NO: 10169 - protein, 1492 aa, unidentified
  REGION 1..1492: note = Description of Unknown: Cas Enzyme sequence
MQYISPISLDLGAQNTGTLFSHYKQGEEPISHKGATFILDSNNFTFSQKKRTTNRHRMRSQQRRKLAKRLFFLILDKEYGLKEEDTPVWKFIRGLLNRRGFTYLQEEITEETTQVPLEYAQFLFPEEFENCKIEVLEFLRQLANEDQQKALQTWKKIYEFKNYDKKEKEFQKENQDYDSKTLKNFSKTLKNITGALIQAVEKGNKHRKVYLEEICVDIKNSQDLKDLLTKAKNPITTKEFFHILGHISNLQLRILRKYFNDPNMANGKDYWDPERLKKFFIRYLQAWHTKTTDEKDNQKDLLSQLESKPILQVFIDSDPKISIPPYEDQNNRHIPTCQNLLLSAKKLDEKYEGWREIVKKLAKKEIISTNEEKKFIPLEFYDPENIKLVIKELTKSLQGANKDTSKIPFDEDSILFQRVLETSIALDLYEIRLHVDYLKNANGKTPEEYFGGISTKRYKRYEESEKNLQVAKLTEDEKRILFEIARRVYEDTVDARRGLWDSNFSLFEKCNSKTKHKNKTQKMNVMQILRISDKKDFSLEKFKQEVWVQKIDGRTVKRLCEKIEKIRKEYGNLFSKEYSRIKWKYLFSQEENLPAQISQNANNKKPSNKTTVTNTSNFSEEEQALVEMVKNVQKISKKIGEFLGHTEQQIVAYANPFSLAQLYNILETDLHGFNKICHACILETQWRSQRETNKTLKEEADKAVRLSSDTGRPFDGQIDRIVTRIAKEIAKEKIKQLSEVNSSDLTELEIPVFMEENQFSFTEEALQLKGSSDKAKKKLNKQIQKFEDRLKTKEERIKTDSGDICAYTGKSIGNSGEIDHIIPRSSTIDNMGAVYNSELNLMYVSREGNQHKGNNLYTLSKIHNSFLQEHFKTTNHSEIKNQIQKVIDKVKEINKQQKRNYIIPDTLEPNQRIALRLALFDNDLRDQVLPFISMHSKTLVNGTQAWFFKRLRQILFTEIKEKFPNVKVNITSHFFSTSEDNFALSQLRETLGNYKKAYKKEENQRESSHIIDATMVFAQALIQSNTKSGYNLYSPLIKDDTQETGEWLESLLPEEIEMKFIERVAKYRKQNPESSPIFKDGMYAERFLSLLVDSKGIRFGFTPEKSSETLSSKVEKEIFEALKPFLLYKGKFIDKDLEYFKSQASPSGFHLLKLHRNKVKEYLQNCKTEDKVSILLESLRYMTQNKNVLDEEGNLSKPQDKKKQNKNVLDEKGNLSKPQDKKENFQIKWNGKNILQFSVTMPYMEEWNKLEKFLQNVPKEKLQDKIKEFFHPASSIKNPNNHGTKARKMSLPVKKDPSGGFRILRTNTDKEKIYQVHEGDGPNIGFAINEDGSIDFSSAILSKTFLSKNVSPYKIEDKIPADKFIYFDEWRDLPISSELVDKGILQVTMKPDTKSRCYLKVTLKTNVLLKLLANQNLESIKKPQVYGITLSSKKDSELKQLAKFLKDNISDQRDYLYITNVDSQKVSVEFVANGFPGELKTLYNQGKKIDNP

SEQ ID NO: 10170 - protein, 1473 aa, unidentified
  REGION 1..1473: note = Description of Unknown: Cas Enzyme sequence
MTRGTQTKTAKTRNHSTPESSYTHISPICIDLGAQNTGVLFSHYRKGEEPLSHKGVTFTLDPSNFIFSQKTRTANRHRMRSQQRRKLAKRLFCLILDKEYGIREEDTSVWKFIRGLLNRRGFTYLQEELEEEKTEVPLEYALLLFREDFKDCKTDVLNFLREIANKDKETALETWKRIYDYNEYDKKEREFLSKNEDYKKQDIKNFSRTLRNVTNALIKAVEQGNKHRKVYLKEIQADINSSQELKDLLKKAQKSITTQNFFHILGHISNMQLRVLRKYFNDPDMGKEDYWDPERLKRFFIRYLLGWHAKRGEEKNNQTLLLKALGEKSILQVFIENDPSTSIPPYEDQNNRQIPTCQSLLLSAQKLDTEFSGWRELVKKLVQEDPSAKDFYKIDTVQQVVEELRKSLQGSSKDTSKVPFDTDSILLQRVLETSIALDRYEIRLHVEYLKNCNGKTPRDYFGERSKKLGRYEKGEENLKVAKLTDTEKTTLLEIARRVYQDTEEARMGLWDSQFSLLEKCNSKTRHKNKTQKMNLMQILRISGTSHFSLEDFREKVWNQKIERSTIKGLCKNIEATRKSYGNLFDAEYRRVRWKYILAPARSQGTEDSRQANGKPTIREKEIVNVSNEEKEILKIVESVKLISDAIGRYLQHSETQKLAYANPFSLAQLYNILEGDLHGFHKLCYACQLETGWRSQREEEADKAVRLSSDTGRPFDGQIDRIVTRIAKEIATKKLQQLSEVNNQNMTELKIPVLMEENQFSFTEEVLDLKKSSRKAKEKLRKQIQKFEDKLKTKEERIKTDSGNICAYTGQIIGDSGEIDHIIPRSSSIENIGSVYNSELNLLYVSRAGNQKKGNTVYTLQKIHDHFLKKHFHTTDRTQVKGIIQKVIDEVKEKNKQERRSYIIPDRLEARQRIALRLALFDKDLRNEVLPFLSMHSKTLVNGTQAWFFKRLRQILSTEIGKKFPNVKVNITSHFFSTSVQDSSLSEHRETLGNYKEAYKKEEKQKESSHIIDAAMVFAHALIQSNTKAGYNLYSPLIQDDTQEKGEWLESLLPEEIEVKFIERMPKYRKENPESSPIFKAGMYAERFLSVLVDKKGFRFGFNPKKSSNHLDKSFEKEIFDCLQPFLLFRGKSIDKSLDDYKKLNTQSKFVLLKLHRNKVKEYLQSCKQDDLTGQLLESMRYMTQNKNVLDDKGNLSIPNDGDQDFTIRWKGKNILKFSITMPYMEEWKKLKKFVRRVPKEELPDKIYEFFHPASSIKNPSNHGTKARKMSLPVKKDPSGGFRILRTNSSQEKIYQIHEGDGPNIGFAVNEDGSIDFQSAVLSKAFLSKNVAPYKFEDKIEVEKFIYFDEWRDLPVSREWKKNGISNVRMKPDTKSRCYLKVTLETNVLQKLLSNHNSRQIDKSEIYGISLSGKKDSNLKPLAKFLKDNISDQRDYLYITNLSPKMATVEFVVNGFPSNLKNLYNQGKKIDSP

SEQ ID NO: 10171 - protein, 1437 aa, unidentified
  REGION 1..1437: note = Description of Unknown: Cas Enzyme sequence
MKKILGLDLGTNSIGWALVKEANNNNEKSSITKVGARVIHYGDNLVKTDSGTSSMTPEDDFASGKGLSPNAGRTKSRSARRNLQRYKLRRENLIEILKEHKIINDDFVFSEEGNVTTFRTYKNRALAAIQQIPLEEFVRVLFMINKKRGYKSSRKVKGDEDGQLIDGMAVALSLYENKQTPAQFVFELLKSGKKNIPDFYRSDLQTEFDKIWNFQKQFYNETLTEANYEKLKGQKKKATQDFFAKTLKIETPEIKGKWDEKRLKRYELRSKAVLEKLDIGEVAECLIEINGELNNSSGYLGSISDRSKELYFNKETVGQNLYKQLQANSNTSLKKQIFYRQDYLDEFNTIWEEQTKYHKQLTDELKNEIRDVVIFYQRRLKSQKGLLSFCEFESKQIEVLIDGKTKIKTRGMRVIPKSSPLFQEYKIWQILNNIQLKKGEAEERNLEDDEKQLLFEELNIKTKLNKKDALKLLVEKPTEYDLNYKDIEGNKTNDVLYKAYQKIAVLSGHEEKDFSKSSAAEVKDYISQVFSLLGIKIEILDFDSSKEGNELEKQFHYQLWHLLYSYKDDKSPTGNESLIKALKVKFGFDEEYAKVIANVAFPQDYGSVSAKAIRKILPHLKDGNTYDVACAYAGYNHSKASLTKEEKEKKVYKDKLDILPKNSLRNPIVEKILNQTINVVNAVIIEYGKPDEIRIELARELKKSAEERKTMSEAIGKTTTEHEKYRKILQSEFDLKHVSRNDLIRYKLYLELKNNSYKTLYSNTYIELHKLFSKEFDIEHILPKAKIFDDSFSNKTLELKSINVEKGDKTAYDFVKEKYGEAELANYEKRVENLFLAKAAKKENEEETTETKSADIRISKTKRDKLLMPESKIPSGFIDRELRNTQYIAKKAKELLEQVCKNVTPTTGSITDRLREDWQLIDVMQELNWEKYKALGLTEEFTNRDGQVIKRIKDWTKRNDHRHHAMDAITIAFTKHSHIQYLNNLNARSDKNGNIYAIEQKELYRDAKNKLRFKPPIPLDELRAEVKKQLENTLISFKAKNTVVTKNKNKIKRSDKAQSTLTPRGQLHLETVYGKINQYQTKEVKVGASLDVETINQIANKKIREALLKRLNEFGNDAKKAFTGKNSLEKNPIYLDEHQSYKVPEKVKIVWQEPVYTIRKDITPDLFKDSKKNDDFENRVKSIFDKSVQNALLSHYNKTKEEVEQFNKTITKEKEKRKVLDVAFSNLTENPIWLNKEKGISIKRVTISGVANALALRDKKDHNGNLILDKNGNKIAVDFVNTGNNHHVAIYKDEKGDLQDNVVSFYEAVERVNQGLPIIDKDLNKDKGWQFLFTMKRNECFVFPNEKTGFNPNEIDLTDESKYHLISPNLFRVQKFSKVSSGNSFSREYVFRHHFETTLKSEIKDITFKKAQSVLPLGKIVKVRINHLGKIVKVGEY

SEQ ID NO: 10172 - protein, 1048 aa, unidentified
  REGION 1..1048: note = Description of Unknown: Cas Enzyme sequence
VLSHAGHVYDLTYEILLVIRSSVFSYLLNFDNLIFTDKKNQVDLGLFMTNTLNVLGLDLGPTSIGWALLHLECDEDGKILRDQEDFLINAKIKDIGVRIFPATTDDKTKAPKNQKRRASRLQRRLVARKAQRRNDIRSFLMEHGLLPELSAATSAARFDELGDPFELRVRALDEKLEPHQIGRAIYHLAKRRGFLSNRKSGTTKEDGVVLGGIKEVREAMEAGGHRTLAEYLVTLPKKRKHFTHRAMTEDEFETIWNVQYQFHPDILTNELHAKLKNAIFYQRPLKLQRGLIGKCTFETDKKRCDIARQAAQRMRYWQDINNLAWQDQQTLSWQTLTQEQKILLAEEFEQSKEVSYKKLRKLLKLSDDININLDKKLYGNKTAYAFRKAIPARWDALNEEEQDRLTEDLFRIQNENGLRRRLKEFWQFSDEDIKKLEDVWYQLEDGYSRLSLKAINKVLPKMKEGLRYDQAVLEVYGDHRKQFGGDESQKLPLPPKDLRNPIVFKALCELRKVVNAVIREYGRPDIIRIEMARDLKLTEKQKEKAIQQNRSNEKANQEAAAYISQRMGISPENVSGTDKFKYRLWKESNERCPYTGKLIPLSSLFDDGVVDIEHIIPYSRCYDDSYMNKTICDAKFNREVKLNRAPGEIFDTESEEHYQLMQRISCLPRGKQRKFTMTAEQLNTTDWVGRQLSDTRYICREARGYLLQLFPSSNDENAYVQVVAGGATANLRRVWGINAILSDGDIDVKNRWDHRHHALDALVVALCDRGLYQMISKLAGRNRDMMRYILKGIGEPWRGFLDDVNAAAEGIVVSHAPTRRVRGQLLEDTAYGATQTPGVYVVKKALASITLPAIKAIVDKGVKELVELRLSQYGGDLKKAFADTLYHKDGKTPIRNVRCFVAMSPDTVVGIKDAEGKEYKYYPLAGNHHVDIFENIDTGERKAVLVPRFYAAKRGWKPADLGSEWNKLFSLCANDYVEFRGDKGELRILRIQKMSGGGDTRVDMRPPEDARSDYIKGTSVALTTSNGLRKIVRKLQVDPLGRLREAKD

SEQ ID NO: 10173 - protein, 1066 aa, unidentified
  REGION 1..1066: note = Description of Unknown: Cas Enzyme sequence
LKNQVFYRQDYMDEFERIWCTQAKYYPQLTDELKAEIRDVIIFYQRKLKSQKSLISVCEFENSIADIISEDGKVKQKLIGSKVAPKSSPLFQEFKLWQLLGLLKAKNKSTAEILEFDQDEKEKLFSELNIEDKISATKALKLLGYKPDEWDLNFQELDGNRTNKALFNAYLQMIRITDDEVDFTKFNTRDVIDNVTAFFEKEGINTSLLSFNAELEGKAFERQPSYQLWHLLYSYQDDNSLTGNDTLYRLLYNKFGFKKEYASILANISLGRDYGSLSTKAMRKIYPYLKESSFSTACMFAGYNHSKSLTKQENDERLLKDRLEILPKNSLRNPVVEKILNQMVNIVNAIIAAPGLGRPDEIRIELSRELKKNAKERAEMTSSVNRAKAEHELITKKLINEFGVKNPGRNDITRFKLYEELKHNGYHTLYSNTYIPPELLFSKSIDVDHIIPQAVLFDDSFSNKTLCFRNENLKKANRTAFDFISVEYNEDRLIEFTKRVEMMYNAKEGGISKAKYSKLLKKIEDIGGGFIERDLRNTQYVAKKAKQMLEGICRKVTSTTGSITGRLREDWGLVNVLQELNIEKYRLLGLTRKIERNDGSFKEQITDWTKRNDHRHHAMDALTVAFTKGSHIQYLNNLNARSDKTGNTYAIEQNETYKDKDGNRKFNLPMLRFREEAKKHLDHILVSYKTKNKVVTRNRNKTVSQKGLQYKTELTPRGQLHKETIYGQLKQYSTKEEKIGAKFDEQTILRVANKAYRKALLERLREYGNDPKKAFAGSNSPVKKPIYLDPQQKVKVPDKVKLVWLEPDYTIRKDVTPENFRDKKIIEKIIDHGIRKIMLDRLEAYNDNPKEAFSDLSKNPIWLNKEKGIAIKRITISGVKNAEPLHDKRDHLGKLMRDEHGRTSPVDFVSTSNNHHVAIYKDANGDLQENIVSFYEAVHKASHNLPIIDKQYKQSEGWQFMFTMKQNEFFVFPSESFDPSEIDLLNPANNKLISPNLFRVQTLSIVRYGNVTIRDFLFRHHLEATLVDKNEVKDILYKQIKSLPPLEKIVKVRINHIGQIVKVGEY

SEQ ID NO: 10174 - protein, 1649 aa, unidentified
  REGION 1..1649: note = Description of Unknown: Cas Enzyme sequence
METKKVLGLDIGTNSIGGALITLPKEYLDYGKDGNIEWMGSRIIPTDGDYLQKFESGAQAETKAAFRRGKRGSRRLKHRYKLRRSRLIKVFKVLGWIDETFPLDDSRKFKQNINENGYSLKISEYLPFSAETIAEFEKELAIEGTKSKQGKSIVPEDWLVYYLRKKALEKRITIQELVRIIYVLNQRRGFKSSRKDLKENTTILTYAEFEKIKNNIDASMNNAKEYETQFVSITTVEEIIKVSEEKDKNGKYKFSVKVADKKVLDFEVQRKTAPEWKGKEFTFLITQKIKKGKLEQLQPKTPTENDWGLCTTALDEKINNYRTPGEYFYEQIKESYKAKRNFKARQYPVYRWRYQQELEAIWKKQCELNPELNKINTDKDVLARLAGILYPTQAKNNMPKLMEFENNDLLHIISNDIIYYQRELKSQKNSISECRYEKRKGIDGELYGLKCIPRSSPLFQEFRIWQDIHNIRILKKEEKIDGKIKLDIDVSKQYITDKVNEKLFELFNSKASVSEKEIVTLIKECNEQNDIVIAKKDGEHSHRINLFRNRDTLKGNETLARYNSLFRKAGYDGTSILNDNDKLLRLWHIDYSITSSDEKLAEKWISSALSKLLPDIDNKNLAIELFCKLPELKKEYGSFSACAIKKLLPVMRSGKYWSEEGLNSATKDRIEKLINGEVDVNIDNDTRKKIQKWELENRSLEKVEDFNGLPTWLAGYVVYGIHSEREISKIKSVEDFSKFIQKAIPNNSLRNPIVEQVVRETMLLVRDVWKRYGDIDEIHIELGRNLKNNSDERKKLADAQKENFDEKQRIKNLLYELMNDGFNQYNIDEKIEHVNFEVNPNPESPADIDKFRIWRSLTNKTDIDWAKKVKEEKIPTEKEIKKYALWLSQNCRSPYTGTLIPLSKLFDTNQYEIEHIIPRARMKNDSFNNLVISEWGVNKAKDKQLAANFISSSNGKCKYGDKEYSLFSYHDYESYCKETFKFQRGKLKNLLATEVPEDFVERQLNDTRYIGRKLTELLAPVAKDENGILFTGGSITAELRNNWGLNRIWKEIILPRFERLEEITGKKGEYIIHDIDEFGNPVIHFNVKENQKLNTKRIDHRHHALDALIIAATTREHIRYLNTLNAADTTEELSAIKRSLVKGKIRDFKLPWENFTLHAKNKLEEIIVSFKTNNRITSQPKNKTAYFNNNEGKIKKEYKWQQSNLKWMAVRKSMFKEPQGIIHLKEVYEEKNILKAIEMQIDRMLVQNKPEMRIASYVYDQEARRIIKDLIERIGIPIQEKQPLLKEVKKHLSKNPLKDISGKKFESIKVATFEEYAAKRVSLDKSFDHKKIDKIPYARTGKSVLGRLLHEHLDSAEYKNDKSNADPSLAFSTEGLEVLAKKAGKPITKVTIYEKKDESSKFGKQYVEVDAGSNAFFVMYENKIIKERTDFRSIATHKAIEKIVNGEDITEDKEGFEKFVLSPGDLVYVPTIEDQEAVKKGINIENAIPWNNQKDILKRIYKVVSFSKKDLLCVRANIADPIIPTNIKEKVKGEIDWHNKSATTMEGDVTIKDVCIKVNVNRMGIVLNNNKRNIETIPVQTNILSEPELVYSTNKLKTFNSFEEADEENAKSMAALSPEEHIRNVTDRLKKMHEEELKKPMDKKLKLRK

SEQ ID NO: 10175 - protein, 1056 aa, unidentified
  REGION 1..1056: note = Description of Unknown: Cas Enzyme sequence
MARIKYRLALDMGANSLGWCVYRLNENDEPDKVVRLGSRIFSDGRDPKTLASRAADRRLARQARRRRDRVLKRRHKLMQALIRFGLMPTDDAGRKKLQELDPYELRARGLDKPLTLHELGRALYHLARKRGFRSSRKDARDEEAAKETGKVKLAIDALRERVQAAGCRTVGEYLARQHAQGSPVRARRSSDGGYVLYLQRGMVEEEFDALWAAQQPHHPQHLSDQARDTLRDIMLFQRRLKPVEPGRCQFEPQEYRARLCAPLQQRFRILQELNHLRARDGIGDRALTLDERNAMLALLENEAGLVTFSQLAKAAGLRNAKAFNYGRDEKRKGFKGDAVGAQFGAADALGDAWRRLNPEQQYALAVLVEQADQAEALTAALLVLPSETGSAAAILKGQHDETAAIAALCSLPFKLDPAQAARLASFNLPDDYGSLSLKALARIVPELEREVITYDEAVRRAGYASHSQFHTGEIFMRLPYYGEVLRGYTSPMPTARDAGEHTYGRIPNPTVHIGLNQLRQLVNALIKRFGLPHQIVIELTREFGASGDRRREIMKQQAENQERNARYDAELATLNVRVNRENRLKLQLWEELGKDDALDRYCVYSGQRLGKAALFSDEIEIDHILPFSRSLHDGIGNKILCTRQSNRDKGNRTPFEAWGHTDRWESIVERAERLPEHKRKLFRESALETFLGESDFLARHLTDTAYLGRAAKQYLTNVCPPNEVWVSSGKLTGMIRGKYGLSKLLSEDGVKNRDDHRHHALDAAVIGLCSRSLIQRMASAAQAAEQHGENRLLEKLELPWPAFRDELGESLKRVVVSHKPDHGKQAALHNDTNYGWRGEPDKRGNPLVGRRRPLESIKNAADAESIAEEFMRGEIVKLLSGLSGAKDIKAALLAYSARTGIRRVICQERLSVIPIHDRRNGKPYRFVKGDGNYCYEIFRKPDGRWDGEVISTFEANQKNFTDSPSMAQNGLPLLMRIHKDDVLAISDEQGVRIMRVAQFSSGKILLAEHTEANVAGRARDGRFKFLQFGIGPLKKVNARIIGVDILGYVNDPGFKH

SEQ ID NO: 10176 - protein, 1066 aa, unidentified
  REGION 1..1066: note = Description of Unknown: Cas Enzyme sequence
LTEPLIWAFDIGSRSIGWAVMRATEDRKPTGEVVDAGVVIHSGGLLSEKDGTTRHAARGQVVRARRRLKRRKTRRWKLRDEMEKFDFQLQEGWRKRDPWWARSVLASGPVQDPHRVRHLVATALPHMARHRGWRNPWLRAPEPVEIRDLDEKKSAGILDASRELSEGLGEPIAPTLGAISWALIRQPGPSKVRQSGTEPEANQRNINSWIDKVHQEYIACELAEIWKVQGLAHPNLFTGQALNGLNQAILHQVKPGVPLDRIGKCEIDDRFYRAPKSSPLFQRYRLLSLAANLRRELPSGDRDRLTAAERELVVDLLSRGEQVSWSEIEEALDWSGGGKLVHADRIGTAGRPPIDVVAERLISTKGINKLRRWWYKASPDQREALVAMAISDLGFNEEDEPLMESVADEIEKEGLLDLVEKFGRALPPGRASYCRLILADQNREMENGADPHDAMGATYGHGATGAHKKWEDPIPNNGVELSMKEVRKVVAQLESRYGVPAVIGVEIVREASMSHAERGDRSARIKRERESREEAKRIVMDDLGYQEPSTSVISKQEHVTAQAGLCLYCGDRLRLPVTELDHIVPRSTGGATIFNNLAAVCRDCNQKKGHQPFGLWCESSGETGAQRMEETLARVDGLTGPRWKPTPAKPYINPETGRWVYSELELARRDYRRRLQKTGFDREFDAAELTSTAFVGRAVTERLKRKYPETRVDVFRGGFTAAMRNETHLPKRLGLGDKKNRGDRRHHAMDAIAVALMTDATWTRRVRVRNEAFQNRRLDLLSSEDLDEVRSKANIDSLEEVMPTVEATGGALIEDMIPVLPRRLRTTGRIHEDTVRPWQPKRIGDPWSAKYISSIRDQEVAKALWRLTSSGGSLKEDANRRIELPDGRTLGPDDTTLCAIKLDEEKAKETPVATWLPVRHGWAKTDEIHHARLISIRWAEQGKANESMLLVPLPIADVYGMTSPFEVPLIPEMVGFKGHPKLARIHVIDPDCQIDPYGHLTQGDLVRLDGKLVAVFTFAAETQQIWARPALAGGQAGSADRISFKPSRFVNGSASLESHPSNSSQD

SEQ ID NO: 10177 - protein, 1170 aa, unidentified
  REGION 1..1170: note = Description of Unknown: Cas Enzyme sequence
MKKILGLDIGSNSIGFSLLELSEKADDSIKFNEIVSNSIVFSEPNSAEYRRNARSSRRRNERKSSRNKKARTLYVNYKIATNEFINDTSKYLNSLKIEDKDVYKLRELAVNGILLTKDEFIFSTYSILTDRGYNNMFSISNEDGIINEAVSKNTKEYETKNLALPSMVLTTHRKALESKYQNIPIRNKKDDYKNSLDRAMHIEEFKKVVASQENNTNIFYSPKVCQEFIDTITDENEVNSPFYQRSLKSFESMVEYCSFYDEFHPQGSQKKMPLSNVRNIERTLRQAIDNYDVIIAKTGEIKKFTSGEVETIVNYWIQTPSANDITALNIFKGVGFKELKLNIPEKSSQLILDIKAHRHILEVLNSYEIDFEDKENDFYNDVLLELYYFKNESSRVEHIKKQIEKYELNLDGEFAHSLVALDNMDGFASFSLKFTNEVLAVMKKEHKTHHEALESLGYYSKYLNMQTYDYLPPLEPTKKDIEWLEKNIEGFESKHLFYQPIMSPKVKRVISILRKLINEIIKKYGRIDEIRIETAKEMNSKNEQEKITKNQAKDRAKNNEATKFLKTNEIKESSKNIERAKLFLEQDCECLYSGKNITEEEAFDENETEVEHFIPRSVIWINSYKNKILVKKKYNQNKGSTHPVEYLKSVGEWENFKGRIEKTYIAFNKKDWLTKEDIIDSVMQKEQWLDSYLNDTRSATRTIQKYLNHYLYPQNNLYGKEEKRHIFSVSGRAISELKYMWGIHKVMPKNEDEKKDRNTNYHHTLDAFTIALCSSAAINILHNYFKKKENRYKTKALKEKLTNTLPHSTDGVNVVEHLKDLVERYETNRLYVCPYNKHKTNMKGFRDGNLKLYVTNNPKDESRNILAEMQKVSIDSGLLSKPKPNGKQGLIRRSDAEVTKEIKSIQARLDPQKQKKILSAIEVYADELLEIRAKIEAKESEIKKLERTKKSSKLQKEFNEGVNKLIKPITQEKKDLEFQLKDLKCSFAVKNGKRQIVKTLRLYNPTISETKADAIVFPHRKSKKIERLSLVNFEKALQEKEPFVIKANESTLSVELFNTSKGQKVGLNYFSSLANEIGTKVNEKLSAELENKKSNMTLYKNEIIKVNNTKDGKQEYFIFNGGGNITATNNKISIKNINLNSFKKKDNRTPNKTTIISKAKIDFFGNITEV

SEQ ID NO: 10178 - protein, 1179 aa, unidentified
  REGION 1..1179: note = Description of Unknown: Cas Enzyme sequence
QTELDRIWNFQKAFYPEILTDDFKEQIKGKGKRVTEKIFLGRFKIYTAENKGKRADVKLQAYRWRAEALTKRLEKEELAYVISEVNNNINASSGYLGEISDRSKKLVFNDKTVGEFLFEQLEANRHARLKNQVFYRQDYLDEFEKIWEVQKQYYPELTDKLKKQIRDVVIFYQRPLKSQKGLLGLCEFESWETEIEDENGNKKKRRVGHKVIPKSSPLFQEFKIWQILNNIRLTNTDTGEWTYLSDVQKTAAFQKLNIETKLTIKEFLKIVVDFPNKYEINYKEGIEGNRTVAELFKAYHKILEFEGVDIDFKKTPVEKIEKTVFEKFRELGIDTGILDFNTNLEKNYFDKQPLMQLWHLLYSADDDRKLVNKLSEKFGFPKEYAKIIANVSLQADYGSLSARAIRKILPYLKEGNGYDEACMYAGYNHSHSLSREELDKRILKERLELLPKNSLRNPIVEKILNQMVNLINAIIEDEDLGKPDEVRIELARDLKQSSKEREEATKAINKATRENEEIRKILKTEFGLIKVTRNDIVKYKLWKELERYGYKTVYTKKYVPKEKLFSNEFDIEHIIPQSKLFDDSFSNKVLADRQINIEKGNETAYDYLKHKLSENDFSQYIERIKKMLRERKISKAKFNKLMMKNTEIPDGFIDRDLRNSQYIAKKAKQMLEEVFPKVNTTTGKVTSRLREDWQLINIMKEINLPKYERLGLVEYVPGKNGNREAKIKDWSKRNDHRHHAMDALTVAFTTFSHVQYLNYMSARHNEKHDMFHKVYGIEHKYMYRNEKGKLLFKPPIPLDEFRADAKKHLESILVSFKAKNKVVTKNKNRIKVGKNKYKEKVELTPRGQLHKETIYGSRKVYKTKIEKVGAKFDKNKINMVANQKYKTALLQRLEQFNNNPKSAFTGKNAFTKMPLFIDENHTDKVPEKVKLVWTETEYTIRKEITPELKIEKVVNKGVKRVLKQRLEEFDGDAKKAFGNLDENPIWLNKDKGVAVKSVVISGVNNVIALHSKKDHNGRLILDENGKEQPVDFVSTGNNHHAAIYRDENGNLQEEIVSFFEAVSRVNAGEPVINKNKNGWQFLFTIKQNEYFVFPSDDFNPADIDLLDPENASIISPHLFRVQKKATKNYVFRHHLEAQLIDLSATKGITYQSIRSVKRLEGITKVRINHLGKIVKVGEY

SEQ ID NO: 10179 - protein, 1181 aa, unidentified
  REGION 1..1181: note = Description of Unknown: Cas Enzyme sequence
VTNNIKKDSNIILSLDIGKSSIGFALVNKNDNYKLINGGVRIFDAPETAKDEVSLSKKRGEFKRLRNSNKNRFERIKKVVKCLLKYNILDNKKIANYTSKKVQQLPKSKKKHLFYIKTAEYLFNKKSKANDILNLRVKALEKKLTPLELARLLYSVNKHRGVTYDEIRQTSDSAKSSLSDDQKNLQNGFKRYKNEFQENSNQYKTVGEYLYKNYSDRFRNKEKTSKSKKTIKDYYLFSIPRDDLKNELEIIFDTQISFGNEYVNEGFKSEFIEAFLWEKESPNYDTLVAPCFYNENEKSASKHHIASLLYIALEKLHNIRYRKTGTKDYDNLSIEQIKNIIKNSIAIKRGVVNKDGLSYIGLKKILGLEDLEFKGILDESKIALSFSTYIQIANILELDFDLLEEFKDENSFLHNDLVKIINILVYKPKDSIKEKELKELGIDEQKTQELIKVKLRGHLPYSLGVVNKLTNYMLQGITPHDAKEKIKDEYGVTYIEKQLYLPPILDTDFPLKNNHTVLRALSQVRTVVNDVLKHYRKQTSNPTWTFDTVTIELAREMNSKKEVDSINKIINQNTRLNNEAREFCVECGINNPTYNQILRAKLYKLQNGIDPYVWAKNSENKLVDSYTLATIDKNKIFDEGYCEIEHTLPFSRSLDDSQSNKTLVLSKTNQEKGNKTPYEFLNKDEFEKFEKYLREKKTYLSYGEARVRKLLTKDFKGIDGFTQKDINNTQIISKYAGLYIDKYLKFWDNPNFNGKRRVFANNGKITSILRKAWAIGKKNRDNHLHHLEDAVLIACSTPALIKNISTFINLQTQLTNSSLSLKKFDFILQNHKSLKEYILKELTKQDTDITQINMKDEKQNKEFISAIFEIIANKNYPYDNFRDDFKTLVQNAPVTHHVKHKSNGSIHDETISKIKSKKDKGIIVRGGVARNGEYVRCDVFKTVNQKGKITYNFVVLTAQYKNYKVQDLPTPTLKQGENTTFVFSVYKNDLLSYSLKNGSKIVGNFVKVATSIIVQEPKNIENELFKKQIKGLNSSWNKTDDVINLKDIMGDKNIQKELNIKLDKTAKLGTLIQKVTTLCQNVKDIINTTYGKNIVFVMDKIDTIQTKALRQELLQKNIVQETINITLDNTKNAIFITLSASGYLPALRSDGQQKLIDLKKLKVNCLGEVIKEITKETRKEL

SEQ ID NO: 10180 - protein, 1135 aa, unidentified
  REGION 1..1135: note = Description of Unknown: Cas Enzyme sequence
MAIVLGLDLGTNSIGWALIDDEKEKIIGAGSRIFPEGVVNLGEGEGRETSKNASRTEARGKRRQFFRRRLRRRYLLRVLAKNKMCPIVYEKVKVWTNNEVFEDEQFIDWIRLNPYELRAKAIQEEISLFELGRIFYHMIQRRGFLSNSRSAGTDDNEKGVIFKGDVKIGKIGITETQDNVEEFKTLGTYLKQIQPKEYEPYVANLERIRNRYTTRQMYIDEFELIWEKQASLHTELTEELKTLLGGRKKDGYSNDGVLFHQRPLRSQKHLVGKCSFETKKTKCQLSAIPFEEFRVYQWINTVECNGKKLNESERNVLTNQLFSKEKVKFMALRKAIKKADSSFQFNYKDDDNIVGTHTISQLSNKKYFGDNWFNLSEKEQEDIWHVLYSFEDKDALKNYANRKWGFDDSKADKISKFRLKDGYANLSRKAINNILPFLKLGVVYDKAVALGGIKNAFGNEWNKFSEKDKQFFIDSIDDIAGKGKKGGYIDELKEYLKNEYDFSEKQLNKLYHHSANIEAKQLLNKLPDNVKADKEIQSIRNPIVITALFEIRKVVNELIEDYGKPDQIKVELARDLKVSKTKRNEIRKEQKRLERENDRIKTELDYIGQHYSHDNILKFKLWEECNKTCPYTGASIGIKQLFSGDVQIEHIFPWSRSLNDSFMNKTLCFTDENRAKGNLTPFEFYSRQGEKKWEQVKSQALSCFKNKQGYPNAYQKFKQFVQQKHDSDFISRQLNDTRYISKEAKNYLSKICDNVQVAPGQMTANLRQKWGLNSILNTENIKSRDDHRHHAVDALVMACSTRSHLQELTKWNRYGRTGDLKKFPMPWSNFRQDAENAIEQILVSHKKTDNVLTHRISKVKKDGKEYENLGIAARGQLHKENVYGKRVSPDGVEAFHIRKPIENLTTDKHIDKIVDPAIKKLILSRIEKLGGFEKGKNIPKETFYAIDKNGIAQPQIFLPNKNGEPVPVKKVRLKENIGGAEKLKETNQYVNPRNNHHVLVYKNENEELKEDVVTFWTAVERKKQKQAVVQLPPEDKNGEIITTLQINDMFLLGINENEIDWNDLNSEFLFEYLFKVQTLSKMFYEFRLHSNSTQIKDTKSNIFKRIQSFGAGKTGWLYQNPIKVRITPTGKIIKI

SEQ ID NO: 10181 - protein, 978 aa, unidentified
  REGION 1..978: note = Description of Unknown: Cas Enzyme sequence
LKKLSIAIDMGAKNNGVFIVKTDNDKIKEKKATTIVIGKGALNFSKKSRRENRHKDRSYKRRKLAKRLLWEFLGKNKFDLKQQELIQGLLNNRGYTFLSIDSEFEELSSDSVEFVDKYFTDLKECKTKDDFLKILDNFDSDEEVVNFCDNIIKLLDIEYKKKKEECDKDFKSNWSQIKKNIKNIRDLYIDIKKEIATGSKPRKKYLQEIEQEIKSFDFIENKKEFYLLVANISNLQLRILRKFFSDNKDRYKKLKNYFLAFHYKTDEEKQRRRELFKEINKYDNIEIFLKNTNPELTIPPYEDMNNRDTYKCNSMLIKPELITDDLKYAIDTILENENFSSLFINHNGEFKKEGTFRVKPEKGNKYIKTDFTYSKYLQRILDITPEKSTKELNPRNVFKYMKMFDNGEISSVKEFKKTFGNKIYFDLEKIATKYYEEEDKIHNGIYEQSSSIFTKCNTNTSYKDNIKHTLLKPVYSYNFTPKEADDFIEDIKATRGLKTALELISSEAKKYQNRFYNTIISCYENKQCVDDKDIKKIIKNLPNTLKSIQEILNKQNISNSYLSDIEELNSDNLSRVLNICKQTYEILFKELSGFAKTCKNCSSENAIRSDEKFTICKRLLSDVAKPIDGMLDMMIDRLAYEITQEIDSIDDIDEIEILLEQNRFEFEENLNEIKRANNSSIKKYKREDKNKLNSQYCAYTGETIKKGEYDHILPQSKEVYNSKANMIYVSSEGNRKKGAKNYTLDNLHDEHLKDIFKTTNKSEIKEKIKQGMATIKKEDFKNFESLKLTQQIALRYALFMRGTDEFNKAFELVKLDKIKTITNGTQKRLARIIYEKLAKKFPNNFENIKVNSKTIDNMLVSSTRKSLSINQKDLQKEKIQDSHSHCIDAMIVFYLANAKIKNQKSYKKETILEPIYSFDNIYLKESGINNLSKNVRFINSPQNQIGSYKLFDDTIYSENYRHITADSLKQSELETLIN

SEQ ID NO: 10182 - protein, 949 aa, unidentified
  REGION 1..949: note = Description of Unknown: Cas Enzyme sequence
VIMKKVLGLDIGSNSIGFSLLELDNKNNEIIFNEIISNSIIFSEPNDAEVRREARSSRRRNERKSARNKKARTIFTDYNISTNDFVDNTTQYLNSLDIQDTDVYRLREKAVNGTMLTKDEFIFCTYSILTDRGYNNMFSISNEDGVINEAVAHNTKEYKDKNYQLPSMVLTKYRKELETRFQNIPIRNKKDDYRNSLDREMHVEEFINLVNSQANNKDIFISKEKAQSFIDEITDESDVNTPFYQRPLKSFESMVEYCSFYNEFHPNGKQKKMPLSHYKNIQRTIRQAVDNYNAIDKKTGEIKTLTKDEKDLVVDFWIKTPSSNEINAKNIFPSADFKNLKLNIPEKSSQIVIDIKAYRVMLDILNRYEIDFQDKDKDFYNDMLLELYYYKNESSRIEHIKKHIQNYNLSLDDEFVTSVSRLENMDGFASFSLKFTNEVLELMENSSKTHHEVLEALGYYSKYLNMPTYDYLPPLEPTKRDIEWLRENISYFKPQHLFYQPMVSPKVKRVISILRKLINELMKKYGHIDEIRIETANKMNSKKEKEKIDKNQAKDRAKNNKAKAFLEENEIQESSKNLERAKLFLEQDCECLYSGENITKDEAFNENETEVEHFIPRSVIWINSYKNKILVKKKYNQDKGSNHPVEYLKSIGEWDNFKGRVNKTYIAFNKKDWLTKEDIIDSVMNKEQWLDSYLNDTRSATRTIQKYLNHYLYPQNNLYGKGENRHVFSVSGRAISELKYIWGINEVMPKDKDDKKDRDTNYHHTLDAFTIALCSNGAINTLHNHFIKKENKYKTKALKEKLTSSLPHSTDNKNVVDYLKSLVERYETNKLYVCPYNKQKRNMKGFKDGNLKLYITKNPKDFTKEILAEMQKVSIDSGILIKSVGGFPKPRSDKEVKDEIKSIQKRLDSQKQKKIIEAIEVYANELLDIRAKIKSKEDEIKNLEKTKKS

SEQ ID NO: 10183 - protein, 1337 aa, unidentified
  REGION 1..1337: note = Description of Unknown: Cas Enzyme sequence
MKKQFNDYYIGLDIGTNSVGWAASDEEYNLLKMNKKDFWGARLFETANSAEERRLHRGEKRRNQRRKTRIKLLNELFSEEISKIDFSFYQRLKESRLHAEDRFNNKKNQLFSGGNINDEIYNKKYPTIYHLRKAIIDDSYEDDIRLVYLAIHHILKHRGNFIFEGQNFDSVSSLDLSIKDLIDIISNCENISLDFSIIDVNRFEEILLNTELSKRDKTKEITNLFGKVNKSDKEVFKALLGSKFSLDILFEDESLSNDDNNKISFNEGYEDKEDDIRSSLEERYDLVEKIKSIYDWSVLKSIMSATDSNYISDARVAVYEKHKHDLIFLKQLVKKTDGVSYNEIFKLDVKNNYVAYTGHSSNLTNVKPKKVNSEEFYKFLKSKFKKYEKSNYPDYIYLFSEIDKKTFLPKQVNSDNGVIPYQIHEIELKAILNNAARKFSFLNKKDDNGITVADKILAIFTFRIPYYVGPLNSHSKFSWLKKNSDEKIYPWNFTKIVDDKASAENFITRMTNTCSYLVGEDVLPKNSLIYTEYLVLNELNNLRINGEYLKVAYKQAIFNDLYKNYKKVTVKRLKKYLINQGIMTSDDNLSGFDTELVANYKPYLDFKSVIGDKVTNTKMIEDIIRWSTIFSDSKKMLKNKIIENYSTVLSEEEINRVSKLKYSGWGRFSYKLLAEITDVDSDTGEVLSIINALRNTQHNFMQLLANDKNYLAKINEHNKKLDKDKDLNEVIDELYVSPAVKRSINQSVRILLELKKIIKKDPLKIMIETTRSEQEKVRTSSRKNRLIQLYKQCKDESRDWVKELESRDEASYRKDLLYLYYTQMGRCMYSGNKIDLDNLFNKNLYDIDHIYPQSKTKDDSISNRVLVEKRINAEKKDEYPINSNIQKRQKSFWSMLLAKDLISKKKYDRLVRSSELTDEELANFIARQIVETSQATKAVTKLAKLIFPSSTIVFVKARNVSDFRHNFDFVKVRELNDFHHAHDAYLNIVVGNVFDTKFTQNPMNYIKKIKEKNEEKYNLKRMYDFNVIRNGKYAWKTGKNNTFATVYKMMNKDSCLITRLATEGKGTLFDVNILKAGKGQVPIKGNNPSSIEKYGGYNKVKGAYFALVESKNKKGEIVKSIEFVSIMRKNFYESSDENKLIYFREIGLIQPRILIPKIRINQLFKIDGFKFTLSGRTNDRLLIRNANQLKIKKNYQHYIKSIVKVANKINEAKRNKLEYKVNEYDRIDIEKNIELYRLFSNKLTDTLYSIKFKNIGNKLKLNENKFVENAIENQCIILLEVIHLLQCNPLAADLTLLIGSGKKTGVLLISKKIDSKSKLSMINQSVTGIFENEIQIS

SEQ ID NO: 10184 - protein, 129 aa, unidentified
  REGION 1..129: note = Description of Unknown: Cas Enzyme sequence
AKSISDVAWSEFMRQLEYKSLWKGKTVLKIDKWFPSSQICSYCGANTDKKPLHIRKFTCPYCNTNHDRDINASINIRNYGLGQIDNRNTAGTVEIKACGVSSSGVTTSYGIVTSYDIMKQEAKSSLAIG

SEQ ID NO: 10185 - protein, 1121 aa, unidentified
  REGION 1..1121: note = Description of Unknown: Cas Enzyme sequence
MKKILSLDLGITSIGYSILEEFENDKYSLIDYGISMFDKATDKDGKSKKLLHSASASAAKLVSLRKQRKRNLAKLFEKFGLGEKEYFLYQEKQNIYKDKWKLRGEKAFSEKLKVEELFTILYAIAKHRGYKSLDSSDLLEELCENLNIPFAEDKKSKKDDEKGKIKAALKNIENLKCEYPNKTVATIIYEEELKNPTPTFRNHDNYKYMIRREDINDEIKKIIKAQEQFGLFNADFKTDEFISKLIQTIDDQKESSNDMNLLANCEFYPDIDFPQNKVSHQYSLIADIYKMYQAVSNITFNKNPTLRISKDQIKLIADDFFTKIKKGKSIKDIKYKDIRKILKLSDDMKIFNKDDSYQNKGKKQDNTIIKFHFVNNLSKIDNSFILKAFEKENPYQELKEIFDTLGFEKSPKTIYEKLKGKVDDKTIIELIKNKDGSSLRISSYAMIKFIPYFEKGYTLDEIKEKLKLNRCEDYSGFRKGIKYLSVSQFEKDDNLSINNHPVKYVVSATLRLIKHLHTTYGAFDEIRVESTRELSLSDDAKKEIDKANKALEKQIDTIVANKEYQKIAEQYGKNLRKYARKILMYEEQNRRDIYTGEGIEFEDIFKNVVDLDHIVPQSVGGLSVKHNFVLVHRDSNLQKSNQLPMNFVKDKEDFKNRVEDLFREHKINWKKKINLLATNLDETFKDTFESKSLRATSYIEALTAQILKRYYPFPDETKQKDGSSVRHIQGRATSNIRKVLQVKTKNRDTNIHHAIDAILIGLTNQSWLQKLSNTFRENLGKIDDEARKNIKKDIPLIEGIEPKELVEMIEDKYNEFGENSIFYKDIWNKTKTVNFWVSKKPMVSKVHKDTIYSKKEDGIYTVRENIINKFVELKLTPTTKSDEFLKKFEKNILHKMYLYKTNPNDVICKIVQNRANEIVELLKDFLWLDEKDKEVMSEAKVRLDKLIHTPLIDNNGNEIRKIKFYQTNLTGFAIRGGLATKEKTFIGFKASLENKKLKYERIDVSNYQQIKKENDNSFKAYKNDVVFFIYPDGNFRGGKIVSFLDEKNIGAFLNPKFPSSLKLQPDSFCKDKAHTGAKQHSLNKAIGIIKLNLDILGNIKSYQKIGICDGKLIDFIKKIQS

SEQ ID NO: 10186 - protein, 1024 aa, unidentified
  REGION 1..1024: note = Description of Unknown: Cas Enzyme sequence
MEMDKKILGLDLGSNSLGWALLEEANGDVSRFIDLGSRIFTKAVEEKVPTPKNVKRRDMRLGRRVLQRRARRKQRMLNYLVSLDLLPKGLQGNNQPEIILNKLGNPYELRAKALDHELDKHEFGRVLLHFVARRGFLSTKKQVAGDLIDDPDAVAYLNDLDDEPTKDKEEGEFKAYISEVRNAISESGARTLGEYLYKLEEGLCKRNRSHEGGHLRTERKMYQDELEKIWQSQSQYFSHLPDDFMVDKRGIKQIIFYQRPLKLKKDRIGKCSLERNNYRAAVARLEVQRFRYMQDVNNLQYFERHTDQWLNFSDDNKQKLIQYFEHHKKITITQLKQELGYDKPTKINLEAKNLKGNITACDIRSVLGEKWDEYSDDRQKALVEDLLSIKKKSALKTRLINHWSLPKTQAVQLCLLEFEPGHSNHSLKAINRLLPFLDQGLIYSDARIKAGYDYKKVEVVPEDKLDKPPETANPIVNKGLHELKRVINAIIKQYGKPDVIRIEMARDLEMNTKRYKENEARQAKNKKSNEDAVNAYKEQKLGEYPSHDDKIKYRLWKEQDHYCAYSLKSIPSHVVFTAAVEIDHILPFKKSLDDSYMNKVLCYTEENRNKGDRTPKDAWGSDEEKWNQITHAISQWKGLDSKVKRFYQTETDLLKRDFISSQLNDTRYISKVALEYVKQLGCDVSITKGYVVSQIRHQWGLNDLIGETDKKERTDHRHHAIDAAVIAATSRSLYKNAVAQIQRDKLKIPPPYPEFRDELEEHLKHVIISHTSQRKLSGGLHEETGAGYIERHGGLVYRKNLAPDFTEKNANSIVDNTIKELVLAHLLKHKNDTKKAFAEDITVYHKDGKTPIKRVRVLKSSTTQEKLEQNKFGIKDKSGKIFKWMSYGNMHHVEILQHQDTEKYNGVFVTMMQASHRAKGIKSELNPDGKRHSIIKHNHGDEYLFMMALHINDLVSIASEKDERKFYRLQKLDSGSNRFVLRENRASSLKNKEEELYVTINNEIFQRYDIKLHKINAIGMLISD

SEQ ID NO: 10187 - protein, 1129 aa, unidentified
  REGION 1..1129: note = Description of Unknown: Cas Enzyme sequence
MARILGLDLGTNSIGWAIRDTNQDGNQITDTNVIVFPQGVGEEKGVEFSLASERTKHRASRKLYKRRKQRKTDLLNLLIENGFCPLTSDELLVWSVYKKGQQMKYPTENFEFSEWLKINPYEVRAKAVNDFVSKQELGRALYHMCQRRGFKSCRKDADAGKDLEQYKKEQLILEQNGFKTLGEYYFDLLQNDKKVRKTKFSSDDQEVNSSRISYVEEFNVLMKTQKISKDLADAFFDAIFFQRPLKSQKGAVGKCTLEKTKSRCPISHPIFEEFRMFQYLNSIKVKESGNDKFVFLSDYPEYYKIAKDKFYRVSAKNFKFVDISKSINKEAKKNNLLFEFNYNDKYPIVGSPTISKLIEVFDADDWNDCKEQIISKYKKQDNKSIDDLVDELWHTLFFSGDFVNDITSEKVKSFIRSRFDISNEKVDYYEKINLKQGYSSLSKKAIGKILPFLENKIIYPYAVFFANVDAIIGKEKWIENKEFIQNTIIDIISIYKTQTLKIDIVNDLVGDFIKEYDNSNFDYVLDETDKKNVFEKTKLFYGKYEWDKMSDGEIIDLVNDIEREFQQQLQKRRVGGYYLIKPRVDEIIKDFLKSEYKVSQEEADKLYHPSAMDAYPQSQDNLLGLPFTKSIKNPMAMRTLFYLRKLVNSLLKENKIAPDTEIIIELARELNDKNKRLAIERWQRERENENKKFREKLEEFAKDTNSKVTETDVIKYRLCQEQNSKCLYTNKTINCEKLLGSNPQFDIEHTFPRSKSFDNSLINKTLSDKSFNQIKANRIPQDLEDNYKLNFINNTKHWRENIEALKEKIEQQRYFAKLYSGDVKKKNEAIQQRHYLKLELDYWKQKMYRFTATEIKPNFKNSQLVDTGTITKYSELFLKSLFQRVFPAKGTMVADVRKSWGLDAKDRNYHYHHAIDAVVLTCMDKSIRDGLAEAFKESEENRYSDKFKIKKPWQTFTEDVNQLKENIIVVHNHKDKIEKQTVKKLRKRNKIQYDKQGNVIYEKGQGIRASLHKDTFYGAIERENENAEKEIWFVLRKPVNSNFTDADVNNIVDEGIKTRILKHGLKNIRTTESWILLPSEKDEKGNETKEMLIKKIRVKTINKNLPKIKSQSHVSQGKRKEYKEHYYAT

SEQ ID NO: 10188 - protein, 1559 aa, unidentified
  REGION 1..1559: note = Description of Unknown: Cas Enzyme sequence
MKKILGLDLGTNSIGWALVEQSFENKQGKILGLGSRIIPMSEKILSEFGIGNTKSQTADRTKERGTRKLYQRDNLRRERLHRVLNILDFLPKHYSKEIDFDFHKGQYINYSEPKLPYFKNEQGKYEFLFKDSFNEMVEEFKKTQPDLFYLKSNGKETKIPYDWTIYYLRKKALTQKISKEELAWLILNFNQKRGYYQLSEDEQENDENKTKEFVVLKVGRLIETGEIAKKTGDKLFKVYFVNGWEYDKPTARPQDWEGKTKEFIVTTSETKDGKIKRSYKAVDSEQDWIAIKKKTEQEIGKSGKTVGTYIYETLLTNPTQKIRGKLVRTIERKFYKDELLKILLKQITEHKELKDKELYNSCINELYPNNEAHRRNIENRDFQYLFMDDIIFYQRPLKTKTHLISDCSLEYRIRQDTKEKVYLKCIAKSNPLFQEFRLWQFLANLRIYERERDGKYDVDVTNELLKTDDEWVKLFEWLNDKDKINQKQLLTYFKLKVDKFRWNYVDEPEKEYPCNETRAKFLVRLKKFNIDNSFLTQETIYHLWHILYSVTNPDERNTIDSNGNYKGAISKYAQKHNLSNEFIESFAKFPAYKRDYGSFSEKAIKKLLPLMRKGKYWNWDNFDNRTKERIDKLLTAEFDEKIRDRVREKSIHLQKNEDFKGVPLWLASYIVYDKHSEASDTKKWNTSRDITDYLNPKLKGSFKQHSLRNPIVEQVLTETLRVVKDIWEEYGNGEESFFDEIHIELGREMKNDKKTRERITKQVTENENTNQRIKAVLSELLNDGIDVRPYSPSQQEILKIYEEGIYQNPTSNYSKVKEDEIIKIRKNINPNKSEIQRYKLWLEQGYISPYTGKTIMLSELFTHKYQIEHIFPQSRYFDDSLSNKIICESEVNQLKDNKTAYEFISEFQGSKVDLGGGQTVTIFTLPTYEQHIKTYFSKNKVKRENLLSSDIPESFINRQMNDSRYISKVVKNLLSKIVREEDEQEVTSKHIVPITGAITSQMKQDWGLNDVWNDIITPRFERMNELTNSNDFGGLNPNTNKFLPTVPDSISKGFSKKRIDHRHHALDALVIACITKDHVNYITSINTERKNYSLVSKLRNIVEVDKTFKNSTGLQNIEKRKVAKEFIKPWESFTTEAANKLKTTIVSFKQNTRVINKTKNKYQKWVKDENGLLKKKIVPQTKGDNWAIRRSLHQETIHGKIKLRLIKEVSFLNGVKEWKNLVDKTLKNKIKRLVKVGNNEKEIIKHFKSEPYSINGNTVAKVMVYYFDEDKSATRKSLDTSFDENTIKTITDTGIQKILLNHLNSTKYQNQIDEKGSKIASKDLAFNSEGIDELNKNIKQLNNGKNHQPIFNVRKYEALGNKFSVGINGNKGDKFVVAATGTNLFFAIYWNEEKKKREFETIPLNEVIEHQKQSAFLPKEQRTFVPVNSEKGNFLFSLSPNDLVYVPTQEEIENPNIVDFLNLTKEQTIRIYKFTDSSDTTANFVPVGTSDLLFNLNYKEQKKRGLTYLIQNEFGVGSPQSKNQKSIDKKPLMIKDICWKLETNRLGKIESVLKVVSNF

SEQ ID NO: 10189 - protein, 1412 aa, unidentified
  REGION 1..1412: note = Description of Unknown: Cas Enzyme sequence
MEHKLILGLDIGTNSIGWALINEQDEKPTHIIGAGSRIIPLNADLRSEFEQGNKITKNATKRQKRLERRMRGRYKLRRERLINALKILNWIPENFQIHSTEANKMEISNETLAEFAQEMKVDISNIDQDKIVWFLRKKALIKKITLSELARILYHFNQRRGYQSSRKSDDSSSNNTNNEDLKKKQTKTYENVCIESVEPTEDRIKNKQLFLVTLEDGRKGLTLNQAMIEFVGQIRPLLITENKKKTGEVSFNFSVPKEDSWQYKMEEVNKQISESGLHPGEYFFSKLKADPNYRIKDNIVLREKYLSEINAIWKRQQNEHMQELFANPRLLEVLTKLYPNNKQHHALLEKKGLLHTLINDIIFYQRPLKSQKSSISECRFEKRVGKDKNGNEKIYSVKVCPKSAPVFQEFKIWQQINNIKVENKNYKDITTLYLTDIKSDLFDFLNFSEEKTGIQLKKEISRLTKLPMQELFIGFRDDQKISGNTTLHSINKVFKKYNFNGNEIFQNSVKFESLWHILYSLDKNEDVIKALLYDKTLVINEKTGETKKFNFGFTPEIAEALSKIKFKNDYAAFSSKALKKMLPLMKSGHSFSPEKIDISIKQRIEKIQNAEFDDSIDSQAYEVFGSYRTLEVFNGLKFWEACLLVYGKHSVQSDDVYKKPDNIKPLKRNSLRNPVVEQIVNETLQITKNIWQSYGKPDEIRIELARELKSNAADRKKMYDGNNKKQEENKKIKSKLINEFNLSEPSLSDIERYKLWEEARQICIYSGKVIEKSILFDKGQIDVDHILPKSRFFDDSFANKVICFTKENRQKDKQTAWEYLNQKGENELHGFIDRLKSNPNYSRRKRDNLLAQQIPDDFIERQKKETQYIAVRTRMELQKIVHNVVTTTGSVTDYLRHQWGLNNMFKQLTLPRYLELQNKSGIEFISYTKDETGKRRLEIKGWSKRYDNRAHTLDAIVIGCTSAKNINYLNKLSSLHSDSDIKINGEKLSRQAFLKQISDPTKQPWNNFVTDVESVLKETIVSYKNRKRIVTYTVNKIEKIDKSTGKKVKVAQDIPARVIRGQLHEETNYGIIKIREKVSVSIKEALDAPDNIIDKTVRKMVKDILSKYSGNIEETLKWLKKNPVKDVVTDLPIRKIDMNLLIPTYVYRIELNMNLTSKKIMSIVDKEIRDSVIKHLGKYDDKIKLAFNDEGLSIFNETRKQNNLPPITSVRIKAGEADETEESAKVLIREDFHKKHQSERGKLAVKTGNNYCVMVKEKDEDKTREIAIRSFFDAFQLTIHHEPLINYEEGFSYFSLKHYDLVYIPRPNEEIGKIDWNNKSNLSNRIYRVVKYDQSGRGFFQPHNFSTQFYIESTEGKKIGDFKNAESKSDPNGSEFVLESDNTRTKILDKCIKLKIDKLCTKIEPVFNEIIT

SEQ ID NO: 10190 - protein, 1018 aa, unidentified
  REGION 1..1018: note = Description of Unknown: Cas Enzyme sequence
MRTIRYRLALDLGSTSLGWAMVRLKGNEPIALIKAGVRIFSDGRNPKDGSSLAVTRRAARAMRRRRDRLLKRKHRMMSLLLKYGFFPADATERKALELLNPYELRTKGLSDALTPAEFARALFHINQRRGFRSNRKTDKKDNDSGALKTAISALRQQLDPYGADDKARTVGELLWRRMQDGGGVRARYRERRIQKEDGKTRIDKSYDLYIDRAMIEAEFDALWAKQSALAPSVFTEAARAELKDCLLHQRPLKPVKPGRCTLEPEEERAPLALPSQQHFRIYQEVNNLHILDKGLRDESLTRSQRDALVNALEHHSKRSFTQIKTLLKLAGTTQFNLEDVKRQELKGNSTSAILSKNEHFGPDWFGWSLERQDAIVIRLLTEESEAALVIWLQKEFGFDEIRAETIANTGLAEGYGSLSAKALSRILPALQAEVITYDRAVQAAGYEHHSHISHAATGEILPALPYYGEYLQRHVGFGSGNLDDPPERRYGKIANPTVHIGLNQIRVVVNTLIKRYGHPSEVIVEVARDLKQGWEQRKEDQEQQAKNQKRNERLRTDAAKILQVAPERVKHADIQKLILWEELSFDIAERRCPYSGVQIGARMALSDEVEIEHILPFSQTLDDSLNNKTLATRRANRVKGDRTPAQARDDFESEDWTYDAILQRAERMPRNKRYRFAPDGYEKWLREDKDFLARALNDTRHLSRVAREYLSLVCPKGTRVIPGRMTAMLRAKFGLNDILGLQGEKNRNDHRHHAVDACVIAVTDQGLLQRFAHASASAREMQLDKLVETMPLPWPTYRAHVDRAIHSIWVSHKPDHGYEGALMEATAYGIRKDGTIKQKTKADGSEGREIKNLIRINEPKQPSRHGVDAEGNPLPYIGYVGGSNYCIEITRGDKGKWEGEVISTFDAYQQVRQHGEQHLRHPTLSMSRKPLIMRLIIGDSVRVEVDGHTRLMRVVKIDPSTNVVLAEINEAGELKKRHDDANDAFRYMNLRGESFRKAKARRVTISPSGELRDPGFKE

SEQ ID NO: 10191 - protein, 1048 aa, unidentified
  REGION 1..1048: note = Description of Unknown: Cas Enzyme sequence
VRYRLGLDFGTNSLGWAIVQLDDQIPPKPIKLIRLGSRIYSDGRNPKDGSSLAAERRGPRQMRRRRDRYLRRREHFMRALIELGLMPPIEEARKALVPTNPYLLRRDGLDRALDPFELGRALFHLNQRRGFKSNRKTDRSSGKESGKIKMAIASFREAMGNARTVGEALARRMEDGKSVRARLIGKGKDEHYELYVDRSWIEDEFDALWASQQRFHPNLLDGAAHERLKGILLHQRPLRPVMAGKCFLEPSERRAPAALPSAQLFRLYQEVNHLCVETLVDRSERSLKRVERDALIGVLADCPEKGFEILRKTLFGANREAFRFTLETDNRKNLKGCDTAYRLSRKEALGDAWHCLTLAEQDELVTLLLESENEASLEADLMARYSLTPRQARHVINVNLEEGHFRLSAVAISKVLPALRDGWNAVDDAPLTYDKAVAAAGYDAAPPPDVRHELPYYGEVLWRYTQDAPNARNEDERQWGKIANPTVHIGLNQLRKLVNAIIAKYGPPTQIAVELARELKAGLEEKQRIKKTQRENSERNESIRKRLVELGARDNGENRLRLKLFLELEKAGGLGTPCPYTGKQISISKLFDGHEYQIDHILPFSKTLDDGFNNKLLVHRDANKYKGNRTPFEAFGPSRDGYDWDEIYARAIRLPKDKRKRFEEDALQKWVGKAGEFEADGQGFLARQLTDTAYLARVARQYLSSVCDHRQVYVSPGRLTAMLRGKWGLDRILAPYDDSGELRSAKNRNDHRHHAIDAAVIAVTDRRLLQRVATLAGQARAAESERLFARMEEPWESYRFEVEQAIRRCVVSHKPDHGVEAALHNETAYGIEDGPREDGKYLVRHRVGITTLKPGDESRIRSERPLSEAIAKTLEIKEPKAREAALQTLAQRYSQRKVWYLEPMSVVTIRPRAKDGGTIPDSFPYKAYKGDSNYCYELFVNDRGRWDGQLITTFQANQSAFRRFMKDEKRYRRETADGRPLLMRLCVNDLVAIEEDGVRRVMRVAQLSEGKVVLAEHFEGGPLRDYKGTSPTRPVGLPPGIKVPRLNF

SEQ ID NO: 10192 - protein, 1156 aa, unidentified
  REGION 1..1156: note = Description of Unknown: Cas Enzyme sequence
MKLSIAIDMGAKNNGVFIVKTDGNKIVEKKATTIIIDKNSINFSKKSRRENRHRVRSYTRRKLAKRLFWEFFDKNLYTKAQQELLQGLFNNRGYTHLSVDNDFEEISLKTIEFLEIYFQDLKECKSKEDFLKLLDNLDEENVVEWCNEIIDKLNIEYKKTKTLAPKDFKDDWSKIKQDLKNIRDLYLNVKKEIETGSKHRKTYLKEINKEIQNFDFFDDKFTLYNLVGNISNLQLRILRKLFNSKDRYQKLKNYFLTFHYKSNEEKERRKELFRELNKYKSLEDFLKNTNPLLTIPPYEDMNNRNTYKCNSILIKEKAALSLKDSIDILKNQPEFEVLKLNNLSYAKKLQRILDINSKIIDKSKHPREVFKYNKGDYTFYKNLLNKNYENFKEFAKKYYEMEELVLNGIFNEDDNFYICKTNTPYKNNIKHILLKPLYSYEFREDEVNQFVDKIKNTYGLKSYLEKISKNAKEYQNNFYNVIKSCYEDNKCVADKEIKSIVTNLDKKLKDIQTILDELKIDSNLKDLKLNNNNLTKVLNIFKQTYEVLFKDINGFSKTCKNCSIENSIRSDEAKPIAKRLLSDVAKPIDGMLDMLLDRLAFEIVKEIDTTNVNEIEILLEQNRFEFEENLLEIKGKKAKREDKDILNSEYCAYTGEKFIKGDWDHIIPQSKDLRNSKANMIYVSIKGNREKGNKYYTLENLSKEHLKDIFKTDDLNKIKEFIKTNLPKKENFKNFDALRLKEQIALRYALFMRGTLEYQKAYEIVKNDKLKTITNGTQKRLARLIQEKLNQNIKITSKVIDNKLVSATRKELAVDSITGEVNHLLKEEKQDSHSHCIDAMVVFYLNNMFSFDEIYTTSNEKKVKKSTIKERIKENKKINSIASTEVLFRENMLSNHYFNIFFKDEKYFYGENIKNSIEFKGFKKKHFEYLKDKNILSEFSKNQFSINKKLLYQLLFNDKNEVISNYAIFKKIDDLRYTTQKKSIISLLDKFIKKYKTLDDFNEENLFKEFIKINTSQEQTKHKNVRLKIFIAWEKLIKELLEEKEKIITQNDKTISINYTNLSKVLSKSIIFKKTHLTKRKITKEFSLPLKDTTDRPFLIRRKNNNGEFIYQVVFAKNSARGFVDDIYIHKGHKNIIPLKMEDYKKAFEYETHNYK

SEQ ID NO: 10193 - protein, 1451 aa, unidentified
  REGION 1..1451: note = Description of Unknown: Cas Enzyme sequence
MKKILGLDLGTNSIGWSLIDKENKKILGMGSRIIPMGTDKQDYEKGIGITKNADRRTKRTIRKMNKRYKLRRNKLLFILHELGMLPEQFKFKNGIPEANRIQELELLPIERIREYDETGKRKNRVYVDGKRVVQEPLSLSTYKLKAKALNEPIELKDFGKIIYQFNQLRGYSGGNNDEDVKISKEDDNSNENETIKKYEVFNQKVLIKNVEKSEAKFQGRGKNKEQEFYKFNVTVLLDEEELEGETELQNLTEKINQEEELEIRIRRNKKGELNSVVFALPQKTNWRKQMEKTEEDLKQDNLHISQLILRDLEKNKWTKIRNRVFLRHRYQAEFDAIWDVQSKIHSILNNCPKEKLEKIANYLFPGKSETQEKLRQSAINGGLKYIIKEQIIYYQRPLKPQDDKISTCQFEKEEKVLPNTHPLFQEFRCWDQINRMYITSKQEVYNEKKKKTSFQYTDRFLTNPEKQEIYNRLQNQKQLSFSEVVKIVNLKNDKTEYLNGLNTKAKLKGCDSQIEIKKKLGEYFDILHSNDKNIIENIWKAIFDNANNGSEYDPNSLKVNSIKDVLKPLNNDTLATELALKFAQSIKFPRKYASLSAKAINNILPLMQLNPINVSDKVKNNFFNIQHLVETGEILNENLLEDYVISFVQNNPKAIETGGLMYAFASSLVYGKHTAEKVKPQLNDYHEIQYENRSLRNPIVEQISNETMQVVKAIWKQYKFNPEELEIRVELARDLKNSAAERDKIYKGQKKNEEINKKLKETLQAEGIQPTDKNILKYKLYTQQRFVSPYTKHEIIPLSALFDERLYDIDHIVPKSRYFDDSTSNKVICETYINEEKSNRTAWEYISQQNSKFEIHSVEDYVRYVNDTFYGKKKKNLLLEKIPTNPVERQKKDTQYISVAVKNELAKIVGSDNVKTSTGEVTSFLRSRWGLKKLFMELTESRFKQMELWDWNKETNRPNSEWITKYFDKENEKHIYEIKNWSKRYDHRHHAIDALVVALTEQSHIQRLNNLNKHLQDELTKRKDEFKLEVKEDETIIEAFFNLEEKRREEIQKQIESSRSFEKPFEDLIKQAKNLLETMVVSIKPKDKLKVSADKFDKNTPTKDLKSQIKVRGALHQETYYGKLNGKDTKTLELSKFSAKDISKVIDDVLKKEIELHRKKYESIKEAFTGEGLKAFNESRFQRKKPSELKPPVYKVKVWYSTKEDEETSLQRLYSQNEKLSVITGDNYLFLVMEKETNKGKERVFDIASLYDSAIIAKDGLKKNMFDFKNKIAEDYRLSYGERNKAKGKPQENPDRVLFTLQQNDLVYLPENADDPIEKLNNEEFKEWLNDSENKIKFSKRVYKVVMFTGKDCKFIPHNYANSISVSKELTEKQKEDLKKKHEGKKSIPKNELNYVEFGSYRDCSPYESGEVFIKSLTADKKNKKQEIKPLKIQDSCIKLKIDWLGNISKA

SEQ ID NO: 10194 - protein, 1549 aa, unidentified
  REGION 1..1549: note = Description of Unknown: Cas Enzyme sequence
MKKLGLDIGSSSLGWTLRNDDNTFTSGVITFKSGMVKGTGGYSSPTKDRREARSKRKLIQARKYRKWELLEILLNEFVPLDKVELENWSKFKKGQVQKFPENPNFLKWLKCDFSYLGVETKYKNPYELRISALDEKKILHKHELGRALYHLVQRRGYKDIGETDKETEKQIERRGGERGFQKALDENRTIAEALLKEFLDKGLRARNQYPYRDEYEHELFEILKAQGYNVSRNSKNECQNEFVQKVRTAIIWQRPLRTQKGNIGKCTLEPTKPRCPVSHPVFEIFRTWQFINTIKYYNENGVKETLGQRQRELLYEFFLLKAKNFKFEEIRNFLDKQLKSKKRYNYPIDKEGKYDTSVSGMPTCKGLIDVFGDTARNALGNLHQYNIGNAPKIINNYSIYDLWHILFAFDNRTAKDNKFLEKFSIEKLDIANERNKKGEEINPYAKLQANITTGYADLSLKAMSKIIPFLKDGYLYNEAVVLAKIPDLLGENWGQNKDTIEALVHESNEKYNWHKTIVSVTNNLIDQYKGLEPQETFAYKDFQYHLVESDLNDIEKACIGSFGEKTWNDKTENEKQQILDEVRAEYQEFFHDERRAYRRTILLTDILKEKLKEKNIEINGKLYHHSNIENKYLKRYTDTKTGTIKLPTHIDKDSGAITEILPQPIIDSIKNPMFNKAMSIVRKLINELIKTGKIDEDTEVVIEVARELNDNNNRAAIERYQREREGKREKYREFLNEFNQKENRSINVEESIPAFELWTEQIFEEIEENGKKLNKNTSILKEKEAIKRYELWTEQKGQCMYTGKMISVTQLFSNEIDIEHTIPRSLLPDNTMTNQTVAYAWYNRDKKKNQLPTQCANYEKDVEGWGTDIKDRLGKWEETRDHWKKLYEDRLKPKGNEDETIKNKRVQEKHYFKMHYDYWKEKVERFTAEEVKDSWARRQLVDTQMVSKYAREYLKAYFRKVAVQKGGVTAEFRKIYSFQNEGKTKDRNRHTHHAIDAAVLTLIPVNSSYRERILKEYFKAKEDLQPAQNRVPFKGFDAQTIIQNIETNTLIVNYEKEKILKQTFKNVRKRGKLQYLKNKQGKFKLDENNNKIPLKAKGDTVRSELYAQTYLGKIKDVERYEDGQPKRKGSSWEYKTGKDEFIFVKREPIDKVKVSDKLIEAIIDPAIKKLVKEQKGKAEIKDYQGKLIRHVRVRTNAGKEVKERVNYTSKYDYKNKFYSESGSLPYAVLLQNNNNERSMIPIASFELAKAYKKHGSFVIDEYLKKYDKENNTNYAEYPNKLLLKVGQKVIVLKEDAEYDKRKDIDFQTKRLYVITQFKYDGSKIMLLYHLEAQAKSDIDKQVKTIKDSILKMEEIKLKIPRIEEDSSITESKSRKVDFEKRLYDFTTRLKLIEQISDIATVQRLKTKIEEYKTESSAIIIEGETPILGLTKNNWNFLFEGEDFEVSLLGEMKWIKELDQNIPGKIPSVKKNSFNEIKEKEDILSEPEGIVSKSSLKKFGTFEDATESDAKMKASITPEQHLSNVTKRIIEIYANELKKPMNKNIHFRND

SEQ ID NO: 10195 - protein, 1384 aa, unidentified
  REGION 1..1384: note = Description of Unknown: Cas Enzyme sequence
MKKILGLDLGTNSIGWALVEHGLDNNHGSILGMGTRIIPMSQDILGEFGKGNSVSQTADRTKYRSMRRLRERFLLRRERLHRVLNVLEFLPKHFANQIDFKKRLGKFKVETEPKLAYAEKEFIFKKSFEEMLADFGQHQPELLLGKNGNPALIPYDWTIYYLRKKALTKKIEKEELAWILLHFNQKRGYYQLRGEEDEDATRTAQTRSYFDSQLITSITDTGAVYKGLKVIQITLENGDSGKYFSKVVPNWIGIRKNIIATIDLDKNGDDKYEDDGTVKRRYAIPIEDDWDKKWKLVKIKTEKEIEDSEKTVGAYIYDSLLQTPKQKIKGKLVRTIERKFYKQELTQILAKQIELQPDLFSTQLLTKCSRELYKNNESQRKNLQSKDFLNLFLNDIIFYQRPLRSQKSSINNCSLEFHKYKDKEGIEHLQYLKAIPKSNPNYQEFRMWQWLSNLSIYRKEDDLNSVTPEFLSTQDDWQKLFELLNTRKEIEQKPLLKHLLEQKGFKGKLLTTEIEKYRWNYPEDKKYPCNETKAMITSRLEKVKCIPPDFLTKDIEQKLWHLIYSVTDKADYEKALKSFAIKQNLDVDSFVDSFRKAPPFKSEYGTYSEKAIKKLLPLMRLGKYWNWDQIDPASKTRIQKIITGEYDNTIEDRVRDKSISLTTEKQFQGLPLWLAQYIIYGRHSEAAAPTKWNDVNDLQDYLNSFKQHSLRNPIVEQVVMETLRVVKSIWTKFGNGRKDYFDEIHIELGREMKNTAEERKRISIQVSENENTKLRIKALLSEMANDANVENVRPYSPMQQEILKIYEEGVLNSEIKIEDEYLTISKTAQPSPGDLRRYKLWLEQKYKSPYTGQTIPLNKLFTTEYEIEHIIPQSRYFDDSSSNKVICEAAVNKLKGNSLGLEFIKKFHGQILDIGFGKTVKISDVEQYQEFVNIHYAKNRTKRNKLLLEEIPEKMIERQMNDTRYISKFISGLLSNIVRSDTNDDGVNSKKLIPGNGKITTTLKEDWGLNDVWNNLILPRFERLNNLTGSAHFTAWNKNHQKFLPTVPIELSRNFQKKRIDHRHHAMDALVIACATRDHVNLLNNQSAKSDTNRYDLKRKLMQFEKQTFVDVRTGEKIEREVPKLFVKPWPSFTQDAEKSLENIVVSFKQNLRIINKATNHYQSYKDEAGNLRLDSNGNPKKGMLLQNGTNWAIRKPMHQDTVSGRVNLQWIKTPKGKIITASRKTLDTSFDLKAIASITDTGIQKILRNYLKLKDNNPELAFSAEGIEELNKNIITFNSGKPHQPIYKVRVFELGSKFPVGQAGNKSSKYVEAAKGTNLFFAIYIDSNGKRNYDSIPLNEVIERQKQGLSPVDYKGKIGFYLCPNDLVYLPTGDETENPDRID

SEQ ID NO: 10196 - protein, 1312 aa, unidentified
  REGION 1..1312: note = Description of Unknown: Cas Enzyme sequence
MKKILGLDLGTTSIGWAVINEAETETEQASIVGTGVRVVPLTVDEQTDFEKGRPLSTNADRTLKRGMRRNLDRYQDRRMHLLQLLKQHGLITEDTVLTETGSNSTHSLWALRADAANNPIPLEAFARVLLAINKKRGYKSNRKAKDEDDGQAIDGMAIAKELYDNDLTCGQYGLQRLKAGKRHIPDFYRSDLKAELERIWNKQREFHGELLPHELLEKIAGKNQKATWAILKEPWGLVGVKRTTKGLEQKVEDYQWRADALSKKLDLEQLAVVVQQLNGSISTSSGLLGAISDRSKQLIIQDLTVGQFLYKQVQADPHTRLKGQVFYRQDYLDEFERIWEVQKEVHPQLTPELKHDVRDTVIFYQRRLKSQKGQLAVCEFEGVKKPVIDENGQPAMTKDGKPKMRKVGPRVCPKASPLFQEFRIWQVLNHVELIYEGKDGTGDERSENGIVRKGKAWCLGPEYKAQLATELTWTKELSAADALKAIGLKPKEWKVNFKKLEGNRTNEKYMEAFGAMLAVSGHDDVDLAELPAEERASTVEAVLNTLGVNTGILHFDATLAGKAFEQQPAYALWHLLYSYESDNKSRTGNERLIKQLGAKFGFNRECAEILCKMHFEDDHGSLSARAIKKILPHLKEGEIYDVACQLAGYNHSHSVNAEENEARELIDALEILPKGALRNPVVEKILNQMAHVVNKVIEVYGRPDEIRVEMARELKKSAKEREEMTKSIDAANRTHDGIRKEIAQLHPFNTGVRITRNDIIKYKLYQELSVNSYRTLYSDVEIVKEKLFSKEYDIEHIIPQARLFDDSFSNKTIELRSVNLKKGNATAMDFMETEYGPDSEQVGQYKARAERFFKKDSPGKFKKLLMKEADIPDGFIDRDLRNTQYITRVALGMLRQVARTVTPTTGSVTDRLRQDWQLIDVLKELNWGKYEKAGLTYTERNKDGGEVPKIKDWTKRNDHRHHAMDALAVAFTRPSHIQYLNYLNARRDEDHKKHKVILAIENKETYVDSKSRRLFKPPMPLDQLRAQVKQHLESTLVSFKAKNKVATRNVNKSKTKNGHIRKVELTPRGQLHKETVYGKKKFYVTTEVKVGPSFDQATIAQVAIKSHRQALLHRLHAVGGGDPKKAFGGKNALAKNPVWLDEQHKEQVPEKVKLVQMEEQFTIRKDITPDLRLDKVIDGRAKRLLEERLRRFGGDAKKAFSNLEEDPIWLNGKNGAQLKRVTITGVSNAEALHTKRDHHGKPILDADGQEIPTNYVQTGNNHHVAIYRDAEGNLQEQVVSFFEAVTRRLHGLPVIDRHLNADQGWTFLFTMK

SEQ ID NO: 10197 - protein, 979 aa, unidentified
  REGION 1..979: note = Description of Unknown: Cas Enzyme sequence
MGVSSIGWAVVEVNEDGTPLRVENMGVRKYHNGREDKSQAPLAEHRRFKRSARKLRMRFVRRRTHLINELTRLGLMPAEMDARRLVADCKHPSVAPVGAQPYALRAAALDRALPPYALGRALFALNQRRGFKSNRLVEDVDKQADLQGGSTLLEERIRDGGFRTAGEYFADLVKHGSPVRDLRTADSMEEPQSLAPTRRMCEHEFKAIRQAQEGHHKLSGEDWDRLFTIVFHQRPLAAIARGKCQFYGPQGVDRVRAYSADPWAQTARAWQDINHLKIDGDGETPPRFLSDNERRAAWALLRSRKSVTFKTLAKTLELPDGTTFNLESAKDGKLLGLATDIAMCADDMFGPAWTTFKPEDRTRIVELLQGEPDEDTVLDRLISDFGLDDDRARRVCALRLEQGTSRFSVEALQEMTSILSTLRLDKEANRYASVTDALKRMGQGPAKPEGISECLGYYARMMPELGMHEGRRKAPEERLCGVIGNPTVHIGLNQLRKVVNALLQRYGHPASVAIELGRELKQNRKEKVEWTAKQKRQRELRAKMREDCAGVAGVNLDSHGDWLKYRLWSELAPDNRCCVYTGRTITRHTLFTAEVQVSYILPRSRSMDDGIANLVLATKEAVKAKGDLTPWELYAGKPEYDALLERVATLPANKRWRFTFNALERLDDENGWLDGLLNDRRYLAKVAGRYLAHICTDVTVSSGRLTAKARHQWLTDALPEGSAADYRRVAVDAVAVALLSRGAVRLAQMAARRGDRIEVAEFAKLELACPITPSVLHANLKRLYGKISVSHRPDHGADGALHQETALPHDHPSVIDPAKRVRLVAINHQQGTHTHTKFFDHAGIHRLDLWWVPGVKAAGKVVGVPFYVHEASGLKGSKPKQTRPSREASMIACLRKGDCIRLDRGEGPELGVVRKISPSNGNFAYTPINEIARPAPDPAKGTTSNYRYVTFGRAKAINLRKVSVDVLGVVKMDNTVIAG

SEQ ID NO: 10198 - protein, 1059 aa, unidentified
  REGION 1..1059: note = Description of Unknown: Cas Enzyme sequence
MVGNPPLVKICIMPEITIEAAQWLPYILGLDIGARSIGWAIIDIRHGKPAGIRRAGVRCFDAGVEGSIEQGKDASRAAQRRQARLARRQTWRRARRARKVFGLLQSLNLLPAGDGGNPQERHRLLYELDRELLERHGCLAEPVKAHLLPYILRAFAAEQPIERFEFGRALYHLAQRRGYLSNRKAEERGDDEDDQGKVKAGIESLATKLAGRTLGQYFATLDPRDERIRRRWTSRQMYLDEFNRIWSVQAPLLGLKEEEQKRLYDAIFFQRPLKSQKGLVGKCELERGRRRAPLATLAAQEFRILQKVIDLRVRFPDAAERPLTSDERQTLIDALQESDDLSCAAARKLLKLNKRGIEFSIEEWGEKKLPGNRTNAGLAAIFGKRWPKFTSEERDQIILEVLHYQKPAALVRRAMKHWGLDREAAEKLSELRLEAGHARHSIPALKKLNDLMRHGIPYSTARKEAYPRSFTAGKPLKLLPPVMKACPDLRNPAVCRTLTELRKVVNAIIRQYGKPETIRIELARDLKRSRKDRKRIADAQREQEARRSKALSKMLGEFSSYQPKAGFDPAIEKILLAEECNWQCPFTGRTIHMQALVGRNAQFDVAHLFPRRYLDNSFLNKTLCYHDENRHRMHDLLPKQAYGGDADRWKEIVQRVKAFKGPAAAIKLERFQAEEVPEDFVERQLNDTRHNSMVAAEYLGLLYGGLWDPAGKRRIEAVAGGITAMLRNAWRLRKDRNDHRHHAQDAIVLALTGPAQVKLLQESVARASEGGQRFRLGDLDDPWPNFCGTVSAALDAINVSFRCNRKLAGALHAGTNYSQPIKGGNGPPVHHVRKELHKLSLTEISGDAIVDRAIRTLVQQKFQELGGKDPKKVFADPANHPAMLTKDGRKIPVHKARLRVGDKPKAIAERGMRQRFVTAGANSNHHCAIVALLDLSGKETKWEERIVDRLEANRRQARSRKDGSTGIIQRDWGRECRFKFSLMPNDMLTLEDEGGVRRLYRLCNISKGDYELRLHSDAREATEIRKLKQRIRVNANDLRKARARKVVVGPLGDVVDAHD

SEQ ID NO: 10199 - protein, 1123 aa, unidentified
  REGION 1..1123: note = Description of Unknown: Cas Enzyme sequence
VIPIIHADKEGTILKQYPLMQPYFEDIWHVLFESNDEDFIKVYAQKHNLNENDLVNLWYAMPVGYAQLSLKAINNILPFLREGYIYSDAVLLAKVPEIVGEQLWNENKKLITESLKTEVIAKNRDEKRIFNIVNNLIAQFKASKKKELKDYIVGSLDHLLPEKSKERDSIQILTAIEDGFGKETWNSVIEEGKEKTIAEVTNYYQQFFNSTERAFYSLPRLGDAMKKFICNKFESQFQEGIERNSFLERIEKLYHPSMLDIYPKAKTEYYKYGDIQKHTVLLGSPKIGAWKNPMALRTLHELKKLINYLIATGEIDEETRVVVEVGRELVDTNKRWAYETYQKIREDENKEFAEAIIELVNREGINASPENDSDLDKFRLWYEMLDSAEGYDKSNKFFSVEEDRTYGEVKKKANKKGKKKTDSENEEKEERYYSFDENHFDKIKKEVWLKLKKAKDNIEERYRLWKEQQFQCVYTGKFIKAADLFQPNLIDVEHTIPRSISFDNSLANKTVCYADYNRNIKKNKIPYDLKDDYPAIKQRIDRWMQKVKDLEVRVEFWKGKSKQASTKDYKDTCIRQKHLWQFELDYWRNKVERFTMTEVKAGFKNSQLKDMQLITKYAFHYLKSYFNKVDVQKGTVTAEFRKIFNIQKTDTLKDRSKHSHHAKDAIVLSVIPVAAIRDRMLEVWYKIKEQKKLLKSNTEKDKSFIEEEIKQLEEELNQLKFQCNLPKGLNSTINKLDETLLINNIARNRSLLPASKKVKVKGELKTATGDAIRGQLHLDTFYGKIQMVERDKEGKPLRKENEKWKFIEGDKAFKFVLRKEVDKNLKIDKIVDPALKSIIEKQIGNRTLSQVLSEDGGLYMLKKDGSRAHKIRHIRCFADDVSEPVSVKEQTIKGNKEHKNNYWAKNGENILCALYQKTGENKKTGEEKFDRVLEIISLKEAADLLKAGLISKIEDIENSLYRKDNKGNVVVDGNGNKEKPYAILKPDMKVIFYDENIEELQKQENENKFDYQKRISFRTYKIVKFTGGRLTFIHHLEARNDNALKVAYPENQVFKVDEKQKQVTYGGRGTSGFTEKVSDALKCNSYNNFEPWPKLLYSVDWLSMAIEGKHFEIKPDGEIEWKF

SEQ ID NO: 10200 - protein, 991 aa, unidentified
  REGION 1..991: note = Description of Unknown: Cas Enzyme sequence
MSYTLGLDIGSKSIGWALLSDKPKSSIIDIGVRVFPEGVDRDTRGAEKSKSAQRREARGARRTHKRRNLRRDKLIKTLRENSLLPLSDKDLRDLLSTKDPYQIRARGLDEKLEPHEFGRALFHINQRRGFKSNRKTGQAKEDGKVAKEAGELQQKIKEAECRTLGEYFSCLDPEEVRIRDQYTFRSMYEHEFDLLWKKQAEFYPNILTEDLYKKIHNEVIFYQRPLKPTDDLIGLCDLEPDEKRCPRGDWYARRFRILQDLNNLKIHNPDGSESELNPEQREILLKELRQKKEVKFDRIRKILGLIEIQGFNAEYEINEKGKKMDKLKGDIFNWSMRNKNVFGTKRWDSMDEKEKIELNNACLELDDDQLLERMIEEYGFTKEQADGVLKISLPQRYMSFSRKAIIKLLPFMEAGALTSEAIEKAGYKKSEQKKQNLDNIPSPEDLRNPIVNKALQEVRKVVNAIIREYGKPSKIVLEMARDVKGNTRERRELQFKMRENEKRNDEAKKRLKEDIGIRNPSRNDIIKYNLWEECGHTCVYTGKHISQSALFSDNPEFQIEHILPYDRSLDDSYMNKTLCDVHENIHIKGEKTPYEAYNHDEEKYEQIKQRTKALPWPKRSKFLQKGLNIDGCIERELNDTRYICKEVVGYIQKLGVSVRGTKGKTTAELRHQWGLNSILDLSSSDIKNRDDYRHHSIDAVVVAVTKNEHLRKLAKSKYSKVDSSFPQPWTNFREELQEKVKHIDVSHRPTHKVSGPLHEETSYGPTDKEDTFVYRKKLEDLTGPMVSKIVDPVVRQIVQDRLVKNEINIDTDKKIPKEVWNEPLYMRTTKSDKKIQIKKVRIRDIFNKMILLKDKSGKPYRAVAPGRNHHIEIIEYTDEKGNIKKDGKVVTMFEAVRRRRKVEPVIKRDHGPNKKFVCSLTINDMVMLPNKKGEKDLYRVQKMSINKQIYFRHHTAATIDNDSTLIRKQANLFDGYKVTVDPLGRIHPAND

SEQ ID NO: 10201 - protein, 1123 aa, unidentified
  REGION 1..1123: note = Description of Unknown: Cas Enzyme sequence
MENCEQNTPKSGTYTLGLDIGIASVGWAVLSEQRIIDLGVRCFDKAETAKEGDPLNLQRRTARLLRRRLYRRAWRLTQLARLLKREGIIPSAKFFKSQPPFAESTWTLRKEGLDRQLTPTEWARVIYHLCKHRGFHWVSKAEEMQAESDNSGESGRVKQGLAHTNALMAEKGYRTAAEMVLAEFPDAQRNKQGDYSKALSRKLLDQEFALLFEKQRLHGNPYAHATLETALRGTGDRKSGLFWKQKPALAGTDLLKMLGKCTFEKSEFRAPKASFSAERHVWLTRLNNLRLVVDGQSRPLTEHERAAALHLPYTAGEKFTYKHLRKALTKADLLPDDFRFGGLAYPSEQHKEEAKAKDPEDQILVKLSAWHDLRQAFTKAGLTDAWNQISVTALDGNPTLLDDIGWVLSVYKDDDEVRTELRKLGLPHADASIEALMPLRFDKFHALSLKALRNIVPHMERGLRYDEAVAQIPEYGHHSQRVVLGTGEHRYLPPFYKGRDERGTLLFREDADVPRNPVVLRALNQARKVVNALIKQHGSPVAMHIEMARDLSRPLDVRNKVKKLQDEFRDRNDKARDDFVDEFGYRPKAAVFEKWMLYREQQGKCAYSLEGLDIGRVLNDGNYAQVDHALPYSRSYDDSKNNKVLVLTRENQNKGNRTVYEYLTSFDGGEDGPRWRHFVAWVQGNKSYRMAKRNRLLRKNYGTDEAAGFKDRNLNDTRYICKFFKNYVEQHLQLAPDTSGNSAKRCVVVNGQLTAFLRARWGLNKIREESDRHHALDAAVVAACSHGMVKALADYSRRKEIEFLKEGFPDPESGEILNPDAFDRGRQHFPEPWSHFRHELEARLKTDDVAALREDMVRLGTYPPEALATLRPLFVSRAPQRLNGGAVHKETIYAQPQRLQTQGGVVQKVPLTSLSLKDLDNLADPHRNAKLYDAIRDRLQAHGGKADKAFGPNNLLYKPDKDGNPTGPVVRSVKLVIDKMSGIPIRGGIAKNDTMLRVDVFTKAGKFHLVPVYVHHRVTGLPDQAIVQGKDEAEWTLIDDSFAFLYSLYPNDLVRVQQKGKEPITGYFASCHRGTGNINLWLHDRNTTKFKAGAVEGIGVKTALSLEKFNVDVLGHSYPAPPE

SEQ ID NO: 10202 - protein, 1369 aa, unidentified
  REGION 1..1369: note = Description of Unknown: Cas Enzyme sequence
MKTLGLDIGSNSVGSAWIDTTEKTIRLGVSVFPAGVEETDTKRGSPKNQARREARSMMRSIRRRAERKRNLRALLVKTGLLPEKPDDFDRLVQHNRWPIPDTPTANDKDRTVWHLRVEALERELHPYEFGRVLVHLNQRRGALGVETDEEATDEGKIKDAIDRLKSRLDGKTIGQFMLAEMQERRTPITGKKANYAQGPIRNRRDSYEFHADRTMVRDEFNRTWAKQAGFDGELASLLTDSLKQNLDNPDSEDIWREQGAIFGQRKTYWDTGTLGRCDLEPTDRCCPELDMYAQHYRVIETVNNIRVEKRGTSKRGLTPDQRHSVIDTLRKQQRVKSNKEGKYAAIRKALKIDKSSLKKTGETEDFYSLNIERDEQREINTDRFWREIVLGVFGEEAWAAMTPRERDSVNTAILRFDKDAGGHEQRLRDGCRDWWGLDGEQSEALIKSWKARGRTEDRMSMSRRAIRNVLPYMDRFDKAAKRWPTQIEAKQAFTLDPDATDQTTGKPATRKQRVRYAHDIHCDKLRHLLLTQLDGDEGEYERLLKLRGSTKASRHFEAKHPDLLPPAPMMSNPVVRKAIHEVRRHVMAHIAAAGCTPDRVVIELAREARQSGKVRDATLRRNRDRNAILKKIESDYNLAGRSKNQRRMAQDRVLLCRRQKSVCAYSRTKDGSGVAICERAAAKGETDDGRRLEIDHIVPYSRSGDNGLNNKVLCYVEENRDKGNKTPREWWRESFERRIQPLAFVQGYSPRKSDKEEYFTKKDYARLWDNLTREVKPENEWKNSQLTDTAYAGTQVMEYLRDALFDGVQKSKGGRGVYETNGRYTGMLRRDWELQSEDGKSRDDHRHHAIDAVVIALTEPYQLLPVLAKRAEDAEEYHDRTGYWPKSDPDPTRRLIPKAWKDHLALRNQVMEAREQLLVSHRPVKTKLVGAFHKQTQFGPIPGSDGLFTDRIRVEELKPGHLRLPIPEKKRDAIKRLASVWQQQYQGEGYKPSEAKKKAKERAERIIASPNYKPRLVDPPIGKGGLVRDLDLRKRLRTCIADWRVQQGSQSSDTDFSKQDVETMAKTGKFRHASGVPIRSVIRLRTMKDPVSIALRRWDEQQNKMVPVKKNREKGRIYSSDRIFEGQNNHHIPIREDEKGKWSGNVVTAYDAMRRVRQGHGQAVDRSDDTESGGRFIMSLAEGETIHMCHPDTQEPGFFVVFKLDNPRTIHFKHHTDARLAGGRKEVIEVDGKMKTVEIPDSKREDIAVVVSDLKKKCSLPDGTPPIKVRVSPLGEITEVDERIRPVEVELPDLDPRVVAIARDALTLRDKHPNRKKDPKGKPLPGSWRWMYRQIEDKLSSQDDDGVDIADLAPQLTPALRLLQEIRTG

SEQ ID NO: 10203 - protein, 1116 aa, unidentified
  REGION 1..1116: note = Description of Unknown: Cas Enzyme sequence
MTRKQKNLGALTFGFDIGIASVGWAVLGEDRIIDLGVRCFDKAETAKEGESLNLARRSARLLRRRLRRRAWRLTKLARLLKREGLIDDANFFKKQTPFSRSLWTLRVEGLDRCLNREEWARVIYHLCKHRGFHWISRAEEKAAEGDSKSEGGKVKQGLAGTKRRMLEKSYRSAAEMVLAEFPEAQRNKQGDYSKALSRLLLNEEFAELFKRQRELGNTHVSAELETTILDRKTGLFWAQKPPLSGNDLLKMLGHCTFEKSEYRAPKASFTAERHVWLTRLNNLRILIDGTARQLNEDERRIALSLPYRQAGDLSYKQLRNALVKAGRLPESFRFAGLSYPLRHKTEKKAKDPESATLVKVPAWQTLHKTLHNRGLDDEWQKLSTDALAGKPQLLDQIARVLSVYKDGVEVEVELRKLALPNSDKMVDALLDISFDKFSNLSLKALYQIVPLMTCGARYDQACQQAGYHHSQLHKMGEGEHKYLPPFYSGRDQDGRMIFDEDMDIPRNPVVLRALNQARKVANALIKQFGSPHEVHIEMARDLSRPLNERRDIEKLQKEYRDNNEKGKAQFAQDFNIVGAVKGKEFEKYQLYREQQGKCAYSIAAIDIERLFEPGYVEIDHALPYSRSFDDSKNNRVLALVRENRNKGNMTPYEYLNGKDNSEAWRQFVGFVEGSKSYRQAKRGRLLRKDFGDKESKEFRERNLNDTRYICKFFKNYVEQYLQLHEDSEAKRCVVLSGQMTSFLRNRWGLSKVRADSDRHHALDAAVVAACSHGMVKRLSEYSRRKELAQVREGFVNVETGEIVNPAMLQRIQQHFPDPWPHFRDELKARLYLDDAPLLRAEIEKLGSYTPEALNALHPIFVSRAPQRRNSGAAHKETIYAQPEWLKKKGGVTQKVALNKLKLGDLDKLIDPHRNEKLYAAIRYRLKQHGGKGDKAFPASDPLCKPDREGEPTGPIVRTVTMVIDKLSGISLRGGIAKNDTMLRVDVFTKAGKFYLVPAYVHHSVAKVLPNRAIVAAKDEDEWLLMDDSFEFCFSMYSNDLVQIKRKGKVDILAYYASTGRATESISLWSHDRSKNVGKDGQIQSVGIKTAISVNKFNVDVLGNIYPAPAEVRRELA

SEQ ID NO: 10204 - protein, 1072 aa, unidentified
  REGION 1..1072: note = Description of Unknown: Cas Enzyme sequence
MSKLTLGLDLGPNSIGWALVREDADDSSRSEIVDIGARVFPEGVDAFETVKEKSRNEDRRIARGMRRQVRRRVVRRRKLIEALIAVRLWPAGSAPQEALYQLDPYELRRKGLTEQLEPHEFGRVLLHLNQRRGFLSNRKKDRDNSETSEMLKEINDNEAKREAGGFETIGAYLADKVANLDHKHRAEDGDDKVRNRHLARSQFFDEFAALWTEQAKHHSKLLTDKIRWGAMGPIEDSKQAVAPRKPIAKSDARRKGLSDLEAFGLHGLLFFQRPMYWPKSVVGLCELEPKQKRCPRADRHAERSRLLQEVNNLRYADPETNEELPLSEDYRSLLLEYLSTREKATFDQIRKKLGFLESVKFNLERGKRATIKGRTLDWMFAKSLGKDWHDRPNDEKNAIVDLLRENQSEDDLVVEKLINDFEFTADQAEAALDIDLPTGYVMLSRVAIDKLLPHLEKGLVYQSQSDPEKSALHAAGYLRRDELQRRLFDFLPDLERVNPRDCKLGDLPNPVVKRALVEVRKVVNAIIREHGKPDAVHVEMARSLRMGPKARGEHSSRMRKNEAEREEAAKAIRNLGERPSRDSILKHRLWQEQSLECVYCGKAISQQQLFGGATDLDHILPYSRCLDDSQMNKVVCHRECNHDKGQNTPYEWCAASDPDKYTAMCQRAGKLLRKGLMPYPKYRRFLQKELDLDKFIARQLTDTGYITRATVEYLQLLFDKVHDVLGLKGQLTAELRWQWGLDTILSELPDSPAWQEQNQLRGGEKNRADHRHHAIDALVVALTDRKRLRQLSKIVKKGGARKTGEILFEPWDNFRDHVVNKIRDIKVSHRVERKVRGALHEETLYGPTSHPEEWVVRKPVADLSSAEVERIRDRGIQRIVEKALADAGLEAGRGKKPDKKKMKEVLSQLKMPSGVPIKRVRLIKPEKTIAPLRDENSENQAYVKPGSTHHLCIFEFEEKGKKKRDAVFVTMLEATQRIKRGEPIIDRVHPERPDARFVMSLSSRELVLANVKGEEKLLAFKTAASTSGQIWFIDATEARPSKTQKVYSFNANTLNARKVTVDPVGRIRWAND

SEQ ID NO: 10205 - protein, 1289 aa, unidentified
  REGION 1..1289: note = Description of Unknown: Cas Enzyme sequence
MAQILGLDLGTNSIGWAIRDKDIENKNQILDSGVLIFPQGVGEEKGVEYSLASERTKNRATRKIYRRRKKRKADLLKVLIDNSMCPLTLDELFAWTVYKKGQVLKYPTQNDEFQEWLKINPYEARKKASEKKVSKLETGRALYHICQRRGFKSGRKDADAGKDLVVYKEEKEKRGNLTLGAYYCEQLKKGEKVRKTKYKEDDNEVNSSRISYIEEFNVINEKQKIEKELSDKLFEAIFFQRPLKSQKGSVGKCTLEKTKPRCAISHPLYEEFRLHQFLNSIKIKNKYGDNNELVFLTRFPEYYNVVKKLFFRKSKSNFKFSEISKAINKEAKKHGDFYFCNYKDKYPIVGCPTISSFINVFGAEDWEDCKEIVKNKYKFSNNKSTIQLIDELWHALFFSGDFANDDTSEKVKEFIRKRFDISKEQIEKYEKTQLKQGYASLSKKALKKITPFLKEHIIYSYAVFFANIDEIVGEEIWRKNQQFIQDTIVDIIDRYREENIKIDIINDLVGDFIKEYDNSNYDYILDETDKRNVTKKFLSFYGKTKWSDISDKEKETLQLEAENLFQTQLQKRRIGRYYLSKPRLDERIKQFLISEFKISKEETNKLYHPSAIDVYQDSKSGFLESPFTSSVRNPMAMRTLYQLKKLVNTLIKEKKIDSNTHIIIELARELNDKNKRLAIERYQREREKENIKYRSLLEEFAKQFKNYKVTDTDIVKYRLREEQNGKCIYTDEIINMKNLIGENANFEIEHTFPRSKSFDNSLKNKTLTYKSFNQLKGNKIPQELDEKYITIALNNIEHWKDKIEDLKEKIELQKYFSKIASTKEQKDRAIQQKHYLLLHLKYWNNKYRKFTDKEIHYRFKNSQLVDTGIITKYARLYLQTLFENVFPAKGTMVATVRNSWGLPKKNRDLHYHHAIDAVVLSCMTKDIRDSLAKGFKESEGLGKKEKFKIRKPWNDFTQDILEIQKDILVVHHHKNNLLKQTKRKLRKRNKIQYTINGKIKYEQGQGVRSQLHKETFYGAIERTNEKDEKVIWYVTRKNVDNSFTESDVKNIVDEGIKERIHNHRLKNIRIEQGFILLPKEKGKKEMLIKRIRIKTNFKQLPVVKKQSHISQKNRKSHKENYYATLENIFAMAVYQMVNEKGKKIQSFKTIAAFDVANHNQGKQKTEIPIEHNIIKNKGKKSEVLIPLSYVLRVSQMVLFYQNSKKELKQLSKQELSSRLYKITQFEGDGRIQLRHHIQGGADKNLKKESSLNFEKPAQKLRVSLSNFKAAIENRDFTISKSCKITFNEA

SEQ ID NO: 10206 - protein, 1040 aa, unidentified
  REGION 1..1040: note = Description of Unknown: Cas Enzyme sequence
MRTLGLDIGTTSIGWALVEDTKGHERVIASGVRIFPEGVDRDQQGGEQAKTQTRREKRGQRRQIARRARRKLQLRELLSDCGLLPTEADELEEIIGLNPYPLRLRALDEQLSLHEFGRVLVHLNQRRGFKSNRKTDKGKEEKGMLAEISALAGRLEATGSRTLGEYLAKFSAGEIEPAEDEPETIRNRHTRRDMYDDEFEAVWMAQAKHHPELLTDEMKEKVRRIIFFQRALYWPKSVIGRCDLDTRLKRCPIADRAAQRFRIVQEVNNLKIIDRTTGEERRLDADERAVVIEELSKAKERSFDQLRKKLKFTDAVRFNFEADDGSGRDKLKGHLVDCELAKKPGTNKKGYRTGALGKDYWDLDERTKDRIVAILIDEDSEERALALLQQRCGLDAEQAERVLGVNLPDGYASFSKHVIRRLLPHMERGLILMANDETDSAMHAAGFLRPDQREVDETTVLPQSPDVPNPIVRQALVEVRKVVNSISRELCKDRVAAGQRPYDAIHIELGRDAKASFEQRKKMRFDNKDRRDARETAADEIAGHGDKVTRSKINTYLLWQEQGRECVYTGKPISLAQLLSDAVDKDHILPRWRSLDDSMMNQVVTFREANAKKGDKTPYEWLADADPDRYAEVLQRAKKLPYSKYRRFTQKEMELKDFVARQLVDMRYISRLVTQYLRPLGADMVMPRGSMTAELRRKWGLNNILSEDGEKTRADHRHHAVDAVAIALTNRKRLHALANNRGEVTPPWEGLRKQAEESILAIKVSHRVQRRLSGALHEETFYGPTQKYTGDEEEMVTPGSVGEGKDRRHAKGWEEDVGAFVRRKSIEDIKNAKHLAKVRDEALRGVLAEHLRKQGVDPHGEAAYPKDAFKGANAPAMPSGVPIKKVRMIENKTTLRPPSERRDFQWVQPGNNHHIVYREQDTKKGAVWNGEVATMMDTAIRGRSGQPLVDITPETQNGRFVMSLTLGELFEIDGEDGERILCVVRKLDGTGRMHYKQHTDARPSGEIIKDNLYISPKAMQKRNARKVTVDPLGRVRRAGD

SEQ ID NO: 10207 - protein, 1064 aa, unidentified
  REGION 1..1064: note = Description of Unknown: Cas Enzyme sequence
MKTRLGLDIGTNSIGWWLYKLEAGRPVFIIDSGVRIFSDGRDPKSKSSLAVDRRVARAARRRRDRFLRRRTVLMQRLAEAGLMPTDPVEAKKLEQLDPYALRAKGLNQKLSLTHLGRALFHLNQRRGFKSNRKTDGGDNEAGKIKQGTARLEQAMMAAGARTYGEFLHMRRATAPTPRATPSVRTRLTLHQDSEDGKPVMAYDFYPDRSHLEEEFNQLWSTQATHHPELTDTLHGSLFETIFYQRPLKAPKVGRCLFMDEPRLAKAHPMTQMRILYETVNNLRITADAHPKRPLTIDQRDTVILALNQKKHTKSLSGMSLKLKALGKVIKLLPDEIFTLETQTRDAIACDLVRASLSHPDRFGPNWSKLDADAQWSLIQRLRDDENRDELIKWLMAKYGLDAEHAAATADAPLPEGYGRIGETATRNILAHLKAEVLTYNEAVEKCGWHHSNDRTGEVLDALPYYGEILDRHVIPGTQEPEDDDITRYGRITNPTVHIGLNQIRRMVNRIITEYGKPAEIVVELARDLKNSEAQKKEINITIKKNTTAAIMRGDKLVEELKQPNTGRNRMILRLWEELGSDPMTRLCPYTGTRISVGMLFTGECDVDHILPYSRTLDDSFSNRTLCLREANREKRNKTPWEAWGDSPRWDKIASNLKNLKRNKAWRFAPDAMEQFEETKGFLDRQLVDTQYLSRIARQYLDALYTEGGHVWVVPGRLTEMLRRHWGLNSLLPDHNRPTVKKKNRQDHRHHAIDAAVIAVTDRALIKKIAAVAKQDKEDGLEHFAASVPPPWEGFRNDVKASLDQIIVSHRADHGRIDPKARKSGHDTTAGQLHNDTAYGLTGEVNDKGAALVVTRKPIDNLTPAMIDKIRDPDLQRMLRVATKDREGKDFEAAIKVFVAKTGPYQGIRRVRLIEALDVIHIDDKSGNAFKGYKGDSNHSYEIWQMPDGKYKPQVITTFEAHQTGTPRRPHPAAKRVLRIFKRDMVALEHPKLGPLVCYVQKLSLANGLFLVPHTESNADARNRDKDDPFKLISMATGPLIKANIRRIYVDEIGQIHDPRGNISG

SEQ ID NO: 10208 - protein, 1020 aa, unidentified
  REGION 1..1020: note = Description of Unknown: Cas Enzyme sequence
MVRIIGIDTGIASVGWAVLDLSNEGIIDAGVRIFEAAENGKDGASLALPRRVKRLARRMADRKRRRKIRIRHLLLSYGFISDDLRLPEKGLKTGTIISPDVWQLRAQALTRKLGPHEFAQILTHINKRRGFKSTRKSDSVQNSEAGVMLKDAAALQEAQKAAKAETIGAYLSALGKRRNNPGAYNHTVTRDLLAEEVRIIFARQKDFGNDLATDNLRDEFIDAAFTQRPLKSSLDLVGLCEFEADERRAAKMTYSNELRICWERLNSLSIVTGGKGRPLSLDEKRRLIEAAHKQKEVTFKKARDLLGINESSTFNLASYRKIRGEDQSWADIVKTAEKVSLIRLEGYYKIKTALKKILSEQELMSFMGRADILDELVEIMAFYDDREEIFRLAEHLPLNNAQLEAVMPLNLSGTGGLSLKAIRNILPFLEQGEVYSVACEMAGYDHSARRDGADQKLPPFLPEFGTDVRNPLVLRALSQTRKMINALISKHGMPDFFHIEMSRELGKNFKDRKDKEREIQKNRANNEELKKHAEEIFGRAINGEDFAKYKLWKEQGGYCAYSGSRIDPRDLADGLATQIDHILPYSRSFDNGWFNKVICFADENQNKGNQTPIEYFARKGRSLNGLEDFAKRIGSDQKSKRLLMEDFDEEKQEEWKSRHLNDNRYISRLLKEHMERYLENPHEEGRIFVKTRNGALTSKLRHAWGLGLKDREENDRHHGLDAIIIAAATQGHVQAMTNWSKRHRSNHPDQPDFYPPKPWDNFRDDALGMIDSIFVTRQVNRKLTGAIHEDTIKSLRHDGEGEPYAVKRVSVGSLKIKDLENLVDVKLVNGVALGRNAALYNVLKDRLDEYGGKADKAFAAPVHMPCKKGQGPVIRSVRLITNDKSGFPVREGIASNGDMAYVKVYEKAEKFYLCPVYIKDVMAGKEPNRVIKAYQKEENWPIVDEKYTHKFDLYKNDYVRLENKKGVVIEGYYIGVDRATGAITLRVHDRAEKDIRSGVQSMMSFEKCHIDLFGKKYATS

SEQ ID NO: 10209 - protein, 1329 aa, unidentified
  REGION 1..1329: note = Description of Unknown: Cas Enzyme sequence
MKTLGLDIGSNSVGSAWVDTTGKTIRLGVSVFPAGVDETDSKRGAPKNQARRLARSMTRSIRRRAERKRNLRALLVKTGLLPEKPDDFDRLVRHNRWPIPETRSDDDKDRTVWHLRAEAIERELHPYELGRVLVHLNQRRGALGVETDEEATDEGKIKDAIDRLKGQLDGKTIGQFMHAEMLKRRTPITGKNTDYAQGPIRNRRDSYEFHADRTMVRDEFNRIWAKQAALKSELAALLTDSLKQKLDNPDSQDIWREQGAIFGQRKTYWDTGTLGRCDLEPTDRCCPKLDMHAQHYRVIETVNNIRIEKRGTPERPLMPDERDAVIAALRKTKGASVKTVRGALKINAQSLKKSGETEDFYSLNIERDEQREINTDRFWREIVLGVFGEDAWAAMSARERDSVNTAMLRFDKDAGGHEQRLREGAMTWWGLDDDQAVALITSWKGRGRTEERMGTSRRAIRNVLPYMERYDEDGLRWPTQIEAKQSFSLDPDALDQTTGKPATLEQRVRYAHNIHDPELRRVLLTQLDGDEGEYKRLLKLRGSTKASRHFEAKHPDLLPPAPMMSNPVVRKAIHEVRRHVMAHIAAAGCKPDRVVIELAREARQSGKVRQAALDRNRNREQIRKKISDDHTLASLSRNQLRTAQDRVLLCCRQQGKCAYTGETITPRQAALGQTDDGRRLEIDHIIPKSRCGDDGFGNKVLCYVKENRGKGKKTPKEWWGDAFEEKIRPLAFIEGYKPPKSDYFTKRDYARLWDNLTREVKPDEWKNSQLTDTAYAATQVMEYLRDALFDGVQKSKGGRGVYETNGRYTGMLRRDWELQSEDGKSRDDHRHHAVDAVVIALTESYRLLPTLVKQAEDAEEYHDRTGYWPKRDPEPTRRLIPKAWKDHLELRQQVMELRERMVVSHRPVKTKLVGEFHKDQLFAPVKGMTNKYTIRKGIENLTKGYVKPLRKETEKEAVSRLLPSYLKRHMDTTKKEAEKTLKKRVKSAAFTPLLVDPNPGTNSFIVRDRGLRERLRACINTWCESQANGRDVDSFTGNDVKAMVEQGAFTHKSGVPIHSVILMRTFNHPVKMPRRYWDHASGQWKYDDNPAAMRVYDGGNIHHVEIRKNDKGEWSGRFITAHEAAMRTNPKRGEARVPVVDRSDDPDKGGQFVMSLAEGESVRMLDPETGTPGIFVVYEMSKAQGNIGLKRHRDARTATGKKDSDGKVIPDSKRGEIKKIPKDLKNNYSLSDGSPPVKVRVSPLGKITEIDERIRPVEATLDELDPRVVEIVQRALELRAENPSRKKDKSGKPLPGSWRWMTRQLDEQGLDEFAPQLTPALRLLRLPGD

SEQ ID NO: 10210 - protein, 1008 aa, unidentified
  REGION 1..1008: note = Description of Unknown: Cas Enzyme sequence
LRSSSTLFSGVVMKAFTLGLDLGANSLGWAIILDEPPTDGAGLITGVRVYPGGTKTEGRNEESRNIDRRNARQMRRQLYRRSRRRRKVRHLLIEARAISDTPEALPELRAHDPYELRRKGLDQELTFAQFARVLMHMAKRRGFQSNKKAQGDARKEQNKVVKPAIDALSMQMEAAGARTLGEYLAELHARGKKVRNRYTGRAMFEDEFEQLWSKQTSFRPELWTPHLREEMYAAIFGQRPLKPVTHLIGKCELEPDEQRAPRASWFAEQARLLQEVNNLKVLPRGWGEERTLTDEERKRLLDKLMTQVSDVAVKTIKGKVLRLAETESLNYEDGQRDKMQPNKIEARLRKLFGKKFDAKADWLRVTVWEALVHNEVEEFEEKAQEWGLSPEQIDALYAIERPKGGYSRFSLKALKKLLPHLEQGKLMHEAIAAAGYKKPETEKRGWLPPVKADEFRNPVVVRALSETRKVVNAIVRKYGKPSRIVIELARETRGTIKSRKERLKFNRQQEDYHTTISASLTAQGIKPSRELVQKYKLWEECEKVCPYTGRTIAFHQLFGANPEFDVEHIIPYPRSLDNGFMNKTLCAKSENQRKSNRTPYEAYHGTAQYDEILVRIKKLPYEKQRRFKMKEIPDDFTSRQLVDTSYAARSCVEYLRQLGVSVETTRGPITAELRWQWGLNRILGKDEAVKTRDDHRHHAVDAVVIALTSKKHVNNLRRKYDFGREERFPAPWEDAGVPKEAFRQIVRASIEAINVSHRPTRKLQGRFNEETNYGAVDVEKGEYVYRVPLKGITASKAADIVDPIVRQLVCQRLEEHGVEAGKAAPAVVFSDENPLYMPGDKGPRIETVRIRVKGSNMVPIVDETGKPYRYVKPGSNHHIAIFERTDDKGKLRRCKEVVTRFEAARRKLAGEPIVRRKHPEHPEAKFLMWLCKDDMVLMDEPDGSKKLYHVQELSDKKSEEGVDITFRLHSAAIDSTETMRRVTSLSPEKFRAEKVTVDLLGRIHPCRD

SEQ ID NO: 10211 - protein, 1227 aa, unidentified
  REGION 1..1227: note = Description of Unknown: Cas Enzyme sequence
MKKILGLDLGTNSIGWSLIEHDFEKKQGKINDLGVRIVPMSADVLGKFDAGQSHSQTSERTGYRGTRRLYQRDNLRRERLHRVLNILGFLPEHYAEHIDFEKRLGQFKEDKEIKLNYKPNENGKYEFIFQSSFNEMIKEFKKHKPELFYIKSNGKETKIPHDWTLYYLRKKALAQSIDKHELAWVILNFNQKRGYYQLRGEEIDDDKNKQFVQLKVKEVIHSGEAVKGKPLFDVIFENGWKYDKQVVKTEDWIDRTKEFIVTTKTLKNGDIKRTYKAVDSEQDWAAIKAKTEQDIERSNKTVGEFIYQTLLENPTQKIRGKLVKTIERKFYKEELQKILTKQIELQPQLFTTELYEACIEELYPRNEAHRNEIKNRDFLYLLMDDIIFYQRPLKSQKSNISDCQLEQRVYFKTNKETGEKEEVKQAVKAIPKSHPLFQEFRIWQWLQNLKIYNKVDTDKGELTDVTNQLLPTDESWVDLFDFLQSKKELEQSQFIKYFIDKKLINKTEKDHYRWNYVEDKKYPFAETRAQFVSRLTKVEGIDDVNTFFDEKTQLGTKENSAFTSRIEQLWHIIYSVSDINEYKSALEKFAIKHHLNKESFVANFIKFPPFKRDYGSFSKKALSKLLPLMRRGKYWNENDISEKVKQRVSEIMERVNSLQLKEDCSSKELAEALVNVSDDDVKKQLVKSFVPFTNKNPLRDLNTYQATYLVYGRHSEVGNIQNWKTPEDIDTYLKNFKQHSLRNPIVEQVVTETLRVVRDIWKHHGKSQPQFFSEIHVELGREMKNPAGKREQISKRNTENENTNHRIREVLKELMQDASVKGDVRDYSPSQQDLLKIYEEGVYQNPKVDYSKVSEDEITKIRRSNNPTPKEIQRYRLWLEQGYISPYTGKPIPLTKLFTHEYQIEHIIPQSRYFDNSLSNKIICESAVNEDKDNKTAFEYLKVKGGNVINGHKLLSLAEYEAHVGQYFKSNRQKLKNLLSEDIPEGFINRQLNDSRYISKLVKGLLSNIVREESEQEATSKNLIPVTGSVTSKLKNDWGLNDKWNELILPRFERLNQLTQTKDFTTTNTNGNNIPTVPDTLQKGFSKKRIDHRHHALDALVVACCTRNHGHYLSALNAEKKNYGLRNKLLIKNDQGDYTKAFQMPWKRFTIEAKKQLEKTVVSFKQNLRVINKANNKFWSYKDESGNLNLDKNGKLVKKLRKQTKGDNWAIRKAMHKETVSGKYNTP

SEQ ID NO: 10212 - protein, 1077 aa, unidentified
  REGION 1..1077: note = Description of Unknown: Cas Enzyme sequence
MRWRLGIDLGTNSLGWAALELAKVEQGLAPVGLIDCGARIFSDGRNPKDKQSNAVKRREPRGARRNRDRYIRRRDRLMRQLVQFGLMPKTEAERKALEGGKGADLAQTDPWILRARALDEAITPHQLGRAIFHLHQRRGFRSNRKTDRGDSESGKVHDATKRTMQRLEHEGARTLGELFGKPRLETLLHNRAEARGARKPQPLARVRKSGDGAKWQYEYYPTRDLILDEFDKMWAAQSVHHTAVLLDEARDTLRNTIEWQHPLKSPPVGKCTLLPEEPRAAKALPSSQHARIYQEINALRVGRTGETKVPLTLEQRNDVAERLLHPTNKTAEVTFDQIRKLLGLSSYDTFNTESEKRKKLKGDETAARLMQSNCWGKAWFDLELATQDEIVKQLLEEENEDDLFAWLAENYGLDHEQAVAVADCPLPSGYGNLSEKALTLLLPHLASGVRVYSEAVAAAGLHHSQFGTGEVFEDGLPYYGVILERSVAFGTGDPDDSDEKRYGKVANPTVHVALNQIRAVINDLIRRFGPPEQIVLELARELPLSARGKSELEKKQSDNQQENEKRKVQLEDLRVANTYDNRLKLRLYEELEALGKRCVFSGDQINLSTLFTDEIEIEHILPFSETLDDSFSNKTLATRQANRGKQNRSPHAAFGHSPSGYDWNEIAKRASELPSAKKWRFEPNAMERYENEERDFLARQLTDTQYISRLATAYVEAIYGGQGHAGGENHVWVITGRLTSDLRHHWGLDSILRGHNEPISEAQKKNRDDHRHHAIDAVVIGCTDRAMLKAAADEARRQEETFSARLLAGISEPWDSFRDQVAEKVRGIVISHKPDHGFQDAMHNDTAYGIPKGPDGEPDKKGIRTVVTRKPLDSDAFELPEHLQKIRDIPIRTALLESTQGLTGKAFKVALLATAHAMRPPVYRVRTEEKLNVIPFTDKQGNIYKAYKGDGNYCYDIWLGGKGKWTGEVISTFRAYELSRDDKNWWTKKTGRAGQPLVMRIRKGDMVQIELDGKSAIVSVYKFSEGRIYMAKHNEANASARVRKKELKEVAMAPSALQKAKAKRVTVSPSGEVRVYQ

SEQ ID NO: 10213 - protein, 1057 aa, unidentified
  REGION 1..1057: note = Description of Unknown: Cas Enzyme sequence
MKDHSNRLVLGLDLGTSSVGWCLIEEQQPKQASPQAVTHPQRIIDMGVRIFPEGVDRSRGEKSLNEDRRLARSLRRQTYRRERRKTRLLHRLIEAGLLPENPQQRQQLWQQFDPYQLRAEALVRPLSPFELGRALYHLGQRRGYLSNRKTGDDKSDGVVAEGISTIQSAMQAGGFATLGAYLHSLNHAQQSLNDKAEPISKPTRIRQQYTSRQMFLDEFDLIWQSQKSFHCTVPHLAQRQAIWQAIFHQRPLRSQKHLVGYCEFEPQRKRAQVATLAAQEFRIVQLINTLRVNEEGDHERYLSSQERQQLLQHLQLTKILKWPKVRKALALPDHAEFNLQHTKEQGLPGNISAQLVASAIGKSAWNRLPIAQRQQLIFDLLNIDADESLEKRLLNHWQFNLDVVQKLKKNCRQLPTGYMHLSHKAMSLLNQHLIRSYADLHSNEIKLLKQTLEALPNRFHPISYHHAVCLAGYQASAHQAVQKQTRLPFPGQFARRGQHAVDNQVAITDLRNPMVERSLYQVRQVVNALIDTHGMPQLIRVEMARDLKITRRQREDDQKRLRNHERANEEIRKKLIAYGIEQPNRAQLLKYRLWQECEACCPYTGLSITMDELFGEAAQFSVEHIIPYSRSLDNSQMNKTLCANTERQYKGNQTPYERYSEDWQRFAAIKQRIKCFHPAKRKRFLKELVDPQAVINFQRNDTRYIARKAREYLSQLDCEVEPINSGQLTTILRKAWQLDDVFDAQETRTFDYRYHAIDALVIALSSAHHIQQLNHYTASHDGYRIQFLDYPEPMPSLRQQTLGALKTMVVSHKPQRKIKGPLHDETAYGLMNKREPNYKAIVVRKPLASLSSAKQLHDIRDEKIRRLALAHLEQHSNNFKNAFQNPKQPFGMITKQGLFRPIRKVRMMASRSVVPLGKNKKGKAQRHVWTRSNHHMAIFSSTDPQGKESWQAEVVSMLEAAQRHSQQQAIVNNQDQIDARFVMALHRNDLIELEHEGKRGIYRVEKMDQLGRVSFRLHHDANTKDKKRAVRLTVNALRTKFIRSIKVSVLGKPIGAH

SEQ ID NO: 10214 - protein, 1041 aa, unidentified
  REGION 1..1041: note = Description of Unknown: Cas Enzyme sequence
MSDLVLGLDIGPASLGWALFSGKSIVDCGVRIFPEGVDRDQQGGEKSKSQSRREARGIRRQIRRRSQRLRQLKDALVEAGLFPSGAQEQEEILSQNPYQLRTKGLREVLTPHELGRVFLHLAKRRGFLSNRTTDRSGGGELKGIKADMAQLEADISSAGAETLGEFLGQLNNGKEIPVRLRGRHTLRAMYEQEFEKLWHVQSSFHPQLLTETLRYGMEGKNSYPLVPVPRKKRESLLQRFGLHGLLFFQRKMYWPKSMIGRCDLEPKEKRCPKADRLAQRFRILQEANNLRLISPTDRKEYTFSGRLGEGADRKLVEYLCEAKERTFSQIRKKFKLPDSVQFNYERGERSKLKGHETDAAFSGKKGIGKKRWSEISDKVKDEIIRIVLEEDREDIALLKLSNDCGFSMEEAQMATALHLPSGYMNYSRLAISKLLPYLEAGMPLMGNDASDSALHAAGYLRPDEREIRRYDQLPEPPDVPNPLVRQALYEVRKVINSIIREYGKVEAIRVELAREAKKSAEERTQIRIANAKRERMNSKIANTLQELSPAIKPSRRNIQRYLLWQEQGGICIYSGQTISQAQLFDSGEVEVDHILPRWRSLDDSMANKVICHRKLNNEKGDRTPWEWLGQDKQSFDELLQRTQCLPYGKRQRFIKQDVKLSDFVERQLRDTTYISRLVTQYLKGLGVPISTVKGHMTAELRHVWGLNSLLNEDGSQKKNRSDHRHHAVDAIVIGLTDAERLSDLAKAEGKDVKMPWNNFRSEVLKTLMSINVSHRVRRRVQGALHEATIYGPTQKKELAVPQEERPWAKDWVEGQQIVVRRKAVSDLTNTKHLGKVRDITIRGILQDHLRSQGVDPGKPGAIPKDAFSGSNVPKMPSGVPIKKVRMVEEGQTFRPVREGNNTQFTKPGSNHHIAYFATTENGEEVWKGEVTVMWDAARQAKDPSKNGNLVRRDDGRQGRFIMSLSIGEMFELMQDDGEVVLCVVRKIDQRSKRVFFKYHTDARPVADLNKENLYLTPKNLQKRHARKVTVTPLGKIRHAND

SEQ ID NO: 10215 - protein, 1108 aa, unidentified
  REGION 1..1108: note = Description of Unknown: Cas Enzyme sequence
MQTTLGLDLGPNSIGWTLIEEHTDQAQGRIIDMGARIFPEGADNFDSKKEKSRNEDRRLARQMRNQVRRRARRKRRLRDTLIELGLFPSDPTEQQELYDADPYELRARTLDEELTLHELGRVLLHLNQRRGFCSNRKRDRKDSEVSGMLAEISDLAADIAQSPARTLGEYLHLKSQAMDHAAREVDDHIRGRHTQRQMLKDEFDLIWKSQQTHHPEVLTDELAYGALGKLKDIHKPIARHDTRRKGKNDLESFGVHGLIFFHRTLKPIPKNIIGLCELEPKQKRCHKADRQAQWFCVLSEVNNLRLIDQSTTPPHERPLSDQERALLLDKLKQTKEATFEQIKKWLGKLPDSPPAEQIQFNLEQGKRTRMKGMVTDALLGGSRGMGEAWYQLPESTRDAAVRELIESVDDDLTHETLVQELGLSAEQADQLLGVELAEGYLKYSLKAIENLLPHMERGLPLSMKEETESAIHVAGYMRPDQLQHRVFHCLPDPQRVRDARIGDIPNPVVKRTLVELRKVVNAIVKEYGRPDAIHVEMAREVRQGSKARSETASRMREIVAEREDVKKFLKDNNQRYGSRGINIRKAQLWRQQNHDCLYCNQKISQAQLFTDGQTDIDHILPYSRCLDDSQMNKVVCHRQCNHDKGNQTPYEWLADSDPVRYDRVCQNALSLVRSKKLPFKKFRRLIQKELQLNEFINRQLTDTGYIAKVTAEYLKCLFTDDENRRGAVLGLKGQLTAELRRQWGLNQLLRDDEQDTKSRDDHRHHAVDALVIALTNHSRLQRLSNIHKQGGVLTTGEALDFPWDTFRDDAIQCLEQINVSHRAERKVAGALHKETFYGPTQETGVYVVRKKVEDLSPNEVPSIRDDAIRKIVEQRLAEHGIEVGRGKKKDNKKFKQALADVHNPLAMPSGVPVKKVRLLVNDQTIQPIREGTDNQAYVSPGSTHHLCLFEWKDKKGKTKRGSVFVNMLEATNRLKKQKQELTRRQTQWQEKGLSQDKIKYRTAQTMREIAAAHPLIQRTPPRDHDKIPPDADFMFSLSRGEMVLADVKGEEELLVYNTAASTSGQMWFYANCDARKQSDRKKLSFTPNTLQARKVTVDLLGRVRWAND

SEQ ID NO: 10216 - protein, 1050 aa, unidentified
  REGION 1..1050: note = Description of Unknown: Cas Enzyme sequence
VIADANSSKDELILGLDLGVASIGWALIATHNTKRPIVAMGVRRFEAGVDGGAAKIEEGKATSRAKVRRDKRQVRRQGFRRARRMANLFYLLQQNGMLPAGPSKKPEERHAILQRMDAELGKKFADHCNAHVVPYHLRSAATDSSLDLSLLEIGRALYHLAQRRGFKTNLKAANDEEDGVVKQGIGQLYQEIEEANCQTLGQYFATLDPEQLRIRGRWTSRQMFLDEFELIWKTQAGSHPELTDKLKEKVHHVIFFQRPLRSQKHLIGHCELETAKRRAPAASLEFQEFRYLQKLNDLTYWDEGCQPQQLSDQQREKLITELEANGDLTFKGIRKLLKLKTSKQNPSLHIFNFEEGGDSRIPGNRTASKLFAILGTQWTSMQPVERGGLVDSILSFQSAPALRKHLVSKWGTSDENAQRIVDCRFEDGFGSLSRKAISRLLPHMRQGLNYYQAEIAEYPEARKMDAIYDRLPPVNVVFPSLRNPAVLRVLTELKKVVNALIRKYGQPTKIRIELARDLAKSNRQKQAIFKRNRENEKSRERAIKGLLADMGEKYVTPGNVLKVRLAEECNWDCPYTGRRMEMATLVGENPQFDIEHIQPFSRSLNNSFLNKTLCYHEENRSRKKNRTPWEAYGETPSWDDMLMRVKNFIGPARNKKLELFSAHAIEEGFAQRLLSDTQFVTKTAADYVGLLFGGRQDSDGKLRVEARTGMLVSYLRDVWQVNRILHGGNQKNRADHRHHAVDALVVACSTNGTVKQLSDAAKRAEELGIRHKFDDVELPWKNFIKDATTAVNEIIVSTRVHRKLNGQIHDESNFSPPSVDPESKKTYHRIRKPLSSLSANEVEAIIDPAIRDAVKSQLIRIGGAPAQAFKDEANLPYIRGRNGRFVPIKKVRIRSRILPKLVLGKGDSRRYVAPGNNHHAEFLLKFDNHKESAVWDFTVVSLYDSMLRSKKGQQGSCEVIQKDHGPGAKFMFSLVPGEHLEVEIEPGQRQVVRCLSFSDGDLELILPEDARPSTERKASRIRIRSAKRLTEIQPRKVLVDPIGQVFPAND

SEQ ID NO: 10217 - protein, 1127 aa, unidentified
  REGION 1..1127: note = Description of Unknown: Cas Enzyme sequence
MINQKIILGLDIGIGSVGWGLVQLTEEKYIDEKADGTVLEKYKICDGKIIDTGVRTFQVPQDRQKKSLALQRGLARRSRKTIRRKARRLKRLIRLAREFDLITDDFNHDNVLKPKKGDKESKWDIWLVRKEALERKLSDKEFFRVLYHIAKHRGFYFHTKAEELQKEKKGSEEGKVKAGLIRVGKKLEDSKWETVGQMFWEEFNQKNTKNNRKRNARDKYQNSIPRLLLKEEIETIFKKQQELGNPKAKEEFKQGYIDEIMMKEEGIDEDKLQRMMSRCEFTGSLCAPKESYTAERFTLFNRLNTLELVDTNNKDRNLPLDDTQRNIIEALSYKNAKVSFNQIRTELELQDDLHIRFNLCSYSEKNPEYNKKLICKIEKGNLQFEENHKIPVVDINTGEIRVLNEEIKKIFRSKKLWPNSKKIHVYYSDIRKQLNLSRDFRFADLKGYTKSTTELGSETKYIKQFENDTFIELKGYHKIKKAVKDNCNESKWIGLVAETKNLDIIAEALVYHKSDKTRTVYLEQKGVNDKEIMDAVLTINMKQLANYSREAMQKLLVCMEKRDLFNEAKEKAGFGKIEYDKQTILKPYSGFFENNPVVARVISQTRKLINAIVRKYNDKYPIDQIHIEIATELANSEKRKIQIAQGQKRYKEDKNAAEEECKIFGLDPQEGQNLLMFRLAGQQNYLCPYTRTKITLYPTGAVNEVYIKDCEIDHVIPMSRSFNDSLNNKIICTQKANQDKSDKIPFGWFEKMYGKDSRQWADYENFVKKMYGIPFAKRRNLLRKSWTEQDKEKFLSRNLNDTRYAEKEIANYLRKHFDFSKSKRDDIKDVSRIQVRSGGITAFLRHMWGLNKNRGENDLHHATDALVVACSTYGHVYLVSNLARQMERKGKNWFKHFDFLKDKFKPWPIVRKDIQAAVENVFVSRMPRHTVTTGAHDENPESLIEKRRIKKAMKKNPNKIIDSLPIKNRVIKFNKGYAEMGDMVRADVFVDKDGKNYVVPIYSVDIFSNKPLPEKYLNKNDAPYDQWSSINEGKLKFRFSLFKDDLISINDQMYYVDYIRATRSKISVKKVDGSLINKIKGEKTKETGYRNVKLKKYSVDMLGKYKEIKQEKRLSNRFEHKNRALEN

SEQ ID NO: 10218 - protein, 1053 aa, unidentified
  REGION 1..1053: note = Description of Unknown: Cas Enzyme sequence
MGNERHHPYVLGIDLGVNSCGWAMLGLDAAGKKPTCILRTGVRVFEAGVTGDVQSGRDASRAAERREARLRRRQTARRGRRLAKVFHVLQRAGLLPEGVSSTGETRDAIIKKLDDEIAARRGLKKDPRLAHLLPYVLRATALDEKLEPHELGRALYHLGQRRGFLSNRKAPIKEDEELGVVKGAISELAQKMEAGGARTLGEYFSRLNPEEERIRKRYTSRSMYADEFEKIWAAQAEHHRQRLTAELKKELERAIFFQRPLKSQKGLIGECELEPGRKRAPMALLTAQRFRMLQKVNDLEITHGKTGEVYRLTDDGREGERATLIDALETQGDLTFPKIRKLLGLPSRPRKTEFNLERGGEKRLPGNRTAARLREVFGAERWDGLTDNERDGIVDEMRCIQKDDVLAIRAMKAWGLAEDAARRLAGIRLEDDYCSLSKRALRKLLPPLEKGVSYATARKKLYPERFEAAEVSDLLPPLDRTRAGTQLRNPAVARAVTELRKVVNAIIREHGKPDIIRLELARDLKRPRKQREEVSKRNRANQNAREDAAHRIAEEARQWVKGPSRADVEKVLLAEECGWICPYTGKPISMRALFGPSPQFDTEHIIPFSRSLDNSFVNKTLCDNDENRNRKRNRTPHEAYSSDQDKWQEITGRVKRFKSSAAGVKLWRFTLDKAGLERQFEGFSSRQLNDTRYASRLATEYLALLYGGKTDGTDRLRVQVGAGQVTSLLRSEWGLNSILGAGEKTREDHRHHAVDAVAIALTGPGTVKMLSDAARRARREHRRRFGSIKSPWPDFADGVRESIENITVSHRVSRKVSGALHEETIYSRPIKDENGRECYHARKMLDGGFSAKDVDNIVDPAVRRRVRDHLKKHANDPKKAFSDPNDMPYMVSRKGKKIPIKKARICKAVKPAKVGQGKAVRQAKLGNNHHVEVVQTGRGKAGVRWEGRVVPMLEAYRRRRAEEPIVRLRHEDGAEFIFSLSKKDCVQIDEPDGSRGLYVIDKITPGIITLAALNDARQKADAERFGRSADKLRQVSCRKVAIDPLGNVRYAND

SEQ ID NO: 10219 - protein, 994 aa, unidentified
  REGION 1..994: note = Description of Unknown: Cas Enzyme sequence
MNSYTLGLDIGSNSIGWALLDTGRKPRIVDIGVRVFPEGVDRDTKGMEKSKNATRREARGARRIHHRRTLRRRQLVQALRGAGLLPEGKRELAALLKKYPYEVRARGLDKEVGLYELGRALYHINQRRGFKSNRKSEKKQEEGQIAKAAGDLQGRIDDAKCMTLGEYFAHVDPEDERIRGRYTFRSMYEKEFDLLWAKQAEFHPDVLTEDLQRRIRDEIIFYQRPLKPTDDLIGDCQLEKDENGKPLKRCARGDWYARRFRLLQDVNNLRIWNPDGSVEKLTDEQREIVLDELSRKKEAKFSTIRKKLGLLETQRLNAEYEVNERGKKNEKLVGDVFNAGMRGKKVFGPKVWGGMEEEKKIRLNDWIVDLEDEELVEKLTAEYDLGEEQMESILKIFLPSGYMSFSRKAIQRLLPLMEAGKRTDEALDEIYPDRRKRDTVEEVEKLGLPSDLRNPIVNRALFEVRKVVNAIVRAHGKPGRIKVEMARDVRGNARQRKELHFKMLENERRNEEVRKRLIEDDIVSKPSREDIIKYKLWEECGHVCPYTGKQISQTALFGSNPTFQIEHILPYSRSLDDSFMNKTLCEVHENIQVKGNQSPYEAYSHDPDKFEELKQRVNRTAMPYWKKRKFWQKEIDTDEIISRELNDTRYICREVVKYLKGICRNVTGTRGKATAELRYQWGFIKDRDDHRHHAIDASVVAVTKNKHLRELGETKYSSEGAKFAPPWGHFREELGEKVKHINVSHRANRKVSGALHEETNYGPTGYKDVKGQDVFVYRKKLEDLTVAMVEKIVDPVVRAIVKGRVVEKGVDLSKSGKIPKEAWSEPVYMKRTKSDRKVRIKKVRISGPVSNAEAIRDRDGRTYRYVKPGSNHHVEIWEYTGGEKQGTRDAEVVSMFEAVRRSRAGEPVVKRERGANATFICSLAINDMVMLPVGDEQMDLFRVQRMSVIGQIYFRGHTAATIDDDSTLIRRQGHLFDGYKVVVDCLGRVHRAND

SEQ ID NO: 10220 - protein, 989 aa, unidentified
  REGION 1..989: note = Description of Unknown: Cas Enzyme sequence
MGSYTLGLDIGSKSIGWALLEKGKKPLIVDIGVRVFPEGVDRDTKGAEKSKNATRREARGARRNRGRRNRRRDLLVETLKSAGLLPKDEKELEDLLKREPYQFRAKGLDAKLSLFEFGRALFHINQRRGFKSNRKTGKAKEDGVVVKAAGELKQRIEEVGCRTLGEYFAGLNPEQQRIREQYTFRSMYEEEFDKLWEKQSEFYPDILTEDLRKKIRNEIIFFQRPLKPTDELIGQCELEPDEKRCPRGDWYARRFRILHDINNLKIISPDGSEDALNKDQRKIVFEELNKKKEVKFSALRKKLVLIETQQFNFEYEEDEKGKKRDKLKGDQLNAAMRSKSIFGPKMWDSMDESEKIKLNECFVDLDDDELIEKLAGEYGFNKKQIEAALKVELPSRYMNFSRKAIEKLVPLMEKGKRTDEALAELYPERGQKRTEQKERLPLPEDLRNPIVNKALFEVRKVVNAIIREYGKPRRIKLEMARDVKGSARERREKHFKILENEKRNEEARKRLVQDMNILNPSRDDVIKYKLWEECGKQCPYTGKHISQAGLFGSNPEFQVEHILPYDRSLDDSFMNKTLCEVHENIHVKGNKTPYEAYSHNQEKYEQIKQRVKNSAMPYWKWQKFWQKDINTDEIISRELNDTRYICREAVGYLKQICPNVTGTRGKATAELRYQWGLIKDRDDHRHHSIDAAVVAVTEPRHLRELGRTKYSVEGIKFSPPWPHFREEVEEKVKHINVSHRPNRKVSGALHEETAYGITGLKDEKGQDIYVYRKPLDALTIPMVAKIVDDTVRDIVKNRLREKGIESDGSERKIPKEVWKEPLYMKTKKSNKKVPIKKVRIREVIGKANVLLDKNGKPYRAVKTGSNHHVEIFEYIDRDKKGQRDSEVITMFQAVKRSRDGKAVVQRDHGPSTKSFCSLAINDMVMMKNKEGETDLYRIQKMDKNKMVRFRHHSAATIDNKETYIDKTAHLFEGHKVTVDPLGRIYPAND

SEQ ID NO: 10221 - protein, 1015 aa, unidentified
  REGION 1..1015: note = Description of Unknown: Cas Enzyme sequence
MNKERIVLGLDIGVGSIGWGLVQIREEEYCDEREDGTIDKKYRITDGKIIDMGVRTFQIPQDRQKKSLALQRGTARRSRKTTRRKAQRLKKLIKLAKEFNLFDKNFNRDKTLKPQKGDKESKWDIWFIRKEALERQLTDTEFFRVLYHITKHRGFFFHTKAEEIQKEDYKSEAGEVKKGLARIRKKLEDGGWETIGQMFCDEFKQTNKKYKRKRNTQDKYENAIHRSLLKEEIEIIFDKQQKLGNRKAAEELKQRYIDEVLMQEEGIDDNKLQKMMSHCEFTGGLCAPKESYTAERRSLFDRLNTLELVDTKNRDKNSPLDKGQRDKIIDLAYKNAGGVKFAQIRKELGLQDDLHMRFNLCSYKEKNPEYNKKLVCNIKDGRLDFEEKHKLQIVDINTGEIKALDKEIKEIFRKRKEKWKKAKKLYVYYSDIRKQLNINNNFRFSNLKGYTKSATELGSKAKYIKQFEDKDTFIELKGYHKIRKAINENCGKEKWEQISNDVNKLDTIAEALTYCKSDETRRDYLHQNNITDKEVIEAVLTINMKQLANHSKEALKKLLGYMETGDLFHEAKEKAGFGKIEYEKQAILKPYSGFFENNPAVARVISQTRKLINALVRKYQKQYPIDQIHIEVATELASSEKRKNQIKQGQNRYREDKKAAAERCREWKLDPEEGQNLLMFRLAEQQNNKCPYTGKAITFYPTGADNEVYIKDCEIDHIIPMSRSFNDSLNNKVLCSPEANQNKRDRIPFEWFEDNYGKDSLQWMEFENRAKKMYGMPYPKRKNLIRKSWTEKDKEQFLSRNLNDTRYATRHIADYLRKYFDFSKSQRDDIKDVSRIQLRSGGITAFLRHMWGLNKNRGENDLHHAVDALVVACSTYGHVYLVSNLAKQIERKGKNWYKHFGRDKFKPWDNIRDDIQSAVNNVFVSRMPRHTVTAAAHKETILSKAEETKKRVIEINRGYAEMGDMVRADVYVDKAGKNYVVPIYSVDIFTNKPLPDKYVPHDRNLPYEQWPSIFD

SEQ ID NO: 10222 - protein, 1152 aa, unidentified
  REGION 1..1152: note = Description of Unknown: Cas Enzyme sequence
DFIYLFMDDIIFYQRPLKTKKSEISECRYESRSFIKDGKKETVGIKCIAKSHPLFQEFRLWQWIKNLKIFAREEEVNGKLEMDVPVTELYLKDETDYEALFEFLNERKEVNQKALLKHFGLNDKTHRWNFVEDKTYPCNETHAQIISRLAKVENVPANFLNKATEQHLWHILYSVNDKKEIEKALESFAEKYGLDEKSFVEAFKKFPPFKKEYGSYSAKAIKKLLPLMRIGKYWKEDEMLSQIDSYHSNIQNVFDKLRSKTDSEKVINYTLLSELEKIDDDIESYKGLALHIACYAAYGKHSELTETRYWKTPKDIDNYLKEFKQHSLRNPIVEQVVTETLRTIRDIWQEMGGGEENFFDEIHIELGREMKNTAENRKYITNRITENENTNLRIKAILMELANDSTVDNVRPYSPYQQELLKIYEEGVLRSGVDVPDDIGKISKLSQPSRNDVIRYKAWLEQKYRSPYTNKMIPLNKLFTPAYEIEHIIPQSRYSDDSFSNKVISESEVNKLKGNQLGVEFIKNNGGQKVQLGNGETVEILKTNGYEDFVKTQYKDNGAKKKKLMMEDIPKEFIERQINDTRYISKMIMGLLSNIVREEGESEIRAKKVVPCTGGVTARLKQDWGLNDVWNEIITPRFERLNEMTGTQDFGEINPNTNKFLPQVPLNQQRGFSKKRIDHRHHSLDALVIACATANHVNYLNNESHIRKGKNKEEKQKIRFDLQNKLCYKTKPDENGNYKWMFFKPWDTITQETRKVLQSTVVSFKQNLRVINKTVNRHQKWMKQTDGSMKKELVMQKGKNWSIRKPMHKETIYGKVTVKTDRGKTASINKVLENPKMIIDPNIRKIVITKSKELNKDVAKLKKYFKANPIQINDQIVDHVQIYEWVKGTASRAELDTSFTKDKIKKSITDSGIQKILIRHLEQEKYQNQKDDNGKIIQPEELAFSSEGIEDMNKNILALNDGKLHQPVYKVRIYEAGNRFAVGETENKTSKYVEAAKGTNLFFAIYADEHGRRTYETVPLNEVIAHQKQEAHLPKEERTPIPLKNEKGRFLFALSPDDLVYVPDKEELENPASVDFDNLTKEQVNRVFKMVSSTGYQCMFIRHDIATTIKNKYEFSPLNKMERAITEEGEMIKEICWKLQVNRLGRIVKVIR

SEQ ID NO: 10223 - protein, 933 aa, unidentified
  REGION 1..933: note = Description of Unknown: Cas Enzyme sequence
LRKNQLVNTLKTAGFLPENKEQLSELFKKNPYQLRAMGLDEKLGLYEFGRALFHINQRRGFKSNRKTDKVKKEGKVAKEAGELQEKIDKAGCRTLGEYFANINPEEKRIREQYTFRSMYECEFDKLWTKQRGFYPEVLTEDLRKKIRDEIIFFQRPLKPVDHLIGDCELEPDKKRCPRGDWYARRIRLLQDVNNLKIIQPDGLEQKLTSEQREVLLKDLSNKKELSWDKVRKLLGLIETQEFNLEQGKMKKLKGDVLAIAMKSKNIFGPKQWDSIDETEKIKLNDWLVELDDDELIEKLASEYNLDEAQRDRVLKISLPQRYMSFSRKAIIKLLEFMEQGALIHESIAAVYPDRGKTRVGDEALDELPLTEDLRNPIVNKALFEIRKVANAIIREYGKPTKIALEMARDVRGNAKERRELHFKMLENENRNKETRKRLTEDLKIRNPSRDDIIKYNLWEECGHSCPYTGKHISQAALFGENPEFQVEHILPYNRSLDDSYVNKTLCDVYENAHVKGDKTPYEAYSHDEEKYEQIKQRVNSTKMPPWKKRKFWQKELNIEQCIRNLNDTRYICKEVVKYLKQIGINVRGTKGRITAELRHQWGLNSILDLTGEDMKNRDDHRHHTIDAAVVAVTDNKHLHKLAQSKYSTTEHNITQPWPNFREELAEKVKHINVSHRVTRKVSGAMHEETPYGPTGKMDEKGQEYYVCRKKLEDITPAMIKKEKIVDTVVQQIIKDRLTEYGIDPEKAKKLPKEVWNEPLYMKTKKSKKKVPIKKVRIQDVFNNMILLKDKSGKPYRAVATGNNHHIEIFEYKDKKGQTKRDGKVITMFKAVQRSQRGESVVCRDYKNGKNFVCSLAQNELFMIELKDDSTELHRVQKITQSGNNITITLRPHTYAGKVSDSDKPPLVQRRSPNTLKGHKVTVDMLGRVHLAND

SEQ ID NO: 10224 - protein, 1058 aa, unidentified
  REGION 1..1058: note = Description of Unknown: Cas Enzyme sequence
MEGNLGYRLGIDLGTHSIGWAALQLEGEAVSDLIDAGVRIFSDGRNPKDGSSLAVQRREPRSMRRNRDRKLARRQGLLKTLREHGLLPADPESSKVLEALDPWILRAKGLDHRLEAYELGRAIFHLQQRRGFKSNRKTDSRDNEGGAIAEATARTEQRLIAENCRTLGELFGRRRQQIQQDNASLKKGERYPQPGARVSPFKEQGNKIGYDYYPTRALIHHEFQALWNAQRVHHPDLLTRDAYEAVEAAIFFQRPLKPQIVGKCTFLHDEDRASRALPTLQRLRIFQEVNHLTYRLPGEAAQSLTLQQRDKVVAKLCSTSKVTFDSLRKSVLKLPPLARFNFETSRDHLKGDETAAKLTSAKRWGPDWRKLPLQAQDAIVQRLLEEEDEERLVEDLILAHGLSAETAQNVSQTPLPTAHAALSLQAAKQILPVLKDSVITFDKAVQEALGQSHAQLDSQEETLKQLPYYGAILQRHVMGGTQNPQDRSEKRYGKVANPTVHVALSQLRRVVNDTVQRYGPPDQIVVELARELPLSAKGKSELKSQQKKNEKANDERRALLAALNQDDTYNNRLRVRLWEELNPNDPLERRCPFTGEQISAERLFSDAFEIEHILPSSRTLDDSPANKTLAARHANRYKRDRSPFEAFGQSLDGFCWEDIAKRGALLPANKAWRFSVDAMDRYENEETDFAERQLRSTQYIARLAATYLVCLVGDPGRVYPIPGRMTSDLRHHWGLNSLLNTDGESGKNRNDHRHHAIDAIVVGLTDRALMQALARDARRERREGDARLIDRLSEPWPNFRKTVQDRLDQIVVSHKPDHGVQGALHNDTAYGLIGEPDKAGKRDVVHRVPVESLDKPEKLSMIRDPMIRNHLQSQTEGLNGKAFVSALVAAGEAMSPPVRRVRICEALTVIPISNGRDKAFKAYKGDGNYCYDIWMGPKGKWVGEVVSRFDAHKKGFDPNASTTRAGAPLLLRLRGGDMISIERDGAAEIMRVVKMTKGSICLARHTEGGALKARDADASDPFNYLIASPSRLQKLKAVQLRITPSGQVFRDRRYGRPG

SEQ ID NO: 10225 - protein, 1428 aa, unidentified
  REGION 1..1428: note = Description of Unknown: Cas Enzyme sequence
MKKLGIDLGSASCGWAIRDDNEIINKGVITFSTGMTKGQGGYSSPTQDRREARSKRRLIQARKYRKWELLEILIQNDLVPLKIKALELWSKYQKGIQRKFPETEEFLQWLACDFSYDNGDSYKNPYEIRVKGLDGKLTKHEFGRALYHIVQRRGYKDIGDNNDETKIQKERRDEGFGAAIHEHKFISKALQIEFLDKGKRARNEYPFRDEYEEEFEALCKKQEYDVSKNKKGEYNNDFVKKLRKTIIWQRPLRSQKDKVGKCTLEPNSPRIPVSHPLFEIFRTLQYINTIKTVNENGEKTQIPKEYRDSLLIDEFTRRDSNFKFSIIKTYLDKKFQQKMEYNYLNKRTGKYDSTVSGMPVCKNFIALFGKEIVTDLLKLSDYNITSEIPKTIKGYSIHDLWHLIFNSDDVSFLKDFAENKLKIESTFKEKDGTKIRENEFANLQKVFMQGYSDLSAKAIRKTIPFLQEGKLYNEAVVLAKMPELLGDDWQDKKEAILNAIAETSVLYDYNSDVINIVNGLVNAYKGLNYDELFAYKDTDYLLAESDISDIEKACFNYFGGKTWEIKEDKEAVLNDVKNEYQFFFKDSKRTYRKKVTHTELVATSLKKIGIELNGDLYHHSDRKNIYPKPIFSEKYELNILAVPLIDSIKNPMFNKAMTILRKLINELIIQGEIDEFTEIIVEVARELNDNNKRAAIEKYQNERERNREKYREFIREFNSKENKKININERIDDFELWTEQIFDENNKKIDDKSSNRLSILKETKAIDRYELWTEQKGQCMYTGKMISITQLFSDEIQMEHTIPRSLLPDNTKANQTVCFRKYNNDIKNNQIPFDCPNYANDDSNGSAIKPRLATWQKLKDKYQKDFNDNKRAKGNEDEKKKNERIVRKHYAKMHLDYWTDKLNRFTCDEIKESWARRQLVDTQMVSKYAREFLKTYFKKVNVEKGIITAQFRKIYGFQEEEEIKSRNKHTHHAIDAAVLTLIPNNASRKKALLEKSYEKQERREGQYTTSPYPNFNAQELIRNIEETTLIFNHTKDKIISQTYKKVRKRGEIQKNKDGSIKWMKGDSIRGDLYGQTFLSKIKNVELDENNKPKRDEKGAWEFKKGKDEFTYATKKPIEEVKAKYIKDIIDPNIRTLVGNQKKNNKIFDHQDKEIRHVRVKVKKGRVVKERVNYRSKNEHKNFYYASAGEIPYAVMLEKIIDGKVEERKMIPIAIHEVAKVFKEHRQFNADLYLNFFHNEIKRNYNNWRLLRIGQKVMVLKNDSEFEEVVDINFQRNRLYKITQFKYDGSKIMLSYHLEAQSKKDIDTQIKEIKHSILTNFELEIGLSKLIPNENIENAKDRNEDYQKRKNNFKGRLEIIKNHSNGGSETSKKIEAEISKYKTESSSIEIEGMTPILGFSQKSWNFLYEGEHFEMDVLGNIEVLVEKLT

SEQ ID NO: 10226 - protein, 1056 aa, unidentified
  REGION 1..1056: note = Description of Unknown: Cas Enzyme sequence
MKRILGLDLGTNSIGWAVVNERENDEERSSIVNMGVRVVPLTSDEQQSFDKGKALTTNADRTQKHGMRLNLFRYKMRRDCLITLMREGGLIKDDTLLSENGNRTTFETYRLRAKAAKEAISLEELARVLLMINKKRGYKSNRKVKPKDEEGQTITIDGMTVAQQLYDSGLTPGQYVFSLLEKGRRNIPDFYRSDLQSEFDKVWNFQRTFYPDTMTDELHDALSGKNEKQTWAICEQPFGLKGVKRTAKGDELTKENYKWRAESVKRKMNFEQLAVVLQKINGQINASSGYLGAISDRSKELYFNHQTVCQCLMAKLDADPNFSLKNLVFYRQDYLDEFERIWETQARFHKELTPELKRKVRDCVIFYQRPLKSQKGLISFCEFESCEKEFEVDGKKKLKMTGLRVCPKSSPLFQEFRIWQTLNNVKVTGKIIPDRQLNLFGESLTYKQGSRYLEQEEKEILFSELSIKEKLTKKDILHKLFINYKELDLNFKEIKGNTTQASLFKAYQKIIELSGHGAHDFSAMPAEEVVDMVSRVFEALGINTQILNFDSSVEGKDFERQPAFRLWHLLYSYEGDKSVTGDEKLVKKLTELFGFEEEYAKLIANVTFEQDYGSLSSKAMRKILPYIHDGVEYSEACALAGYRHSIRSLTHDEIESKELKDHLRLLPRNSLCNPVVEKILNQMINLVNSLIAEYGRPDEIRVEMARELKKSGKEREEATAAISKVTKENDEYRKTLEEEFGMKNVSRNDIIRYRLYLELQENGFKTLYSDTYIPKEKLFSKEFDIEHIIPQAKLFDDSFANKTIEARSVNIEKSDKTAFDYVTNKYDKGYAEKYKDRIESLYNKGAISKTKRKRLLTREEYIPDGFIDRDLRNTQYIARKACELLEQVTRTVVPTTGSVTDRLREDWQLVDVMKELNWDKYDKLGLTEIVKDKDGRNIRHIKDWTKRNDQRHHAMDALTIAFTKHSFIQYLNHLNARGDKASSAYGIEKKELYRDGKGKLKFVPPMPLNEFRAEAKRYLNNILVSIKGKNKVVTQNVNVTKAGGKAKKTNKRVQLT

SEQ ID NO: 10227 - protein, 1408 aa, unidentified
  REGION 1..1408: note = Description of Unknown: Cas Enzyme sequence
YYIGLDVGTGSCGWAVTDTSYNILKVSGKSLWGVRLFPTADTAAERRSHRCARRRVFRNRQRLNLLEQLFDSEISKVDVGFFQRLKNSEFKEISKNNLFGDCTYNDKDFFKEYPTIYHLRYKLMNEPIDDIRLLFLAVHHIIKQRGHFLFENVNNIGASLPELWEQCCSQFVDISLFSNLSEDYLDIAESLKQNLIDMRDDVINVIKTSSDKKADLNKVFAQLKSVYDEISDYEVKKTIENRVNKWFLLLLGYKVSAVEIFSIDESDEEGSSCKIQINSSDYDEQLLKIKDEFKGVVESEKAVYDVIKLQEILKGCKSISEAKVKLYNKHAEELRIFKNLLRERLSEKILIEVNKNVKVANNEKLTSDPKSFYKEIFEERNKNTEKGKICFYYDITHGDKSANKEAIKGSSIYKRLQILAQILLCSSEIYKLSEKEKVLLHRIGDLSIFETQVSADNSVIPYQINLAELDKILKVQSKNFAFLSEKDDAGVLVYDKIKALLTFRIPYYVGPLNNHSKFSWIVKKSQEKIVPWNFESVVDTEKSAEAFIKRMTSKCTYLSGEDVLPKNSIIYSKFMVLNVLNNIRINGMRLDEAQTGLTKKVFDELYCNQINVTQKQLVAYLYNNGFLTSKEELTGFDDEQKVSMSSYVKIKNALGTGNFDINFAESFIKYSTLFPNDYLMIEKRLKREFSSECAKFNENLSKLCRIKFSGWGRLSEKLLTGLLGHNKNSEFDKNSILGFMLNGKGNLMELLSSEYTFSDLISSENSTLDKNDAFSYQNLVEGLYVSPSVKRMIWQTLLVVREITKKIMGYEPSRIFVEMARGDTADQKGKRTNSRKKSILALYDKCRQDFDISDLSSKLENEKDSKLLSDKIYLYYTQLGKSVYTGKEIKIDEFDLYDIDHIIPQSLTKDDSLDNRVLVEKEINQNDKKNRYPLSSEIQENQKQFWKHLLDLGLISKSKFERLIRSTPLSNSEKEGFIARQLVETRQSTKAIAGLLSKLYKTAKIIYPKAGLTADFKQRFDLIKVRELNDLHHAKDAYCNIVVGNVYYEKFTSNYLYVIENNEPYSFSTSDKSYIFTKQNEKRLQETGTWDSRNGKSISIVKKYYKRNNILMTYKQEERIGALFNQTLYGPEKGTIPKKKNMSCQDYGGYDSDQNSFFSFISYKDDKANLKTKLIGIPLRVVYGLSDKASAISHYLLTEKANEYREPKVLIDFLPFNFILKDNETGFLARVVSFASKGKQLEIKQFNPLVLDEKNLKPLKAIEKFVSRLKNKSIKIKYEKDKSGFTDEDLSSIYSELKDKSKNSVFKNLPKPIVKMLSDVDINNYKYQESEKSEPKLLTIEQKAVAICELIKAFHTESSNLLFLGEKKGSGVKRIKTVLDLEKTDYSILCSSITGFYEKEIRLRDLLK

SEQ ID NO: 10228 - protein, 1003 aa, unidentified
  REGION 1..1003: note = Description of Unknown: Cas Enzyme sequence
MKKKVFAFDLGKTSIGFCVREGHDIKEADSIIIDKDHSDISAIRDLRRIKKTLKAHKSREEYFNNLWKDCGLEALPKTDIRFTKEFPSIGENIIYTSCLLRIALLQNRPLEIWQIYKALHNAIQRRGYDSNLPWKSAQTDDDKKNEEYVKKYTQENGIELIKNEKYKYPCYYDAVRLGLWEEDKPVELKNKIPFANYNKVRTTSYVAPRQMVIKELSELWENAQKQIPELNKFSVEEFLYGEYKQAYGSYVDPKFRQYLGTKNDWQGVLGQKIPRFNNRIIAKCKLLPKRNVCKADTIENVSLVLLMKLKNLRLTDISGEKVRLSVIDINKIYENWLQKIKDNNYKLDRTITLKEISKVTGRKFADKLEPLKANLSGRSSFCRRACDIMKKVILSGELYPQNMDVTEFTDPEGTKNGITEDEIRTMLDKIGDWNNLYIPDNRDENAQNADTPRIKTDIMIGNITNAVVRNRLQIFRDLLVNLAEKYGKPDEVIFEFVRDGADNSLFGQEKTNSFLKIQNANEKENKEIRQELEENDAYSLSNFEKLKLLRKQGGQCIYSGEPISVTNLDSCEIDHIYPRTMGGNDALYNKVLCLRKENQAKAGRTPYQWLSDDEERWAVFVDRVTCLKSSLGKKKFELLTSKPEDCEKLIESYNGLAETAHIARVAQQITALIFGWGLQVKDENRHIFVNNGSSTAAIRRRYGLNSLLGNDFKKNRDNDKHHALDAICISYSRDFKYDPKSQKDIIEGFNPETVAKVIDNIMPYPYTNKKLFKGNTRPQETIYGMRTIGDKSYITNRVGITDIKQSSTAIKNIIDEAIKQDLLNKLEEKMSAKEWVEMLSDYTHPTKKTKVKKVMVAVSEGTVEKDSNGRRRIGRYVDFGTKGVLNQFKRSKGHRGQILYYDEKHKIKLFTLYSNKSQKEAFSELLKKDYELYNKGEIYSGGCLIFIPENFSTGTKEYSSGKYKLNNIRSDGRVEMEDSNGIKIQTTMSNLAKHNFNRYVDFY

SEQ ID NO: 10229 - protein, 1269 aa, unidentified
  REGION 1..1269: note = Description of Unknown: Cas Enzyme sequence
MKKTGRTTLGLDLGIASIGWCLFQDDEEGNHLRIIDLGSFVFNQIEDQKTGQTENVARRGKRSMRRQRRRKARRLAFGKALFKRELGVDLDAYFGSEEKGRPSPMDLKIKGLSEELSATELSVALYHYLKYRGFKSNRKNEKKNKEDGKMLAAMKSVEEDLGGRHITQYLLSKVPQSGDPAKIGFRYHNAEGEFNLTVNRDWYLAEINALLDKQIEFGVINEAFKEAFLNIYTRQRDFSDGPADGPYKHDIGNLLGKCIYDGKERLPKDSYKARKFVFLSALAHFTYDGYDENGEFKRRLHLTADQIDKVFKKRFGPSKVTYKHVVDAAGITYTKIKGCELGRKKYNSEFKKFCSEKNVEDGNLTSALQDEFDERVRELALASVFFKGSEFLAEISKLCKAYEKQGRKHEAAFLSKPDALDALAYVSIRAKTDKKIDEICQKEPDGDSPLSKFSLDERAFLAETLKGMSAEATKTIDLSEGIVDKVIPYLETGVVYTEALYKSGVLKEGGRTSLSIRKDKDFIPSIEIALQEMQETLRNPVVKHTLVQLRRLLNSIISAYGKPDEVYIETGRELKKNFKDRKKIHNSQIEGRDDAIEARFEIFAKFPTVFPSIESIKHDDVLRYRLYKEQHGFSPYTNASIKETEIFSNNDRYEIDHIIPFSRSFDDSYNNKVLVETAQNRAKGNRLPYEYLGSLDTIDRFLSDHPIYNRKKRDNLRRKTFIREEDSTFLSRDASDNSYISKLARKLVETYVLPEGKFCHPVSGAMTEKVRSLWHLGGLKHSYVPGSSYTTKYRVRSIDDYIYEKMEVAYDDGHQPYIAFTLSVGGKNQVFKIEKNKKQGSKELTAKAKDENDLIDKFIQNIDYLNAKFGVGVKLTEIAAKSHVAGGNPHDALDSPEYQTFVINRLYQQVYRGIDEKDRDNHLHHAVDAAVIASCTPAVIKRITDYFEKKEVAEQSLGERVPPPYPDFWQELVLRVYERDINVILDKITDLEFYRNHPDASEGIHVLYPARLPSKDVKGAISKETIFGTNKNGQVTKTISVKEIKESDIDKISDVDGGSKGLKESIRLWLREGKPTEYPILKTKGTPIKKVRIIEADKADSKLKFADRDARLADQSDVIRVRIYKKKDGSDDFLYFVPVYYFHIWRESENAKRKAKGQEPFSDVKYEIMWAIGHSEKLSDSELNARFDLLLEFNRYSLVELTMRNGRNGMAYTGGLTNGTFEIYSILGDNFDMTHDGFIGSSDVERIRPGVNTIASVKLKNISPLGKIS

SEQ ID NO: 10230 - protein, 1178 aa, unidentified
  REGION 1..1178: note = Description of Unknown: Cas Enzyme sequence
MKKEKSRIYNSMAQNLRDKLAGRKYSLGIDPGVGSIGCAVVALEEGEDGNLFATDIVYANSRVFKSSEGAQERRLKRGMRNSIRHKAHRLKKLWGLLASMGMMLPVSDKEVENPAELRFSSEMLKRNPYELRLKGLTEELSLEEIGVALYHIANHRGASSVRVFADESRSKDEDREIEQCKASEEFVRKYHLQTFIEVLEKAKEESAKNGEAIGYRNKTKFNSVPIPTRDIIGSEVDALLACQKKFHPEVLTDENIEKIKEHIFFENDKIVPEPKDCPYFKDEKCLPKASFINEERRLWEALNNVRIVYPKKGMSRAKEDAMLSKEEKEILFDYLRSGKELDGLRKVQNLLNKYDDAEDIKLQGTTKKTAKIKGFRFRKLEAEQFWGKFSVKDQDDFIRAFVNIPDDGQLVSHLCKRFGFSKDEAKRILKDTTCLVQGYAPVGRKAMEILMPYIKDEGLSYKEAEGRAINEGKLIDSAAELTYDFLPYYGVVLPAHTQDIAGKAWHSAFEERRKNGSFISPLTNRDEERFGKIANPVVHQTLNELRKLVNEIISIFGYKPTSITVELGRELKLGKEAREELSKDNVKKNKENQRIYETYCYPNQLGRKYIKVFKLLEQQENKCPYCLGAISVDQVAHGGADLDHIFPRADYPDSSENNLVVAHKNCNAEKGKRIPSTAFSDTPKWKDIIAFVDSTPGMSRKAWRFKTTQEQYVESLRSRDFFARFKTDNSFAARITIKYLQSLYLPEDRLKSVISIRGGETALLRKAWNLNGVTSVLGALHEIVKEDQADKKDRADVRHHALDAIVAAYYTHSFKKMIGTAQGKGDSLEELITRLPIPKYYRSTEGLSQDNERDAFRQTVKNFITYNAYASFKSDNSTNGQLIKDTQYSVVAANDKALILVTKKLTKNLSVGMGAVKTLEGNKSGSVEYALMNYDRTPEWVSPEEHISIDKMIAHNKKQYEAIVDAMGNAEQELVQENIRLEADGKRPKAIDEKMIVGRACSIIGGFYYQIKNNDRRKIFLKRLPSAEEKGSGFDTGSSYCVDFYHDNKGKLRAEIIRKVNICTKGYIPQYVKEGYMRIERLFPKDVLEVDSTLRTDPNKIEPCSVKTPNAPTDRTFIRIATFTENGNGVQVWFNSLYDAKDSATNGSFMVGSLSKLNARKVTLTPAGLILYRSPIIK

SEQ ID NO: 10231 - protein, 1542 aa, unidentified
  REGION 1..1542: note = Description of Unknown: Cas Enzyme sequence
VNSFRYAAKVGFSFDNDKFLMMKKILGLDLGTNSIGWAVINAETEREDGGEKVGLKPVGIEAAGSRIIPMDAATMGDFEKGNSVSQTKARREKRTARRMLERRQLRRERLCRVLSLMGFLPEWYASCLDRHGKLLPGMEPRIAWRKDDNGIWRFAFMDSFLEMVSEFKSKYPDDASMAIPYDWTLYYLRKKALSQPISRQELAWILLSFNRKRGFLAMRTDEQKDDENGKKREWLSLTVVEVEKAETTGRGTSWNVTFNNGMVWRGKKSPRPLDDWVGKTKDIIVTTTLDEKGNPKTDKEGLVQRTFSAPSADDWSLLKLKTESDMDKGGMTVGEYIYTHLLEHPAQKIRGEVVRTVGRGYYADELHRIIRTQKRFMPEFADPDLLRTCAEALYPLNDVHRQSLQGKDLAFLLTDDILLYQRPLKSKKSLISNCQYELRHDAYGNVRPVKCIAKSHPLFQEFRLWQFISNLRIYYDDKDTTDMLLGDWDKKANLFKWLSDRKEVDENALLGWKGFGIPKDKEQRSHYRWNYARGTDKSAKKYPCNETRALMLPRLKKAGLGEGWLDERRMEALWEILYSAIDQQEYEKALATFADKEGVIGKDEFVEAFKKVPAFPKDYGSYSAKAIRKLLPLMRCGEHWHEADIPQCVMDRIGKILDGEDDPSIDQRIRDKAAGLRSVGDFQGLPLWLACYVAYGRHSEASDTEIWTSADDIDNYLMDFRHGSLRNPIVEKVLLETLRTVRDIWKTYGKPDEIHLELGREMKNTADKRRRISERNATNENANLRIRAMLTAFMNPEMEVADAKYFSPSQQDLFKIYESSVLESEDLPDDISEILKKFNESATAKRPSEKELLRYKCWLDQKYLSPYTGRPIPLSRLFTTDYQIEHVIPQSRYLDDSFNNKVICESAVNALKDRQTAHEFICSHGGETVSVGGEKQVRILEQSAYESLVQEKYAHNQAKKRRLLMDDIPDEFIERQANDSAYISKFAKSLLSKIVRDEGEAEAVSKHLISCSGRITDMLKQDWGVNDVWNAIILPRFVRMEGKTDGTKFTAMTAEGHLIPSIPFEYRKGFNKKRIDHRHHAMDAIVIACATKDHVNLLNNEAAKSENKSNRYALQRKLRRSEKYVTPDGETRELFKEFTMPWPSFKDDIRRTLDGIVVSFKYRNRLLTKTSNHYQRYVRQEDGILKKKLVAQEKGELLAVRKSMHKETVFGNVNLRLTGTVPFAVAFENPDNLVNKEFKEKLKSLRQSGYDAKRAKKYFEDNKDEWSEVNLRQVERYVFSNDTKDRYYATRFTTELTGLQKAKDGIWKKLDQITDASISKILRAHLKAEGGDAEIAFSPEGIERMNANIAKFNGGKNHKPIKKVRKFEKANKFAVGEAASKRHKYVEADKGTNLYLGVYGKPILDEISGEESIQRKFKYIPMRDAMDRIRKGLDPVPEINKEGYPLLFTLSPGDLVYFPSHEERKSGQPVTPLRGDGIYKVVSCGSAGHDYAEFVPESVASPIVDKVEYTVHNKTANTDDGEQIQQYCIKLSVDRLGRVKIL

SEQ ID NO: 10232 - protein, 1545 aa, unidentified
  REGION 1..1545: note = Description of Unknown: Cas Enzyme sequence
MSNEVKQYFLGLDIGTNSVGWAVTDENYNVIRGKQFEVDSKGNVIKKNSVHLLGSRLFPEATTAQARRVNRNNRRRLIRRRWRIILLRELFENEMNKVDPTFFTRLDNSFFHKEDKQIDIQDMNLLFKGDKKESSYKTIYHLRKEMIKKANKKFDIREIYLVMSHMIKYRGNFLETGTYNFNSEKGISEILENDFKQLNDCLENLKSEELYEQKNIGTYDMNYFDAIYNLFKDTNGINNIKNSDGTKSFINDTKSLAYKLYLAIIGGTVKLKEIYEIIYGKDETDTYDEELLKLPLPYSSENFESDLEKLHLDEQIADLIIKGKETHDHRKLIYLLKGSASLSESMVKMYDNHHNQLQKLKAAIKKYKPELYKHFFSEFSQKDEDKTYADYIGSYYDKKDDKKPGKMIRGPHCKKEEFYKSVKTILGLDVKDKASLPDDLKKIAKYIEEDNFLLRQNSPDNGVIPYQLNEMELRQIIENQGQYYPFLKEKGKAYLNKEKEEYKLVSLLKFKIPYYVGPLSNKGLKDDKEKDKHNHWAQFKENQENIKIYPWNFEDVVDLDKSEEKFIERLTNKCSYILGENCLPKFSLYFQVYKILNALNNVTLNDKSLTFEEKKDIIEKLYLNKSKVSVNDYKKYFKEKYKDELGIDNFRTNNLKEFDKDNELIIHNLSSFVDFKDILGDDFYKDKHLFDKAEEIIILRTKIEDDERLEKHLKNVLPDLTDEQIKQICRLKYKGWSPLSKKLLVDLKSDFVDQYTGEVKSYNILQYLLYTNNNFMQLYEGKEVESKNTFKEQVEKYNSEIRDSNQINIDDLIDQTYVAPPMKRALHQTLNIIDELKKYLGHKTNNPEFKFDKIFVECTREKQESKKIDSRKKQIGDAYNEAKKQAKEMANEIDYLQQNELSKYSDDNLRGKKLFLYFMQLGRDVYSGEKIKLDELESKYDIDHIIPRAYGYKDDSFNNTVLVRKDLNNRKQDIYPIPSEILSEKGREWVKKLYSLKRKDKTSYFMPKEKMNKILSRVGLSDDQITGFVNRQLTMTNQAVKAVCDTLINIGYDKSKIIYSKASFVSDFRNYFNFIKIRDLNNYHHAHDAYLNIVVGNFYNKYFTNNFTKAKYIEFRNDRKTINTDSQHLFKCDRKLGTSNNYYWIAPKQVKILEKIKGEIQAAKDINWEDYLKLKENVNKDYKIEVVEYDGGTYDTIKKTLTKYHPLVTHMMYENKGAQGIFNKSSVSPAKECSSGLVLKLKTKENLDYPDRYNPEKYGNYTDLSTPYYMLVKYNYVKKGEQIFEYRILGIPQVFLMQYRNGTTIDEAKVKNYVIQLIKTDSKIELNDNDIEIVVNKILIKSCVELINRDDSHLTQALAVTGRSGKNLSYINTKELNIDSMYQRYLKKICKFLGTNLPSGKKVDLQQYEDLIKQEEGIVEFTKLTNISKNENLEFFEYLQSVVKKEYLDLISIFKKLVEFKPEQFNNEFDIITQVRIIYQIIQMLSCGKFAITFELIKGIKPNSKGTIVSSIFKSSIFLNDEEFRIINYSSTGLFKRILFSNIKD

SEQ ID NO: 10233 - protein, 1148 aa, unidentified
  REGION 1..1148: note = Description of Unknown: Cas Enzyme sequence
MENNEKKYYLGLDIGTNSIGWAVTDESYKLVKKDGKHLWGARLFEEGKDSKPRRTARSNRRRLKRRRFRILTLRELFNNEINKVDPNFFKRLDLSFFHKEDIEKAKDYLHIDGDINNNFIFEDKKQVKEYYKKYPTIYHLRKALIEDNKKHDIREIYLAFSHMIKYRGNFLYSNFKSPDDIDIISIFNDINENIKSICQNNDPFDGVIPEFIIDKDKEEKIKELYKKESRKSSLKEELKSILNINHKYLQSLIELSNGTKKKIKELFPYYEDEELNKEEIDLGSETLEEKINSKLNNEEEVSLILNIKKLYDTRNLLFTLKGETLISNAMVNIYNEHKRQLKIIKELLKKYDPELYNKFLNEKYDENEKTIKPEDLPLISYSRYIGKNIEKKKKSKFKLGINSIKYQVFSKTLDKVIKDIENKIDKESIEDTKKLDYIKKCQESGILLIKQNSSNNGVFPYQLNKFELEKIIENQGNYYPFLKEKGKSFIDPNKEEYKLVSLLEYKIPYFIGPLSDKEISEDKNLKNHWVMKKSEEKIYPWNFYDVIDENKSAIGFIENLLNKDTYILNENTLPKKSLYIQFFQVLNELNSFLLNGRKFSKIIINDKSLTEILIKDIYLKKKNVKYKDILNKLKEIYKQGEDSKIILSTNKIEGDEDKLSSIIKSDLSSFIDFKDIFGEEFYKSKELIKKTEDIINILSIFTEEKPLNNALKQLDLRDEEFNKIKKLKNYNGFSPLSKKLLVDIKVNIVNEYGEVSEYQYSILDIMLKEGLHFMEVYETKDETKNSYKYPFKEEVEKLNEEFLKIQDLSPYEIIDEYPLSNLAKRPLRQVYKIVKELNHILTASNKSYNEEENSNKINCFSKIFVETTRKKEESKETKSRESQLRYFYNAAKNIVDKEEVSSLNEELTKNASNLKSKKIFLYFAQLGRDVYTGEKIDLSTLLTNNNIYDIDHIIPRSYIKDDSFNNIVLTNKQFNNGLQNQYPFVKLLKKEGIEWIKKLNSIKVNNISTYMSNEKMKKILRPGELSDDELSGFINRQLPTTNQANKYSIELLKQITSLEDKNIIYSKASNVSDFRNLFNLYKIREINDFHHAHDALLNIVVGDIYDQKFTNLKTKAIIENYRKKYGDEEFKARINLDPERIFKHEIKG

SEQ ID NO: 10234 - protein, 1477 aa, unidentified
  REGION 1..1477: note = Description of Unknown: Cas Enzyme sequence
MENEKKYYLGLDIGTNSVGWAVSDDYYNLIRKKRKHLWGARLFEEANGSDSRRANRNNRRRIARRRYRINILREIFQEEINKVDPNFYRRLDFSYAFKEDLPSDLNTNYLFEDEKLLEEYHKNYSTIYHLRKELIVNKDKKFDIRFIYLAISHMIKYRGNFLSDAGIDENVLKINLKEIFDSIDENIKEIARLNSDEDEDEEINNTKLFNYNEEGKTETLNEIFIKYEKKSEMLDKFYEFFDPSLKKDKLTNSILKLINGYSCTLKDIFSYRKEEWENNEELAKKKIDFSSNDIEDTLNELASILTSEEFSIIFEAKKLYDYKVLKQIMKDSDSINESMIGIYDKHKYQLKELKRLTKEYLGKEEYKKYFSSKVTKDYKNTYGAVVGRGIINNKFEKFKKKSGDSLKAFKGLLENLNKSIETSSNLNKEKDLKIVNSLLEDYNNQKLFITQNNKSNGVIPYQLNALELKKIIENQGKYYPFLLEKGKDYPNPNKEEYKLISLLKFKIPYYIGPISNRTLSNDSNVNHWAKFVNKKEKHSKVYPWNFFDIVDDKKSGEAFIESLKNNCTYILDEPTMPKYSLIFQVYKVLSKLNNVLINGEKIDKDLKEKIIVNLYLKKKSVTYKDLRKYLIKEKNIANEDDLEISLKNTKDEEKISNYFDKATTLSSFIDFIDIFSDEKFYLDKEKFKKAEDAIKIVTIFEDKKTRLNSLKELFGNNIDENLENKLKKLNYKDWSSLSNKFLNGIKSNYVNYETGEVIQHTILDIMKEEPLSLNEIYETKKENGTYLYSFKETVNKLNEDYLKNNLDIDPIDNMWGSQSMKRATRQTIRITDELLKILNRGHFDKIFIETTREKGESKQTVAKDKRINDYLEAASKLNFDISELKEELKDQKANISKKKIYLYFTQLGRDLYTGEKIDINDLDKYDVDHIIPQAKLKDDSFTNLVLTLKSINNKKQDTYPLTNIINDKGREWIKKLHSIKDKNNAPFFMSKDKYDRLMRNNPLTLEEEAGFINRQLVMTNQSCKAVCDILKQRYKESEIVYSKAGNVSDFRNYFNLVKCRNINDFHHANDAYLNIVVGDIYNQKFTNLATKAIIEKYVENKESLKYDAKNIFTKDIKARSGDRLIWEKPTNLDKKDNGALLTGGTIDKVRKTLSYNDPMVTKMLMTQSGAQGFFNKISLVSTKFSEKAAMPLKLKEDSILSNTKYGGYNDLIASYFLLIECEDKKGNTINQFVPVLDIYRRHFKTDEEYLVNQGYKNAKLLVSSKLLINTVLEIKFGNSNVYTRFLVAGRTGENIILRLINEPHYNLKAASYIKDIITFLGLNLDKTKKPNLDIYKDLGPNEEIKVGGKDKEKIFNLTKNLELYDYMVSKYNCNLYNCLPTWATSMEKFKDNDVRNNFLSLNVLEQLKFLILMINFISANQPGFKFEVNQEKLDKKKSISNSIGTMHINSKLDAEKNHYRIVRESITGFYRKILFEK

SEQ ID NO: 10235 - protein, 1184 aa, unidentified
  REGION 1..1184: note = Description of Unknown: Cas Enzyme sequence
MSKSTLGLDLGVASIGWCLFKDNENDQHERIIDLGSFIFSQIEDGKSGKTENIERREKRGMRRQRRRKLHRRIAGKLLFKNMLNVNFDELKLNEYPSPMEIKRKGLHQKISKEELCIALYHYLKHRGFKSNRKTEKISDGDLSNKLSETEKKIEESRMYVTEYTFGKESNNKIRAKNGEKYHNGSFYSDFDKKSGNKDKDNYNLNITRKLYEKEIEAILDKQIQEGVIEEEFKNEYMELFTRQRDTSDGPGEYSKYHQNIEQMVGTCIYDNNKRAPIDSYNAQLFKFLEKLINLRYKKLEGDEYSSEYTSLTGDEIKKIKEKYFLKQKSLTYKYVFDTIGIKSKVFVKNLDLSKSEYKKAVESAENKKKDKNEAIYNEKMKKTLYTQSDFLNEYYKKAKNNTNEEFLLNPKTIDKLSYVSLIAKTDKKIREVIDNDETLNDKEKEVAETFLLNMNEESKKVLNLSLEILEQMNPLLESGMTYYDALDKLGYTSENGETKDIKNYSGENEFLPPVDSMLKKLNIELTNPVVRHTLVQLRILLNEIFKKYGRPTNVCVELGRELRKNFKDRSDIKKNQDENRYNNILCKIEMMEKYKRWTSIKSIRRDELIRYKLFKEQQEISPYSNKIITNPFDQNYEVDHIIPFSKSFDDSFNNKVLVERELNKAKGNQMPMKVEELGINENIRKYLSEHNVSQSKKMKLMTNKFDRDENDFLEKDANDNAYIAKLARDIINSFVLKENKCRTTSGAITEKLRSEWRLGGKTHSFIKGSVYTGYCESSYTNKAQDSFKFKEMEQTKDGIKFTYLVDDKEDEFSVDFIKKEEDKLSAAEKEKNIDLQRFKNSFEELNERFAKYYNEPFYNLISSDNNDEINRVLGKVYNHILDEIVKKDRSNDLHHALDAAIIACVTPSITKKVSDYYQNEELKVDVITGEIRDSKCPLPYNDFDKEVLLRIYERDLNTMILNLNKLSNYQDEPATVSNVHILYPARLPDKDVNGAISKETIFGLKEVNNKKILVKKVSVRKLDSKTKKVTGEIEDIVNISAAYGNDVSVKPMIEAIKEWLIQGKPTDYPILPKKGTPIKYVRMLETDKPETRVDLGNGKFAENPNDVKKVMLLKKKNSDSIAMAPIYYNQIWKEKENKKRLNDNKELLPVPKYQVWGSGKDNNEFITMDKIKENYEILNIFSRY

SEQ ID NO: 10236 - protein, 1004 aa, unidentified
  REGION 1..1004: note = Description of Unknown: Cas Enzyme sequence
GYMKKKIFAFDMGKASIGYCVRDGHDIKAANSIIISKDHADKSPLKTRKSARKLLEFHRIREKFFNDIWKNCSLNPLDKEDERFKKEFPSQDDNTIYTSCLLRIALLQNKPLENWQIYKALHNAMQRRGYDANVPWKAALTDDDKYNAGLVKRFTTENEVELINSDEYKYPCYYDALRLGLWSEDEPDKFQKSIPADNFTKVRTTNYIAPRVMVESELTKLWENAQKQIPALLKYDTEYFLFGEYREQYGSYKNKEFRSNMGTYKDWQGVLGQKIPRFNNRIISKCKLLPKRNVCKADTSENASFVMLMKLKNLRLTDISGERVRLSVEDINKIYENWIQKIEDNGGKRDRTITMKEINKATGRAFIDKIEPLKVNLSGRSSFCRRACSIMKKVILSGELYPENIDISEFVDKPETKNGITEEEIREMLSKIGDWNNLYIPDNRDKSIESDNIRTKTDLVIGSVTNPVVRNRLQIFRDLLLDLEKKYGIPDEVIFEFVRDGADNSLLSSKKANDYQKRQKEHEKENQQIKEDLGEDLSGETFLKSKLLKEQGGKCVYSGRNISPSDFPSCDIDHIFPRSAGGNDALYNKVLCYKEYNMDKKDRTPYEWFSSDEDRWAEYVNRLNSLKNSGQKKLGQKKFELLTSPPEKCAELIESYNALAETAHIARLAQQITASVFDWHLQAEGENRHIFVNNGSTTYAIRKRYKLNRLLGDDEKKNRDNDKHHALDAICISYSRDFKYNKEIKKDVIEGFSPEIVEMAIRNIIPYPYTNRKPLKVDLNPKETVYGYRKYGDKEFITGRVDLKEIKPDSKKVKTIVDEVIKNDLLAKLETNPTAKEWDEYLTNYTHPTKKTKVKKVLTIVSEGSLEKDSNKRDRMGEYVDFGTKGVKHQFKHSKSHKGQILYFNEKGAVKVMPVYANIKTTDVKEKLQNMGCKLYNKGQMFSSGCLIEIPKEFKAGKETYTAGIYKLTSMWTSGVTEIKNGNGIKILTSAKNLVEAGFRKYNQ

SEQ ID NO: 10237 - protein, 1573 aa, unidentified
  REGION 1..1573: note = Description of Unknown: Cas Enzyme sequence
MEQKNILGLDIGTNSIGAAVVCVGENAEKRLLCRPVSRIIPMPENEISDFNAGKLVSAAAVRREKRMLRRQTARYQLRRERLFRVLNVLGFLPKHFSEAIDFEKRLGKFKVGHENEKIAWDLSASENEPRFLFENEFKSMATAFGVKKVSRDWTLYFLRKEALTRRISPQALSWVLLSFNAKRGYNMERGDDDVEDTSKKERFTSVKVAKVEFDNEAKGKKWFKLTLSEIGTGKEFTKMRPDIEGKAYLGLVRDVIVEESDGKEPSIRFVKDDDWKLQKAKREGDLENSGKTVGEYIFDALLSNPEDNVRKKLGTIGREFYYDEARRILEKQAEFFSELKSHEMLKKCVQELYRNNKNHQNFWLSSGKRTLVDFVLDDVLFYQRPLKSKKGEVNVCRFEKCKFPTKGNGEKKTYGVRCAARSNPFFAEFRIWKFILSLKVLTENPFCERDITETILGTTEQKAALFEWLNNRAFVTEEKFLKEYCGLGGKKPKFALKDVDDRQIDTCKDFKEGLIHWNYAGSEKKYPCNPVRAEILKRFKKCGVDEIDLGSKVVRGENSTETVEHALWHVLYSVSDRNELEKALNRFSELSVRDDLDDSVRDFIPEAKRKNFVSEFIKIKRLDKLEFVGSGYAAFSEKALRKLLPLMRCGKYWSWENIQEDTRARIEGWISGKTNLDEKIYTRAENNKIKLSKEEDFQSLPEWFATYLVYGRHSEADSDELGKWHSPEDITNFLTKEFRHNSLRNPVVEKVVLETLRVVRDIWAEVGKIDEIHIELGREIAQPAEKRMELTKRMQSNETENLRIRRILTELKTHNVSKEVYPGSPSHQEIFKIYESGVRAGAETKLNDAEEKAKQDYAEFREGYEEAMAAFEAINKDVVTVSDAEIMKYRIWLDGKYISPYTGKTIPLSKLFTDKYEIEHVIPKSRFFDNSLNNKVICERTVNKAKGNRLAMEFIRDSKGGSVDGIPILKPDEYEILVKKIYSGRKKEFLLATEIPAQFTNSQLVNTQYISKYVRNLLSRIVRNVEADGADTDTTAVSTNIVSCTGIMTDTLKREWGLNDVWNEITLPRFKKMNEATGTENYTVEKRENGGLTGTVPLDEMKDFKKKRIDHRHHAMDAVVIACCTRGHVQLMSNEAAGTQGKFGELWKNLRVCVGVKKDKDGKERKNYAFKKPWKTFTEDVKEELEKIFPTFKKNVRVLSKGRNIYEKIEVDEKGNVRKVLAKQNKGDIRKIRKSLHKETFYSTTNLQMKVPQKLEHLLPCDENGGESRLCRVCDAELRKKLIELFEGVRSASEIKKWFKANSEKFPNVNLDKIDAWIYSEETAARMVATRKEITPDIKLEEITDESIRKTLENFLVAKGGKPKEAFSKEGLDEMNANIEKYTPSRKPHKPIWRVRVKEALGEKFRVGKTLEKSKKIVKTEKGTNLFFAVYKNQNGKREFETISLRKSLENVRKNLPPVPLKNEKGSPLYFYFSPNDIVYVPQEGEVGEGGLIPVERIDKNRLFRVVKSWGERASFVPVSVAMPIGKKSKKSEKAEESFEGRSIKEYCLPVKTDRIGNILKVGVCHGQKGSSL

SEQ ID NO: 10238 - protein, 1114 aa, unidentified
  REGION 1..1114: note = Description of Unknown: Cas Enzyme sequence
MQTALINFVLIPLRRGELHSRSPSRANIFFQFVFFFRKCSSIAGMQTIDTRSKLTLSFDIGHSSIGWSVFSTDAEFPNLLGAGTVLFPKDSCLANARRENRRTRRNIAARRSRVERLKKYFESLGVLSREDLNENSTSSPWFSASCVLASGGKEKLSWKELWAVVRWYAHNRGYDGNALWAGDGASAEEKEDTEKVKAANALMEKYNTGTAAETICAFLGLNPAGEKRSSRKYFKGQNVAFPRDVVVAEVRKILEAHKGVLPKLDDKCIRVLLKDATEQSFVKLPARFRGGLLFGQYVPRFNNRIIGKCRITGKNTPLKSCKEFLLYRWGRLLNNLTVMDLAKGIRVLEPAERKALHAEMLERGFFDKKSINEALTRITHCEPANTESYFLTEEMEEALVLDPVKKYLASKKDKDLKELLPLFSEQGQKIFATKLSRRKTIRLCDFIEKMKKLGGWDSSALEAKIAELQSKKDKKGNVNKILNKPFSVAFPDGRAPYSKEILKKAFEESLRGNDPTMEGWCLYETPEIRERLLGMSLAEQTNNHMVRHRLMIFDRLLDDIVSEYADGNAERIGDVIVEVVKELKEFSGCSSKDLGAKENEKMKNFRMVSEKLEKDAAVLGVPVTGSLIRKARLLEDQDFTDPYTNAKKFSNNELLSNQLEIEHIIPRSLRLSDALDSCVMTFKAVNDMKGQRTAMQFIKECEGQNVPGTNLTVSTLKDFEKWCEAHGKKKLGRGYGEEDIKRCERRAKLLLLEKYEERNADFTNRDLTQTSYLNKMAIRLVEQKFKGVKARHLPGVITGFVRKKMNIADALISAVPRMQKKASEGKREGKEITKTEMRNLTHLHHAMDAITQALTGIFFRTEDWKTLAQRRIGKFDRERLGNRYSKILKFSSDGEVSMSELPKTLRENIRQRLEECRVVQHVPARMNGMVVDQTTWSVEKFDEDTGKVKLSQKQRDKDSRRIPPKPAEKKPSKLLGYGVPAGKLKSIKGVVQISENWGCVLDPEPCIIPYFKVFPKLRELIAKNGGKRVRILRNGMLISVPAGAYRGMWIVRSVKDNTGGIAVDMTAVDKVNVEKVRTADSKVNVILSVLLKNGLKIEKTKLTGIPQCRSTLLQ

SEQ ID NO: 10239 - protein, 1114 aa, unidentified
  REGION 1..1114: note = Description of Unknown: Cas Enzyme sequence
MGLIYGIDIGIASVGIAVIDKETLEIKRVVSVLFESADASKNVERRSARQSRRLNNRRKTRIGDFNTLWLKEFGDIPGEHSTDVLLLRNAGLEEQLTLDEIYCVLKYMLKHRGISYLEDALNEDNVKGSYQKGIAINQRESEDKLPCEIQLERLKKYGQYRGECEIEGEDGEKITLSNVFMTSSYRKEIEKFLDTQKKYKTVNDEFIAKYIEIFSRKRKYYEGPGNEKSRTDYGKYTTRKNSDGKYITEKNIFEKLIGRCSVYKDELRAAGASYTAQEFNILNDLNNITVNNKKLTTQQKKDIIKTVQNSDRINMEKIISSCIGEKIEKIEGARIDKNEKNIYHTFEQYNKMRKAFAENGFDIKELSIEQLDEIGRILTINTEREGIEEAFYDSGFLNLNNEQMDILIELRHKNSSLFSKWQSLSIKAMREIMPDLYDRNVNQMNILTERGVFKEKRNLFENSVYLPKEPVLEEIYNPVVRRSISMTIDALNALIKEYGYPEDIVIEMPRDRNDAEQKDRIKKFQRTRENELKNIKKKIKDEYNIEIKEENFRNHKGLELELKLWMEQNEKCPYSGEHINIKDILYHHNLFEIDHIIPLSISYDDSRSNKVLVYREENQDKGNRTPLMYLSTVHREYDQHEFMNYVLSTKTLPRKKRELLLNSEDITKIDVLKGFISRNLNDTRYASRSVLNAIKLFLGGKECDTKVRVIRGSVTHQLRVKLDLPKDREESYSHHAIDAAIMCYSQLGLMKFHNTQKQFIDFENEVYLCDSELSCFDNRYYDEALFGQTLKMRKNLLQAEGNPQRSVQSKGVYDEEEKNNGIVKFHHKVDKKPNRALSNATIYGTRNIDGKIYKIVGYDIRNNKDAKAIVNIIKKGKSDGFLMSKYDPKTFEILMTIYEQYKDEDNPFLAYEQETGESIRKYAKNHNGPKINKIKYADSEVGSCIDVSANYGYKHGDKKVIMDTLTPYRADVYYNKKDNLYRIIGVKYADFRYSNGKYVLDENSYVAILVKEGLLKEGDILESLVAAGYEYRLSFYKNDIIEYTKNDITYRERFLSRTMPKVKNYIETKPINAAKYEKQNQIGITNATNICKICTDILGNETRIHKEKFKLSVD

SEQ ID NO: 10240 - protein, 997 aa, unidentified
  REGION 1..997: note = Description of Unknown: Cas Enzyme sequence
MAEEHLVLGLDMGSASLGWAITKEDGHGRPIGLVAYGVRIFPETVEAKTKAPKNLARRNARAQRRLISRRRRRRDKLLNLLIRANLLPSAGADRDAIFRDASNFDPYRLRAHALDHKLAPYELGRALYHLGHRRGFESNRKGKDRNEDGKVKTAISDLARKMEEAGSRTLGEFLVSQPAKRRRYTSRGMYRDEFERIWQTQATHHSVLTPGLKVAIANAIFHQRPLKVQKHLVGRCSFELKCKRAARAWPLSQRTRMLQDVNHLKIQNPATLEFRALTLDERQKLISKLEKQKTVGWQAARKFLGLNENEVFNLERGKKSALVGCETSCDLAKLIGARWNPMNDALRESLVTDLLTIDNETALLRRLQDHWAFDARTAEQLAQLELEPGYARLSLKAMRQILPHLENGLIYSEACRAAGYDHSTPQAHAVSARLGLPTEIRNPVVTKALYETRKVVNAIIRAYGKPSAVRVEMARDMKLSRRQKEELHKEQRDLEKMNKIAEKALRDDFGIDQPSRADIQKYNLWVESGEQCPYTGDIISKEMLFSPEVDVEHIIPFGRCFDDSYMNKTLCIAAFNRQTKLNRTPWELGQNDPTWYEAMLQRVKRLPWPKRRRFEQKEIKTDEFASRQLNDTRYISRAVHDYLKQLGVDVGVSRGEATAALRYVWGLNRILSPTGGNDKNRADHRHHMIDAVVIALTSPYLLQQMSRITAREGRGEGRLVRRLANLGAPWPQFSDDVRRAVDGVTVSFAPTRKLSDALHEDTAYGATGGEGEYVYRKPLDGNLTSAQIEAIRDATVRNLVKKRFEQFNGNAKQAFGPGNTLFHKDGKTPIRSVRLLVRMNPNTVHAIRNETGVPFKHFKYGNNHHVEIIEHEPTGTRRPIFITTMEAARRARCADLPIVQRIGPWQTNGETLGDGWRFVMSLTANDCVEAAHNDASALYRVQKFSGGDGFEIVLKSLPDSMAERNANSILIKGIAKLSILRGKVSVDPIGRVTPASD

SEQ ID NO: 10241 - protein, 1443 aa, unidentified
  REGION 1..1443: note = Description of Unknown: Cas Enzyme sequence
MKTVLGLDLGTNSIGWALVKEAENESEKSEIIRLGVRVNPLTVDELQNFEKGKSITTNADRTLKRSMRRNLQRYKLRRENLIKILKENNFITDETILSENGNFTTFETYRLRAKAATEEITLEQFARVLLMINKKRGYKSSRKAKGNEDGALIDGMEVAKKLYDEQLTPGQYCLELLQNGKKYLPDFYRSDLLQEFDRIFEKQMTFYPEVLTKELQEELRGKKRDAVWAICSKAFKEKGFELVGTKRQGNAGDQKIENFVWRAKGLTEKLDLEQFVIVIQQINIQINSSSGYLGAISDRSKELYFHKITNPDGTTRAQTVGEYQMEILKNNPNASLRNMVFYRQDYLDEFNTIWETQAAFHKELTAELKREIRDVVIFYQRPLKSQKSLISFCEFESRKIEVEMNGKKKIQTIGSRVIPRSSPLFQEFKIWQILNNIEVFGKGRKNKKQKEKSLFSDMEDPLQIGGRRELYQEEKELLAEELSIRKELKKTDVLKLLFDNPKELDMNFNSIQGNLTQAVFFEAYKRIIELSGHEIEIEKKSAKEILKAVEEVFSVLGFNTDILYFDSNKMLDKQPMYKLWHLLYSFEGDSSKTGNQNLIDKITELCGFDKEFSKILANVTFQDDYGSLSTKAIRKILPYLKAGNKYDVACQYAGYRHSASSLNKEEINTKNYKERLNILPKNSLRNPVVEKILNQMINVINLIIDTYGKPDEIRIELARELKKNAKEREELTKSIADTTKLHEQYKETLYRPPFNLSYISHNDIVRYKLYEELKENGYKTLYSNTYISPAALFSGDFDIEHIIPQSRLFDDSFSNKTLELRSINIEKGNRTAYDFIKEKYGESGEENNLDNYLSRIEDLYKKGILSRAKYNKLKMQEKDIPEGFINRDLANSQYIAKYAKTMLGELVKFVVSTTGSITDRLREDWQLVDVMKELNWEKYYNLGLTEEFINEEGQRIRKIKDWTKRNDHRHHAMDALTVAFTKRQFIQYLNNLNARRLDESQGISNAEKEEQDNYAIGAEDVILSTRDVLGIEKKYLYRDNKNKLRFVPPIPLDEFRAEAKRQLENTLISIKAKNKVTTKNINITKKKGGVNKKEQLTPRGQLHNETVYGSHKEYVVKIETVNAKFDNEKIATVANPAYRVALTERLQQFNNDPKKAFTGGNALSKKPIWLDELHTKQVPEKVKTVSFETVYTIRKEISPDLKVNKVIDQKVRQILENRIKEFGGNTKQAFTNLDENPIWLNKEKGISIKRVTIFGVNNVESLHEKKNKEGKLILDENGNRQPVDFVNTGNNHHVAIYRDAEGNLQEKVVSFFEAVNRRNLGLPVIDKNYNAAEGWVFLFSMKQNEYFVFPNEKTGFNPNEIDLLDPDNYSLISPNLFRVQKISTKNYLFNHHLETKAIDGETLKHKKQLSGITYYFIQTPSKLQGIIKVRVNHLGQIVSVGEY

SEQ ID NO: 10242 - protein, 1068 aa, unidentified
  REGION 1..1068: note = Description of Unknown: Cas Enzyme sequence
MHYRIGIDLGTNSLGWAAFQLLEAQPDAFETGPLLDLGVRIFSDARNPKDKSSNAAQRRGPRGMRRNRDRRLSRGRAMLHALVAAGLMPPGESERKALEALDPWILRADALEHKLAPHEIGRALFHLQQRRGFKSNRKTDGDEDGAMYDAIEAARSKMAMQKARTLGELFGRPRREVREANAIARQGEGSPMPQARVKAQMTGSKMAYDYYPDRAMILDEFDQIWAAQAKYHPNLMTDRAQRSVRHVIEHQRPLKPQKAGKCTFLPHLERAPKALSSAQYMRVLQEVNNLKVGAVGEPQRWLSADERKQLIDLLMQPSSKTARRTFKAMRKTLSLPESQIFNLESRKRDHLIGDETAGRMMQADAWGPDWLSLDGEVQDDIIQTLLDTEENDVLIEWLMQNHALEKGHAEVVSKVRLPDQYARLSLEAIARLIPLLEQGQRYDEAATALFKDHRGRGDGVIHEDKLPYYGEVLSRHTAFEKDPPQGGKDTRNDEEKHGRVANPTVHVALNELRKVINDLIRRWGPPAEVVLELARDLPLSDRGLRELETAQKKNQDLNDKRRKELEALKVADTYANRMKLRLYEEALDCFGGTALCVFTGDTINMTSLFTGEVEIEHILPLSRTWDDSFSNKVLSKRIANRLKRNQTPFEAFGHNPAGFDWEAISQRAKDLPKSKSWRFAPDAMAQWDARGGDFIARQLNDTRYISRLGKTFVEALYGGQGEKGERRRVWVVPGRLTADLRYHAGFNTLSGFTDLNQKDRTDHRHHAVDALVIALTDQAMLKRSADLAKREEASEQPEILQAMAEPLKRYRRSAEDRLSKLVVSHKPDHGFQDGMHNDTAYGVTGEVDEKGQALLVTRKPIETLDQKDIVNIVDRELRRHFAYATEGLSGAAFQDAMRKATDELNPPVYKLRLTTPMKPSSFVTIKHGKQGKHSKAYKGDGNYCYDIFIGAKGRWDGKVITTFEAYQRARKSKAWWQDLQHEDGTPLIMRIRKGDMLEIDTNNGRKAVIVYKFSAGKINMSEHHEANASARIRAKELQGYQMSPASLQKANAVRISVSPSGKVKRHKA

SEQ ID NO: 10243 - protein, 1085 aa, unidentified
  REGION 1..1085: note = Description of Unknown: Cas Enzyme sequence
MKYRLGLDIGITSVGWAVLEHNNDEEPFCIADLGVRVFQAAENAKDGSALALTRREARSSRRRLRRHRHRLERIKLLFQEVNLISIAELDIVYHNSQKLTDIYELRQAGLDRLLKTEEWVRVLIHLAQRRGFKSNRKNDSKDKEAGKILAAVNENYNLMIKKSYRTVGEMFFLDDKFSQHKRNKAEKYNHTIGRDKISEEIVQLFNAQRKQSNPFSNDSFEKKYTEIVLGQRSFDEGPGLPSPYAGNMIEKMIGKCTFEKDLPRAAKATYSFELFNLLQKINSLRIEDESGNSRNLKGEEHQIIVELAHKKSDLKYSDLRKLIDLPLNYRFNSLTYNEADIDEIEKKSKFNYLKAYHDIRKALVKVDKGRTNQLTVEQKDAIGETLTLFKNEETVADKLNQAGLTKYDIEALSNLSFRGFGHLSLKAIKNIIPYLQEGLIYSEAATLAGYNFRAHDNENKHMYLPANVEELKDITNPVVRRAVSQTIKVINAVIRKYGSPQLICIELSREMGKNYDDRKKIEKQIKENTDLNDVTKNKIIEYGHPNPTGQDIVKMKLWQEQDGRCAYSGEVIPISKLFEPGMADVDHIIPYSVSFDDSFSNKVLVKSNENRQKGNLLPCEYLKNEPAKLERFIVWVNTSVRNYHKKQRLLKQSITTEDRNKWKERQLNDTKYISRFMLNYIRDYLKFAPVEYLGKRQVISVNGNITAYMRKRWGLKKDRLANDLHHAQDAVVVACISESMIRKITRYSQYCEAKSIRNRFVDYETGEIINPLEERFGVRFIEPWDCFKVELESRLSDNPALRIYNYKLKNYINPDNIKPIFVSRMPQRKNRGTAHKDTIRSGRLVSEGLTVSKVEITKLKLDADGEIKGYYNPGSDLRLYNALKKQLHDFGGVASEAFKEKFYKPATNGRQASLVKKVKIVDTSTLNVQVGQGIAANGDMLRIDVFRKDDGYYWVPIYVSDTVRPSLPNKAVVASKRIDFWIEMQDDDFIFSLYPNDLIRFVHRSGVEATCWDKTKITLKESFVYYIKANINSGSITVESHDRSYSLLSLGVKTLALIEKWSVDVLGNRVLVKKETRQYFTGQTK

SEQ ID NO: 10244 - protein, 959 aa, unidentified
  REGION 1..959: note = Description of Unknown: Cas Enzyme sequence
MNWRLSLDLGAGSIGWCALELDENGAPIAILAAGVRLFGDGRAPSRGDQQGTPLAVERRTARAMRRRRDRFKQRQSALLKHLELDGLFPVEAEARQALEGLDPFALRARALDVPLTLHEIGRALFHIDQRRGFKSNRKTDRGAEDDAGKIAVGIDRLCTAMDEAGARTFGEFLHMRRASATDPNAIPSVRTRLRPEAGENARGDGYDFYPGRELLQEEFDAIWQAQAPYHPGVLTSQMHDRLFEIIFHQRPLKRPKVGTCTLVPGEDRLPKAHPLFQRRRLLDEVHALMVVRAGEKAQPLALDQRNTLLLKLKDKAKVSFESLRKSLKLDSDARFNKESEHRGDLKGDEVAALLGHKSRFGTRWQHLAPDAQWEVIARVQEEEDETALTAWLENAWQLTPEQAKAVAGVRLPQGYGRFGRTATTRLIAALESEVITYDKAVAKAGLGHHSDFRTGEVFTDKKGNAALPYYGVVLEQHIMPGTAEPSDPAEMRIGRLTNPTVHIGLNQLRRLVNALIRRFGAPEGIVIELARELKLTDDEKQRRSRENTKNRRDAEERSKKLAALGQADTGANRARLKLWEELNRDNVLDRRCVYTGAQISIDMLFSDKVEVDHILPFGATLDDSNANRILCLREANREKRKRSPFAAWGHTDRWVQIAELASRLPREKRWRFEPDAMTKFEREGFIARHLVDTQYLSRMARQYLSALYPGTGEGSGRVWVATGRLTELVRRKLGLNSLLPDHNFGGGADQPKNRLDHRHHAIDAAVIGILDRGMLQRMARVSGEEGEEGRERVVVPDPWPTFRDDLKAAVNAIMVSHRPDHGTTSKVGLPSGRDQTAGRLHNDTAYGLVKDGRPDEVVHRVPLGGLKPAELEADDASGKRRVRDPDLRAALRDFTQGREGKDFERRLAQFSELGPLQFRNIRRVRVIEPLSVIPIRDREGSAYKGYKGDSNYRCDVWEM

SEQ ID NO: 10245 - protein, 1245 aa, unidentified
  REGION 1..1245: note = Description of Unknown: Cas Enzyme sequence
MNTIWSFDLGKASIGEAVRDTQTNDFLHKASLLIPAEFASTKDAATRRRMWRTRQAHKAREAWLDEVWRAAGFAPLVGRRVEKRDGKWHAVAETPEQKQKRGLLEREFPKKRDATCYNSALLRIKMLDPRALALSEALADWQIYKALHSAIQKRGYGRVPWAAREAKRGEKSEEEIVAGLLKKDVAKLSEEEKVYRMAVEAWPKFKEEVTDAFHFPCYYDARAMKLWAPDEPTALRERIDCTAASTRKVRFAREDVEKEIAALANRAAELLPALGAAFKRWQDEGCVVEWHEKPLRPTLRFGKAKTSKHAKVFDVTAKDFGTFLVHGPAGEPSEDAREDFAGYLAFRTEHGLHPGSTDDWLGATGQKTPRFDNRIINDCALISRLQVCGVGVRFDKATGKPAPDSLLASEVTFLMKLKNTLVEEPGNQRKLTPEEIRKIFKAVSVEAHTVPIVLKARKKGELDTRSEDEKMADGMRTWPSRVSARYALTESDWKKIKDTSGHQLRPLSGHEIIKAPKTEGRSRFSRPALRLVRALILSGQKPSVFFARLVAREPALLDEIGMDVLDAEPVRFTGANGKEKKFEKRPRPWVLASDLKFLADLARKNAKGEGDTWEDLHFPEQRLDALEARHTGEDDKVNVPAAVSELLGSINDPVVRHRLDVFAKRLIEHHSRFGVPTEVVLEFVREDFMGDDAKRDLAKFQKHREDSRKLAREQADAAGITERSGRLKYELFAVQGSKCFYCEHDMMVTELGDCEVDHIVPRSQGGPDAMVNYVLVHRRCNDAKAERTPFQWKHGHEGWDGYVHRVESQATTLRNKKVQLLLREDAPELVQRYTALAETAWISRLAQKIVSLHFGWRNGNDKDGGKRVTVISGGFTARIRRRYRLNSLLNPMKQEWFDEQWEKATKGLPLSAEGEAKLREAITLEWESVAEKNREDDRHHALDAMVINFWNTGAKKQDAHFFRFPDTMQKNPRGFFGKHIEQVTPEKRAFEKAVLAETIYGGRTENGATKIVQRVSLFALGMKSVGQNKTAFDVGFLRKQLKSLRESQPSALIEQQILDWLDDDRDEAAWRDFCDTIRLPQRDGSNGPRVKRVTVDVGVADEYAEMSKDQTGAYRKRKKEHKGQLIYFDETGALRIAPVYVHSSPLVERRKIEALGGKAKFWEFFRAGCTVALERELPTGKHSLIVVDERKQSRRVAPILPLPAGSYILGKISTNNHDVVLELANGTRVASPLRNLVEVGMKRAR

SEQ ID NO: 10246 - protein, 1211 aa, unidentified
  REGION 1..1211: note = Description of Unknown: Cas Enzyme sequence
MRTLGLDVGSNSVGSAWVDTEKQEITLGVSVFPAGVDETDKERGAPKNQKRRGKRSQRRSIRRRANRKKRLRRLLVKTGLLPSDTAEMHLLFTYNIWPLPSEFPDKFMRTPWHLRREGLQRELTPYEFGRLLIHLNQRRGALGIETDSDDADEGKVKDAIDRTRQQLGDKTFGQMMADLLDDRTTNYKPIRNRRDSFDFHADRSIIRDEFHKLWSKQRAFSGPLSTLLTQELLGQLDDPREDGTWRQRGEIFGQRRTYWDTGTLGRCELEPTDHKCPIADISAQEYRVVETVNNIRIKARDERDWRPLTKDERDAVIRYLRGGWTTPQNPGKSKRQPKPKRAVKNPGPEHIREVLGIDKKMLGKRNIPENYYQLNLENDPDREINTNWFYRCVIHDSIGEECWTAMSDRQRESVNSAILKFDSDSTEHAEKLRKGAIQWWGLSSDAADRLVNAWKARPKIEKRVKLSRRAIQNLLPYMNFFDSVNNRWPTQIEARQRFAADSNNGASEHQRQRYALGASSLNKASRHFLRKHVNQLPPAPTLSNPVVRKTIHEVRRHVNEYLRRFNCRPDRVVIEFVRGVTETTKRRNLQLAANRAREKERKAIEEDLEEWGVPESNWKMAVLRVRLCSEQSGICPFSINDQNANRLITPSMAAKGRDVEIEHIIPESITGKTLDFNNVVLCFRNANQNKRKRTPLDWLGVEGVAEVLRRLEDSNVRKNKTKWNRLQAETPDVDAYRNSQLTDSAYAARQVAEYIASALFRDDVGTKRRVFTTKGEYTARLRADWALYESEIDRSHGLEPELDIERLESDPELEQTTRRARKDPTKDRIDHRHHALDALVVALTGPEILTKIGDAAGKDREYYERNLRHPRRTPIDPPWSNVNQFRSQAIDALNALIVAHRPEKRRIVGALHKETAHGKASEYPGLYTERMAATKLKSSQFVEPVYDAATKLWKIPGRGQGRAIRDPGLREELAACLRHNGIDPQSFSDNDIKALTNMQDWKLRTSSGVPIKTITTVLAMSDPVSIVGGDGVERYFMGGNNHHMEILLDRASGNWTSVTIPTFDAARMNARRMKALREAGVPDAKQLRRMPRCDREKFRPIIVAVNEQYPIVNRAERDGKDFVMSLCIGETLYLRHKESKQPGYFVVYKLDDKNAYFHPHWDARRASGKTVENPRDEMPLTARQIQQLVVDPKKIKVAVTPLGTVFPLIND

SEQ ID NO: 10247 - protein, 1453 aa, unidentified
  REGION 1..1453: note = Description of Unknown: Cas Enzyme sequence
MNHATPKSLHFAFDVGHSSLGWAVLQTHIGHAPKLLGSGVVTFPKEDCAALDRRGKRRQRRNIRARKQRILRMETLLAGIGAIPHEELKRQHAQGKGNVENGGAGFSYPWLHAARILAVSPSERHKYLLTWPQLWDVLRWYAHNRGYDGNLRWSGGYRADGFSEENKLEAAAFESLVKRDLVPAGNEEEGGETPEKGEAGKDEDLGKLKMGEDIMRAYGFATPTFAESIAKFLLGPDRVVKPPKQPGQAGQLEKTSEAFTREDFHRKLFGLDEEFREHPKHLRNYFKGLMAAFPRRHIDPANNFLAGGVEWEVRAILRAHRDAPADKARCDETFETVICGGLPERPNDWKSLEAQHPQLYLSMRDVEAIKALRSFARDSDEERERKMEARKQLRVGKLVLPSRYQGGLLFGQLVPRFENRIIAECSITYARKLPMLLRVIGGQEAYESSEIWSDEDRAQIDSELAHFRKKLAKTESDHRKLAEEYAADLAKVPAKSSLAFLDYRWAMLLANIKIRKPGETYPGKEKLRPLTAEERAQIDIKTRAKGFLEYQRKDAKKGHEEINELADIVRDVTGCAIEDTNLDGFFIPPDMREALKLVPIEKGEKAFRHVWQHLDDKLRRRFTIQLLRGQEPKELKPSDVCRQLRKIGRAEVAEAIEAGANARLLDTPFRGQKLEGRARYHHDVLRQVWCEVMRCEDPRKKIQDEIFLPTPKERHGCLVLTEDMQTRLDEKPLASQTNNHLVRHRILILAGDREAKPKPMDGLLDDLLAEFADGDIRKIGRVTIEVARDLQEMSGKSNQDKRDIEFSKRAEHDHAAEKLAAIFANERSNGKPIKINAGLIKKARIGDDLGWNKESRSWQCPYTDQKLEPRWLVLPKNDRCRIEKDHIIPQSQRLSHAIEAQVLTFASVNRWKDNRTAFEFIKEFGGQPVPGLNGVNLRTVEQFRAFVQSLPVKGPSKADVMRKKKRKELLLTEHWSGDGFTPGDLTKTSHIIKLAAQKLCARFRELPEDQRPEVVYIPGSVTHAFRDKQWRLFRELGAVHPGVKAEMEKGDDRFVLRYSGDRFTERSANKKRLYALGKKVKKALTSSTGTPLSEGEMKAADIALREALDAVGEPRLIDLIYWGKTTLNLKQAIRGITHLHHAVDAIAIGIVSAVLVPPRATGMHDTIARGIVKERLNADERREFEAIRNQLQLPKFYRWAKTRCDDPNRAHPAAGEGGTLCLDELSPETKKQIVAELKYAREHRVIQHIPKATRGLPAQLNPWRVVPPIVGTSVTLRQQERQDDGTIKKKEEQKELAKLIGISPKGGKGKLLDQQAALVLGENFGIAILDHALAPEPVQKKRGAPVPAVALAIVPFRNVRQELKSLAARNGNHPLRLLRKGTLIHVPNGKCVGYWRVLSPKNTEAYGLVVDIAAADGIEMIWGNQPIPQLIRDGLRVIEDPPLCGIAPEQTED

SEQ ID NO: 10248 - protein, 1106 aa, unidentified
  REGION 1..1106: note = Description of Unknown: Cas Enzyme sequence
SFSGKTTLPWLSNRFPVVTTSIDEGSNAVNNQFTVVEKFAGRKMAEKILGIDLGIASCGWGIIDLGENGGEVVAAGVRCFDAPLVDKTGEPKSAGRRAARGARRVIRRRRQRMNATRKLLAEHRLLADASVNSLHAAMTRVSPSPLTPPVTPWALRAAAHDRRLTNDEFAVVLGHIARHRGFKSNSKSEGSANAADETSKMKKAMEQTREGLAQYRSFGEMIANDPKFADKKRNRDKDYSHTAKRSDLEDEVRAIFAAQRRLGNAAASETLQNAYSDATTLNRPFHQHPLQDSEKLVGKCPFEPDEMRTARRAPSFEMFRYLSRLANLELSIGRTAPRRLTADEISLAAGSFGDTKTITFKALRKLLDIDPNAKFSAPEKDKAGKDIDVVARTGGAAFGTKTLKDALGDAPWRSLLATPEKLDRIAEVLTFREDLDSIRKGLEETSLEPLVADQLAKAASEGAFKEFTRAGHISALACRNIIPGLREGIVYSEACERAGYDHTARPQTSIHDINSPVTRRAFLEAVKQVKAVAREHGPFDYIHIELARSVGKSAEERAKLTKGIEDRNVEKEKRRAEAAEHLGRPTSDDELLRFELAKEQNFNCIYSGDAIDPKGIAANDMRYQVDHILPWSRFGDDSYLNKTLCTTKANQDKRGRTPFEWFEAEKNEEDWAGYAARVEALKEVKGRKKRNYVLKNAADIEEKFKARNLTDTQWVTRLLADELKRMFPPRAEKRGTDGSEERRVFTRPGAITSKLRRAWGLEGLKKDEKGERIPDDRHHAVDALVLAATTERLLQNMTKEIQKREKEGRQDDIFHVTQPWPGFRIDVTRAVHGEDGAAGVFVSRAERRRARGKAHDATIKQIREIDGERMVYERKAVEKLAEKDLDLIPVPSPYGKVADPQKLRDELVDALRAWIAAGKPKGEANAPRSPKGDIIRKVRLLTKDKVAVTLNTGNPAQISTVDRGDMARVDVFRKQNKKGKWEFYVVPIYPHQIATMEEPPSRAVNAGKPESEWTAIDHTFDYIFSISMHDYLEIVKSDGEVIEGYYKGMDSEGGKIALASQQNLDDKKRGIGTRTLSSFKKFNVDRLGRKSEVLREVRTWRGKACT

SEQ ID NO: 10249 - protein, 1077 aa, unidentified
  REGION 1..1077: note = Description of Unknown: Cas Enzyme sequence
PVQAVASSRPFPMGRDCFEKDSALANTRRLHRSQRRHVRATRQRIARMEKLLVHLGIFTEAELKVKHVANGGNPTAWLLAARVLASDGQQTLTWPELWDVLRWYAHNRGYEEITGETRDPHESVLEEKKKDAEKVANAKAALAKYGKSTMAETICAWLGQDPLATRAGTTASYKANNCAFERPVVVAEVARILAAHRGKLPHVDEPFIAALTLDARAISVPSIRLPKRFDSNPRKRSGLLFGRLATRYHNRIIGHCPISGEKIPNKNCPEFLRYRWAMNLRKITVTKSAGEPSRSLNMSEIGALTQRMKEEGRMTAKEFIKVAREIGGFVRDKLEQTFMEATADDDLVLDPIQALTRRHKLLAAVWSHLPPVLQVRTRGHLRRGKSTTLAKLREETEQCGHDCTAFDHAVEVLCAPPAKKSKKQTPPPTREDVRGASIDIRRDLAKLSGRAPYARPLLAKAFEEVMAGRDPKAAGGCLEETNEVRRRRESSPITDQTNNQLLQHRLIILGGDKRARDPKKWTHGLIDNLVRDFAGGDAQRITRMTIEVNRDLRDMAGLSAQDLAMELGKRLSDHKHVAAYLEEKLPSGTPITAGLIRKARIADDLGWQCPYTGAHFEPVDLITRRVDKDHIIPRVLRQSDSLESLVITFSEVNRMKGKRTALQFVKQAAARPVEGLPNLFVTTPDRFEKFALAHAPKSDPRRLAHARGERVNEDDLRCWRRAKLMLTENYDEADRTFTPGQLTQTSQLARLGAQTVRQALPHLEPHHLVALPGSVTGAVRKAWNVLGCLATAAPGVMEKVPQADGSEKTEVRNKTEIRNITHLHHALDACVLALAAHFIPNRGNVWRLLVERRLHAAQQAELAALGLFDFDERGHFCLRDLAPELKEQIRQKLTERRVVQHVPADMSGMKVKQNIRGIIDQSDPHFVVLKPSIGDDGTKQKKPERVLRTKLLGLNPGKLAALNGVQVLKDNFGVAVMDDKSLAPQQRFVVIPHISVWRRVRELTKANGGKKPLILRKGHVVEFERNGETIRLRLFGAGLRPRGMNFDAAPVDALERATEISPATLIAGNVRLLAGSL

SEQ ID NO: 10250 - protein, 1035 aa, unidentified
  REGION 1..1035: note = Description of Unknown: Cas Enzyme sequence
MPYLPYTLGLDMGSRSVGFSRLRLSSRTPAEVLDLGSRCFEAGVEGNIEEGKDESRAAPRRMARLARRQIWRRAWRRRKVLRALHRLGLLPPADLSTPQQIHDYIAALDADLRARHLHSGDHIGEQTLLYRLRTRALDERLEPHDLGRALYHLAQRRGFESNRKSAPKDDEDEGKVGEGIAELDTLMQASGSRTLGEYFAGIDPHQRRIRQRWTSRQMYKAEFEAIWSSQLRFHPNLTDDMKWPLHRAFFHQRPLKSQSGLIGKCDLIPGARRAPLALLVAQRFRLLAAVNNLAMRVPGELDQPLSREQRLTLIGLLEREGDLTFGKIRRQLGLPGTTKFNLEEGGEKKIPGNRTASKLAPIFGARWDSMSELEKDAVVDDLLSIDAPDRVHAVTNLAIRKWRLDDVQTVQLANVRLEDDRARHCRAALARLVNRMEDGVHYATARKEEFPERLEPSDVIHDLLPPVHIALPSLRNPAVHRALTELRKVVNTIIRQHGKPEVVRVELARDLRNPRKKRAEMAKRMRANEREREVAKAKILAELPGFGTPSRDAVEKVLLAEECNWMCPFTGRPINMQALLGANPQFDVEHIIPLSRCLENGYHNKTLCHHETNRHEKRNRTPFEAFSGNQTRWDEIIERVKRFHGELRQVKLARFMMEELTDDFVDRQLNDTRYASRLAADYLGLLYGGRVDANRRLRVQVSTGQATAHLRNELDLNSLLGDGPGKSRDDHRHHAVDAVAIALIDPATVKKLADAAQRAPSEGRRRFVKIDPPWPTFLDDVRAKVDQIVVSHRVNHRVRGSLHQDTNYSKPHTDESGREVRHVRKPVTSLTANEIKSIVDPIDRRCVEQKLAEVGGDPKKLENNWPTKPRKDGTPQPIKKARIRKSLKLVSLGQKGHERHVAPGNNHHAVIVAVKDKKGRIKWEDHPVTLLEAVERKKRGEPIIKRDWGPDAQFVMWFCPGDSIELDDDEHSRRVFVVKSVSDGDSELRLHNDARTADEVKKAKQRVRVNGEKLRKLNARKVIVSPLAEVAPAHD

SEQ ID NO: 10251 - protein, 1053 aa, unidentified
  REGION 1..1053: note = Description of Unknown: Cas Enzyme sequence
MSKKVLGLDLGSNSIGWALLAEDDGKPNRIINLGSRIFSKAVEEKTPTPKNVKKRNARLTRRVLQRRARRKRRMLNYLISLKLLPVGLGNCLTPEIQLNAIGDPYQLRAKALDEALTPYELGRVFLHLVQRRGFLSNRKTLLDKEMLDDPDVLAVLAELEETEDNSNERAKEETAFKKDINELRQTIAAANCRTLGEYLATRSQHECQRNRSCDGGHLRTDRQMYREELAAIWDTQQNFHAVLTDEAREQIEHIIFYQRPLKLRADRIGLCSLEPKRTRARMARLECQRFRYWQDINNLQYFEHHTDQWLSLNETQKTKLADLFEHQASISFAGIRKALGFDKTIEFNLERGSKKLKGNITACEIHRVLPTWDSFNDAQQQALVEDLLTFEKKSALKKRLENHWSFTSDIAVQLCLLEFEPGHSHLSVKAINALLPFLQQGQIFSDARVSAGYGYEQETIIPLAKLPAPPETTNPIVNKGLHELKRLINAIIAEYGKPDAIRIEMARDLEMNTKRYAEHDKQQKANTKANDEAIGKYQEMRQQNPHLQLRNYPGKTDKIKYRLWKDQDRCCAYSGKAISLSTLFSAEIEIDHILPYSESLDDSYMNKVVCYAAENRNKSQQTPIDAFGKDETKWNQITQALKHWDRRLQSKKNRFFMTAADVQKRDFISSQLNDTRYISRVALEYVKQLGADVSVSKGITTAWVRHQWGLNNLLGEGDEKDRSDHRHHAIDAVVIACVDRRFYQYLTHKAKALELEQTQFDIKKIAIPQAWPSLREDLQQALSQVIVAHAPQLKLNGELHEVTGAGFIEGIGNVSRKMLDGKFTEKVNKKGKFPQVEKIIDPVIKEQVRLHLQKHGNNPKVAFSGIDPVLHKDGKTPIKRVRVRQSDTTLEELKQTKFGARNKQGKVFKWLAYGNLHHVEILRDKLSGKYSGEFVTMMEASHRAKGIGKIKQPIVKTDHGEGFEFVMALHINDIVSVEQDGRRLFYRTQYLDSHNKRLKLRLHTAAPVKTQDKTKDKLRDQATTLSDKDSTIPALMALGLQKHKLNILGKIIA

SEQ ID NO: 10252 - protein, 1076 aa, unidentified
  REGION 1..1076: note = Description of Unknown: Cas Enzyme sequence
MPSTPAPDLYILGLDIGVASVGWARVACDSSRVPGRVLAAGSHLFEPGTEGTMADIERGKDEARNVQRRTARQMRRQTWRRARRKRKLLKSLIDHRLLPDPKSMDMDCGGDLRRPLDIDTYIKRIDADLTRRWMALRKATGEGGHADQQRLCYLLREAAAVGPVEAVEFGRALYHLAQRRGFQSNRRAEAKQSDEDSGKVKQGIHELSEKMRLFAEGGGTPTLGSYLASLDPDEQRLRGRWTARSMYTDEFDAIWKAQAPRHGLDEEARAEIYHAIFHQRPLKNQSNLIGRCSLLPDERRCPVAHRLFQRFRVLQALNHLEIAEPGAPPRVPTPDERERLLTRLTTDGDTTFAKARTLLKLKKGSTFNLERGDEKRIVGHRTDAKLRTVCGDRFQDLTDADKDRMVDDLRSFRLPEALIRRAHAKWGLPAEDAVRFASLHLEEGYAPLSLAALRRLVPRMEEGLPYATARKDEFPESFRNIEPLDALSPVLDALDELRNPAVARALTEVRKLVNECVRLHGKPAAIRIELARDIKNPRRVRERITRNNRDRERQRATMAERIVAETGMARVTRSDIERAMLAEECGWICPYTGRQIGWENLFGPHPQFDIEHIWPRARSLDDSLMNKTLCYHEENRARKRGSTPREAYGGDPARLDEIVARIRLWKTDPFVKAAKVGRFEAEAIDEGFKGRHLSDTRFIARAAADYLGLLYGGRVEAGVEDAPGTRRVDVCTGGLTAWLRTGWGIDRLLGESADKNRADHRHHAVDAIVVALTDPRAVQTLARAAAEADRQGKARAFESIDEPWEGFREEVERVIEGIVVSHRQSRKVSGPLHDASIYSRPTGPLGQHRISKELHKLTVSEIRDGKIVDARALRAIRDKLAELGKPSPSQPELTKIFNDPANAPEVRGAGGKPVRLRKVRVTASAGRQIGREDQGAARWVQPKSNHHTAIVEITDDKGKVRWEDRPVQLLDAYARVAAGQPVVDRAVGERERFVFSLAPNDFVEIDTPDDTTTRAVFRVSSISQRDNELKLHNDGRTADELKKTKARVRVSGKKLRQLNARKVRVTYLGEIVNVGG

SEQ ID NO: 10253 - protein, 925 aa, unidentified
  REGION 1..925: note = Description of Unknown: Cas Enzyme sequence
TSAIFWKKYNFNTAENKGYRDEKKSQAYQWRVDALSNQLEKEEVAYVITEINNDLNKSSGYLGAISDRSKELYFNKQTVGQYLYQQIKENPHARLKGQVFYRKDYEDEFDAIWSEQTKHHKELNDELKQIIRNIIIFYQRKLKSQKGLISICELEGKEKEILVDGKKKTKLIGPRVCPKSSPLFQEFRIWQRLNDLEVSNKKEKSKWKLDEESKLLLFKELNIKESLTKAQILKLLYKDYKNLDLNFKDVVGNRTNTSLYKAYQTIVEASGHDEFDFTSLSAHESTEIINGVFETIGINNDILNYNADLEGKEFEQQPYYQLWHLLYSYEDDNSTSGIDSLLKKLKEKFGFDEEYAKVLANVTFEDDYGSLSSKAIAKILPHLKDGLQYDEAAALAGYNHSNSLNKEERANRPLKDKLELLANNSLRNPVVEKIINQTINVVNALIDEYGKPDEIRLELARELKKSAKEREDATKSMTASQTEHEKFRKILQTEYGLPYVSRNDIIRYKLYKELEPRGFKTLYTNTYIAPENIFSKEFDIEHIIPQSRLFDDSFSNKTLELRSANIEKGDKTAYDYILEKQGENGLVEYEKRVDDLFKGVVGKKGKHKKLLMAGKDIPDGFIDRDLRNSQYIAKKTKELLEDVCRTVNTTTGSVTNRLREDWQLIHVMQELNWDKYDKQGLTYYETNKEGKQLPRIKDWTKRNDHRHHAMDALTVAFTKYSHVQYLNNLNARSDKAGSIYGIEQKELYRDEKGKLKFKPPMPLDEFRAEAKKHLENTLISFKAKNKVVTPNKNKITGKNKPQNTLTPRGQLHLETVYGTIKRYKTTETKVGSNFDVETINKVASKKYREALLHRLSEFDNDPKKAFTGKNSLAKKPLYLDDLHLFQVPEKVKLVEVEIVYTIRKPISSDLKIDKVVDAKIKIILE

SEQ ID NO: 10254 - protein, 1056 aa, unidentified
  REGION 1..1056: note = Description of Unknown: Cas Enzyme sequence
MAKILGLDLGTNSIGWAIRDTNIEGNQIIDTNVLVFPQGVGEEKGVEFSLASERTKHRSARKLYRRRKKRKTDLLKLLIENGFCPLTNDELLIWAVYNKGQEMKYPTENYEFSEWLKINPYEVRAKAVNGVVSKLELGRALYHMCQRRGFKSGRKDADAGKDLEQYKKEQFNLEQTGLKTLGEYYFDLLSKGEKVRKTKYGADNQEVNSSRISYVKEFNVLMKAQNISKNLADKFFDAIFFQRPLKSQKGSVGKCTLEKTKSRCAVSHPLFEEFRMYQYLNSIKVKERNSDKFVFLSDFPEYYKIAEDKFYRVSAKNFKFLDISKSINNVAKKNNLYFEFNYNDKYPIVGSPTISRFIEVFDANDWDDCKTIIKSKYIKQDDKSTDELVDELWHTLFFSGDFVNDITSEKVKKFIRDRFDISDEKVNYYEKINLKQGYSSLSKKAIGKILPFLKNKIIYPYAVFFANIDEIIGKEKWIESKQFIQDTIVDIISCYKDQTLKIDIVNGLVGDFINEYDNSHYDYIIDETDKKNVTERIKLFYGKYLWEQMSKEQRNEIQKEVESLFQEQLQKRRVGGYFLSKPRVDEIIKDFLVQEYKVSKEQVGKLYHPSAIDAYPQSQDGFLGLPFTDSIKNPMAMRTLFYLRKLVNTLLKENKIAPDTEIIIELARELNDKNKRQAIERWQRERENENKKFREKLEELAKDTNSVVTETDIIKYRLCQEQNGVCLYTNKTINCEKLLGSNPQFDIEHTFPRSKSFDNSLANKTLADKAFNQIKGNRIPQDLEEEYKQNFLFNTREWKIKIEELEEKIEQQKYFSKVASTVEQKNRAIQQRHYLKLELDYWKQKLYRFTATEIKPNFKNSQLVDTGIITKYSELFLKSLFQRVFPAKGSMVADVRKSWGLNAKDRNFHYHHAIDAVVLTCMDKSIREGLTKAFNDVEKLGDKEKFKVEKPWKTFTEDVNQLKDKIIVVHNHKDKIQKQTKRKLRQRNKIQYDTSGNVIYEKGQGIRGSLHKDTFYGAIERENENNEKEIWFVLRKPVNSSFSDADANNIVDEGIK

SEQ ID NO: 10255 - protein, 1454 aa, unidentified
  REGION 1..1454: note = Description of Unknown: Cas Enzyme sequence
MTKNILGLDLGTNSIGWALIRQDFENKHGEILGMGSRIIPMSQDILGDFGKGNSVSQTAERTKYRSIRRLRERFLLRRERLHRVLRVLNFLPEHYSSQIDFEKRFGKFKVESEPKLAWKNIGRQFSFLFQASFNDMLEDFKAKGQDLKIPYDWTIYFLRKKALSQKIEKEELAWILLNFNQKRGYYQLRGEEEEENPNKQVEFYSLKVIDVLADEPQKGKSDMWYSLILENGWIYRRSSKIPLFDWKDKTRDFIVTTDLNDDGSIKKDKEGNEKRSFRAPSENDWTLVKKKTEQEIEQSHKTVGAYIYEALLDNPKQKIKGKLVRTIERKFYKEELRQILEKQKEFHQELQNDDLHNDCIRELYRNNEAHQLTLSKKDLVHLLMDDLIFYQRPLRSQKSSISNCTLEFRKYKDENRIEHTQYLKAIPKSNPYYQEFRLWQWMFNLNIYRKDDEANVTKEFLNTDKDFENLFEFLNHRKEIEQKPLIKFLLEQKEINKKLLKAEAEKYRWNYVENKKYPCSETKTMISSRLDKVDNISDDFLTRDIEQKIWHIIYSVNDKVEYEKALKSFARKHHLDGSSFFEAFRKFPPFKSEYGSFSEKAIKKLLPLMRLGKYWNYADIDQFSKDRIQKIINGEYDENIKDKVREKAINLTSESDFRGLQLWLAQYIIYGRHSEASMIGKWNSADDLEMFLKDFKQHSLRNPIVEQVITETLRVVKDIWLKYGNGAKDFFNEIHIELGREMKLPADDRKKLTNQITENENTNLRIKALLAEMMNDSSVDNVRPFSPMQQEILKIYEDGVLNSDVEIEDDILKISKTAQPSPSDLKRYKLWLEQKYKSPYTGQIIPLNKLFTPEYEIEHIIPQSRYFDDSFSNKVICESAVNKLKDNYIGLEFIKKLGGTVVECGNGKSVTVLKEDQYEDFVKKHYANNRNKRNKLLLEGIPEKMIERQLNDTRYISKYISGILSSIVRVQDGSDEGVNSKNIVPGNGKITTQLKQDWGLNDVWNDLILPRFERVNQLTNSTDFTVWNENYQKFLPTVPIEYSKGFSKKRIDHRHHALDALVIACATKEHINYMNNEHALRKSKTKEEKQGIRYDLRQNLCYKKYNGESNENYKWIFIKPWENFTVEAKNSLEKIIVSFKQNLRVINKATNHYEKYVEKDGVKTKERVEQKGSNWAIRKSLHEETVSGKIDLPWVDTGKGEFITATRKPLDTSFNFDKIKKITDTGIQKILRNYLEAKDNNPELAFSPEGIEDLNKNIEKYNEGKTHQPIIKVRVYEKGKGRFALGQTGNKVYKYVQGSPNLFFAIYNDENGKKSFDSIRLDILIERMKQMLSPVPEVNSNGDELCETLSPLDLVYIPTEEESENIDVIDFNTINKSKLERIYNVNDFSGYTVYFSQNSFAKNIYPKEMDLSWNVKKEKASGSFDSKTASFNGKSIKDSFIKLKIDRLGNISKT

SEQ ID NO: 10256 - protein, 1226 aa, unidentified
  REGION 1..1226: note = Description of Unknown: Cas Enzyme sequence
MQLIFGLDLGITSIGWAVIKQNPDNEAVNEILDAGVRIIPLSYDEANEFGKGGNVPTNVARRMARGARRNLQRTKMRKGQLSDVLFKLGMSPDLFLLKSLPPAELFQLRARALEEKLTLPEIGRVFVHLNLRRGYKSTRKEQPEEDGKKQSDYLKEIADRESELKSQEQTIGQRFAAGLSDQPHYVVKQQIFNRKSYIEEFDKIWAFQAMFYPEVLTDANYKLIRDKIMYFQRPLKSQKSLVGECSLEWNYALDKEKHEKIVKENGQPRIVRPKCAPKSSPLAQECKVWESIHNLRIYNERGDTITVNDAQKQQIFNILQNDKQNLTANKLLKDVLKLSPKVFTVDALTKEKGLECNRTRGKLLDVFKKVNIQNHALLSFEPAIESTIWGNPETGEEIKRIQLKGDFDKEPLYQLWHLIYATVENDDLIRLLQEKYSFSYEQAFALAEIDFTKEGYANKSHRAMRRLLPHLQKGKDYTQACKATGYNHSNSLTKSENEGRTLLDKLDVLPKNSLRNPVVEKILNQMIHVVNDLKEMYGRPDSIRVELARELKQNAAERQKTFTRNGQREKVNKKIRFEIAELLGIQPESVSKSQIEKFKLYEEVEGVSLYSGAKIDLSTFLRAESVDVEHVIPKVRRFDDSFENKTICERKFNQDKNKSTARDFMESQPVSGLQGYEAYLRRIKDLLDRNKISKAKYNRLMMTAEDVSNDTDFIARQLRETQYITKKAMVILADICYNVYATSGSITDFLRHQWGWDQVIEALRFPSFKTFGMTETKKTHRGTKEIEVIKDWDKRKDHRHHALDALTVACTRQAHIQRINVLNQTLEGKFGNDRRDLLLSRGRDKYIAGPAPFSTVQVEKAMETIIISFKQGVKVATRSRNKIKASSKEDQITLTPRGSLHEETIYGKIRQHSVIPLNSNFNPKLIPEIVHSHQKELIEQRIADYNGNVKKAFKDLDQFPILYGKNLTKSLKSITVWEYSLVSRKAISPLLSEKSVEKIVDPVIRHAVKERLSEGGGNPKDAFKNLGTNPILVNNRIINRVRILNPAEKAILLPRGYAEPGGNHHIAIYQDLNGKKYEHVVTFWDAFQRIRIGLPAIIKDVPAAYQFIGESGLDVPEDFLLPENPAFSFICSLAINDMFVFQVDPDAFDFMDVKNKSMISPHIFRVRKLSKGNYWFMHHLETQILEDNVSKKMNRCKFCSASSLKGAVKIRLNRLGHIIYWENPVS

SEQ ID NO: 10257 - protein, 1033 aa, unidentified
  REGION 1..1033: note = Description of Unknown: Cas Enzyme sequence
MRIFGIDGGIATIGWAVLDVVDESMQIIAAGTRTFDAPETDQKRTPTNAVRRQHRGQRRVVRRRRQRMTSLRKLFLEFGLLPDANRDALAPKAGRAHDDPWRLRADGLDRVLTNIEFALALGHIARHRGFRSNAKRDAAANANDETSKMKKGIAATQERRAAYRSVGELFARHPEYRDRKHNRGLNFDRSILRADQEQEVRDLFAAQRRLGNAAAAETLEEHYARIAFSQRPLQDSEHMVGECLFERGEKCAARRSYAFEMFRLLSRLATISLTTRGQDHPLSADQIAHAASDFGKQKKLTWKWLRKTLDLAPGTRFAGISDKDEGNDFVARTGNAAEGTYVLREVVGDAGWRYLMNAPVQRDRIAEVLTFREDPSSIQRGLEDAGVEPLIREALMHGVAIGSFAQFSKAGHISAKAARKLIPGLARGLGYAAACDDIGYDHAAAREVRLEDVRNPVARKAVTEMLKQVRAMINAYGLPEFMHVELARDIGKSAEERDKIKKGIEDRTALRGRLRDELTELLNRTLGLDDLIRFELWKEQGGFCLYSGESIPCDAISAGDNRVQVDHILPWSRFGDDSFMNKTLCFTGENQRKKDRTPFEWFEAEGRDWQLFAERVERCKEMRGRKKGAFYLRKNAKEVEETFRSRNLGDTRYATRLLLDLLTRLYPKDGKRHVLARPGQLTAKLRRAWGLDDLKKGPDGKRLDDDRHHALDAIVVAATSESMLQKLTRAAQEAERQGLGRGFDFDHVPPPAAGFRDVVREVVENVFVSRTERRRARGEAHAATIKQVREVDGALVVFERKAVEKLTAKDLAALEDPGRFPPPAPYGRIADPARLHAETVAEIRRWFDAGKPKDTMPRSPKGDLIRKLRVPTDAKVAVEIRGGTADRGDMARIDVFCKADKKGKRQYFLIPIYPHQIADRQKWPTPPDRACAPGKPEDEWVVIDKTYEFLFSLHQNSLVKLISSKGEIVEGYYNTMDRSTGAITLTKPVSSRQLIRNIGARTLLEFRKRSITRLGDISDIEREVRTWRGEVCT

SEQ ID NO: 10258 - protein, 1013 aa, unidentified
  REGION 1..1013: note = Description of Unknown: Cas Enzyme sequence
EWCNDGKTVGSYFYHNFYEQKNIERIRNNVVNRTWYEQEFDRIWDLQFENHKDFFEQINIEAVVKVAFKDYQAILNEVKKKEGIKEQLKCLIKDKIIFYQRPWQQAKNKGQCPFEKKLVKKEQTIKGTGKKEIVEVYVGRTVIPRSHPLFQEFKIWQQINTVRLYLNTADEKIDLFADADVFKKHVGKEISVVKQILFEALQKGKTLSWRTFVKEELGLKTFEDLESKHNKKKTEKEGVDAETGEVANSYFSVNFRKRKKDGTWEDIKLKGNTTKASIKNILADKTDEWFYESHSSKQQISNLQLLWEIIYDITNSDANKVAGIIERHFGFDKPICLQLAKIKFDDAGMGNLSAKAIRHILPMMSNGNNLTPKASAKIKSLIALNESDEEKAKDKDEKLEGLKNFITDKKARLRLSKFSNQDAFSYLNYWEATAVMYGSHSSKSTITKSEISRVENHSMNNPVVEKIVNETISIVNEIYQRYGFDEVRIELSRELKASMDERQQMWEAMKDNAEKNEWAKEMLRELKKAIVEDKRSADNIDDSTSKSNIDKLKIIEDVVSYQEEGRKKEKNYKSNEPSKTEITKYLLWLEQNFRCPYTNQPIPLTDVFAKGKVVEVEHIIPRERYYLNSYANKVITWREVNQAKADNGNRTAYEFIVSKRIDKIFKIGNKEFGLVKANEWEEHVKAMFPKGGKRTNLLRKEIPEDPINRTLNETQYINKKLKEKLGELVGEQKVWATSGAVTDILRERWHLNNVMKELMRNRFENFNTGEKKEKLNLTYFTKQFNSKTGQYEDREVFEGFSKRLDHRHHALDAIIIACTKQNHVQYINTLNAINTADQESDESKKAKYAFIKNDVCIGDSSKKFITPWNNDKFIVDVKNAMDKIVVSNKNTRLLISPSKNKFGTNKVASIRGELHLETNYASRNYFEVDKTQTPIKKLIPLLFKLKKENQYQSKVHFKNFNEIIRETVLKEKYQDVLIPLFEKYENEKLNDSLVKDFSKTVLDEIDTNKLLID

SEQ ID NO: 10259 - protein, 1058 aa, unidentified
  REGION 1..1058: note = Description of Unknown: Cas Enzyme sequence
MKTRLALDLGTKSIGWVFFRLNTSDEPVAIIRGGVRIFSDGRDAKSGSSLAVDRRLARQMRRTRDRRIKRMRRVMDSLVDAGLMPHEKETRRQIEAWDPIQLRRRALDEKLEPYEIGRAIFHLAKRRGFQSNRKVDKEDESSTLKGRIKEVRQEMITRNLRTIGELLADRKEKGLPTRSRPIIEKGKVANYELYFDRSMVLEEFETLWESQSPYHPQILTQEAKTAIRDAIAFQRPLRPVRPGRCTLEPNEERAPIALPSSQKFRIMQEVNNLKYLGIDNEMMPLSLNERNELVFALLRSKHVTFSQMRKLLGKPRTAKFNLEGTKRKDLLGDQVSLVLAHDTCFGKNWYKFPLSKQDEIVELILSQSDEIVELILSQSNEEKLSVLLQKRYGLDQERAERIATKSLPDGYYKLSRLAISKVLPELERDVVSYDAAVRAGGYASHSALTHTQQTGEVFDQLPYYGEILRRSVAFGDPDGKTPEEKLGRIANPTVHIVLGQLRLVVNEICREYGKPTQIVLEVTRDLRTSQREKDEIKREQTKNQKENERIRKEISDHLGIAPSQVSRSDIEKFKLWEELGDIASRQCPYSGKQISMADLLSDRVQVDHILPFSRTLDDSRANKVCSFASANQIKGNRTPYEAFGHSPEGFEYAQIIQRVMAMKRNRLWRFQQDAMERFEGERGFLDRALNDTAYVAKLAREYLSSLVGPNDVWAVPGTITGMIRKSWNLSSVINAEATKKKRDDHRHHAVDAAVIGVVDRANLKRFADANKLDNGELGGRIRGMSMPWPTYRNQVERMIQAIHVSHRPNHSYQRQMANETQYGIRGEGKVAYRRNLDSFSSRDELENTEFADNQIKNLLLSEISLGVDKGVEFTDALLAAGAKRRVRRVRVVKNLNVIPISLPEDQIHRKPRPSRTIKGLQYKGLKGDSNYCVEIIEGENGKWIGKVISSFTAYEIARTLGEHRLRSADPMSQGGRLVMRLMRDDLCMIRSNKKNELMRLCKLSSDGGMYFAPISVANVDKKDKDKTTPFKYLRARASTLQRLGAVQVSISPAGRLSK

SEQ ID NO: 10260 - protein, 1053 aa, unidentified
  REGION 1..1053: note = Description of Unknown: Cas Enzyme sequence
MNPDQALAKWKKHPFYTSQVVLGLDIGIEGIGVFVRKGPKTIFARTYLVTLPESAPMAGRRQKRAMRRSRTSARHRDYLFRQWCKEFNIPVVEGDANARTDAWKVRYRAVTAGVASAEAVSVGLRHALSRRGFSYHRDGDAEFPWGDELEFAPISKWLQNAIFDQKYGTELKWKLENLDWMIDKNKESIEQSIDACVANYNAAPLVAHIKAHLEAPIHRRPKAWGRDFPRDLIEQHTSEIILKHPQFFGGKDKALLARDAYFKILNYARNKPGALALRKVKKCPYLIKLDEGHEGKVLCATNSTLAVRLLNLVEFLGQRRFTDLSGNKIKANDTVFKALDSQIKEDAKAIASASTKERIPRPKLGLKELKKIFTDAHEVKLEKDDQGLNKYYFEQLKDIVAPRMSTLSGRANLSERAAEILLVRALADGWENIDLKDTWGDFFLWRRDVDRGIGLYPQVEFLMGRRSKKGVQAVPGIIRQIFKKLEPVLGQDKPDIVIAESVKNVPRNADDRKKRDKEGREQRDYRKSLFEKYHLEDGGSDQDRRRVMLYEQQKGLCPYTGKELGSPLNTKLQVDHIFPRERGGVSEMYNLVLTFSDTNRIKAKKTPYEARADFPEYAKFAQMCKWGSQKLDLFLRKEADIPDWKNLTRTSQIARELREEIARWLEIKGDAEKVRERIGAPSGLQTAICRRSKAWRGKLPEVDGKKDRDNMRHHLWDAAVLSHIPPGEGTQPTRFGGIFYQEKEDKPGDLGWQVIDVGPDLITFEKETAQQCLVEKPRQRRSKQARTEETIYGMNEEGRLTVRKSLINSEGLIDKNAAKWIKDSGIPATQLPKNRLEKFLEQDKEAKALELSNGTPVNKVRIVAPKESPVAMLPHRNRQGDVIGWKIMGSPYARMEIWKGPDLDKKGQPVFKRRFVPNPRGLAAIHRLAKEGKTAYWNKKLSKDKPSLRREVIGDPLPKYSKKVCSVGLGDLLLVPFNGLGENINPVWNPKKLQFDKPKADHWVWLRVSSIKSSGEVSTAITEKPNVDTIKAIRPTITSMIAAYRKFAESNEN

SEQ ID NO: 10261 - protein, 1110 aa, unidentified
  REGION 1..1110: note = Description of Unknown: Cas Enzyme sequence
MNASTKSLPSPQGLNLALDVGHSSIGWALLSNDGAEAKPKPVVHHCGVVTFPADDCLAKHRRTYRRQRRHVRAIRQRIQRTAALLTHCGALSASLVETKHAQGGGHPAPWLLAARVLASNGAKEYLLSWNELWDVLRWYGHNRGYDGNKKWSRAGEEDEDDTEKVTNALEMMKAFDCKTMAETITRFMFKPHGVTDILKADPTKLPPFNLDPARRQCRYKGQNAAFPRDKVEAEVRRILEAHVGVLLHCDAALISALMDDGHAVKSDAIRLPKRYHGGLLFGQLLPRFENRILTQCPFTKHTVPSRHSFEFLRYRWAMQLANISVGVPGDKGLRTLNKDERAALNLKMQERGYLTPGELKAFVKEITGCVWSNLDAMLLHPDAKDALELYPFAKGKDAFRGVWGALTPKHRQLFANQMMRGKELTPAGIEQWLRDRNDAEAADKIAAGLAAGKKTKLAPEKLEALRAETIAFKKLSGRAPYSAVWLLKAEGEVLDGFDPRKESKASKPEKGEEKVADGCLVRTAEILHTALHTPLEKQTNNHLIRQRLFILEKLIKEIAADESLTGGRVITSAVIEVNRDLRAMSGMTAKEMASDMGLRLSTFKSAVAYLETAAEESPFAITPGLIRKTRVAMDLDWMCPYSGRTFRVHDLLPGANYDKDHVIPYSVRPSNSLESLVITRREINEAKGNRTALQFVEDMNLPENAKEKERLGICTPNQFRTFVDNLEARKGHDDDRKRKRVRKGLLMLAKWDEKKSGFTPGDLTVTSQIVRLGAQSVQRALAHLEPKDVISMPGSVTGELRKGWHLLGLLAEANPNVKDAETGEMKTKTEIRGVTHLHHALDACVLGLAGLYFPYNQGVWELIGKRNPTEAEKQKLIERGIYRKDAEGRLHLVNDLGDAVKTQIAEALKQKRVVQHVPKDLSGMKVEENTRRVVSITEGRAKLRQQVRDPKTGKLSVKETEEPVGKLVGLRQGKLEKQKGVRVITDNYGVAILDALPEGTPDAERFVIIPWHRVWHRLKDIKAQNKGKVPLIVRTGQGIHVAEGNFAGLWTVHSVKNNSTGMALDMGWPDVVTLANKTPGHKINVRLASLLKGGLRVSDASLAGNGFGAH

SEQ ID NO: 10262 - protein, 1261 aa, unidentified
  REGION 1..1261: note = Description of Unknown: Cas Enzyme sequence
MAPSELAYSRREMRALGAGKGVILASGPSSRARLGQFSPGPALTRLRDQGWILAEWPNVPSETYLASLGFFRSIPGMSTIWAFDLGKASIGEAVWDEGQKKFLHVASLLIPAEFASTKDAASRRRMKRTRDAHKAREAWLEEVWTKAGLTPLHGRKVGKVDDQGNPIPETEWSKRKGKWQLISPGDERLEREFAKRGDPTCYTSCLLRIKLLRGEPLQEWQIYKALRSAIQKRGYGRVPWAARELKQKDLSEEELARALYKQDQDLAKLDPNYREAIEAWPAFKEGHDAHFHYPCYYDAEKQLLWGKTAPNTLKAAVDHRAGSTRQVRFDRDDVEKEIAELARQAAKQLPPLASSFATWQKAGWTMIHPQTKKPKTFAMGARDVGEFMVHGPAGEPTGAAKTNFSDYLSFREKAGIHVGSHEDWMGTTGQKTPRFDNRIVNDCAIFDGMKACKVEVRLDAKTGAPYPDSLLYAEVTFLSKLKNLWVEHMDELDPRKLTAAEVQAIFAHVKKKALAVKCTENKAGQKEIGKWAQKVTKCFAMTEAAWERDKGIKELNLRPEPGHKVVDAPKTDGRSRYSRPALKVTRSLILSGQKPSEFLRRLESSEPALLDEIGMDVLARDPAPAPNGQRQKHQLARPFILLSHLKFLRDLAANNDSWEDLYIPEQRMDALEAKHRDKEGNIDRDKAIRDLIADNNDPIVRHRLTVFAERLVKLENEHGSPSDVILEFVRTDFMGDKALKKLNDFQKGREKDRAEAKKIMEEREIGDRSAPLKYELLLQQGGFCLYCGRGIGIDHIAKDEVDIDHIVPRGSKYRGPDAMVNFVLAHRTCNAAKKDQTPFEWLHGKEGWHAYVERVQKHATALRNKKVQLLIQEDAPKLVERYTALAETAWISKLAKKIVHLHFGWRNGLNAKGELCVSVVSGGLTGRIRRKYKLNSILNPNAESEEEAEKKNRKDHRHHALDAMVISQMPKWMGNKKKEKFFRFDEPIAQNPRGFFASEIGKVMPEALAYEQAKLAKTAYGGRWIDQTKNDMVIVQRTSLVDLAMNAVTQGEKEYDPEYRDKNIASVRDKVIRRDLLTFARTSPSQREWEAFCSTYCKPRKDGTRGPRVIRVTVLTGEPTEYREMSKDQRGTWRKGDGNHKGQIIYQDASGAPKVHPVYAHASIIRETEKLNEDGCVVLGFFQSGCIVETKKAVPAASYSMVIKNEKDQKRRIAAIADLPPSKLTLRQIVTKSMMVELTLADSTRVVGKIGVWAVAKLTRM

SEQ ID NO: 10263 - protein, 1438 aa, unidentified
  REGION 1..1438: note = Description of Unknown: Cas Enzyme sequence
MKNILGLDLGTNSIGWALVERNDQYTDGKIIGIGSRILPTDVELLSKFETGQAASKNAKRRQFRGSRRLKARYKLRRDRLIKAMKILGWIDADFKPGHTIPIAATRLAQMRTEFGKTEIPDDWVVYFLRHMALSEKIEKSELARVIYHMNQRRGFKTNRKSDQSLETPSESEDEEGRKKREKKIERVTIADVIDTGDLVKGYQVFEIRLKDGRAGSTQRKIKPDWKGQTLELEITTVPLTKKDPTERLEFRPLSNSDQDQWAKQKVARQADIDDSGLKYPGTYYFHQLRSEVQKNSTYVIKDVTIDRTYYEKELATILTKQIELDSSLENREALDAIAIEFYPNNPEKQKELKANGLTHLILRDIIYYQRPLKSKKSSLADCRFEYKNQIDPSTGKKYALKVSPASNPAFQEFRIWQTISNIRILEKKHQSSSGKTELDKDVSDQFLTKDSLESIFDLFDKKEKVRQKDILQLLKLDIKEFTVNLYNLNPDKELPGNETKALIIKFFKKAHLVELGESVIADSTKLFDIWHLLYSVDDRNNIRQTLLRWFQISEESADILASIPAFKQAYASLSNKAINKLLPLMRIGKYWSWEAIHASTKYRLEKILHAEFDENISDQVRQLFLRHQLENHEDFQGLNTPMAAYAVYGLHSEKTISSYDRPDQVVPKEPLNLRNPLVEQVVNETLRLVRDIWKTYGRPFEIHIELARELKKNRKEREEMTKMMYENEQENARIAAILRELKLGNPNSLSDIERLKLWERQGGETARLSMQEVKFKRPAEPTPSEIERYKLWAQQQFISPYSGQPIPISKLFTRDYDIDHIIPRSRFFDDSLENKVVVESFLNKEKGNTTAMEYIKKGSAMGFVLLNEKEFEEHTLKFFFRKKRKLLLSEDVPDQFINRQLVDTRYIGRKITELLAPVSENQQDPIIVSNGTITHELKANWGLSEVMKELVKWRFEHLEQKTGKKYAWYDQETDTEGKPTGRKVLRLKGYEKRIDHRHHALDALVVACTTRSHIKYLNDLNKLRENGNGFDSEIKTQLPLLLLPGKDKHLQSRKFKMPWDKFRQDSRDALSSIIVSFRNRIRIMGKKANRNQKIVLQPDGSMKKQIVFSKDSGGNKKLSPYVRQSLHKATIWGQIKRREYKDVNFTDAFRNIDLIADKDQKKYFRTLLEQSAGEIKKAVKSYKDAPYTDSNGNLLQKVAVVEFKHYATSRVDISTGFDLKRIEKIPDPVLKDKLREHLSAMEEGNKEKNKESQIDPFGPEGIQILNSGLRFPIKKVTTIEDQGSKFPIRPGAYTEADKGTNLYFVIYENLNDPSDRQFASIPLRDVVEAKAAGEGFVEEKPGYRLFLLSPNDLVYIPDEGEKMNPSNLNLDSSKVYKMVSCTGRQCFFVMNTIAKVIIDKVELGSINKEEKGQDGRMIKQFCYKIEIDRLGGIKSKNK

SEQ ID NO: 10264 - protein, 1405 aa, unidentified
  REGION 1..1405: note = Description of Unknown: Cas Enzyme sequence
MKKTLGIDLGTHSIGWAIRNLDLPENQIEDYGVITFEKGVASEKGNEFPKVQKRTESRGKRRNYQAEKYRKFAILDYLIQKGMCPLSIEDFNHWKLYTKGKKRQYPQSKEFLNWIRFDFDGDGLPDFHLFGKEKDESYYVFRAFSADKTYKDVFSKNPHILGRVLYQLVQRRGFKGRDEEEAKTMLTGSDKNGTKGRNDIEEYIKQYKTLGSALYHYQKDSGERIRQRYNLRKDFELELQEICRVHSISEEDYNKLWKAIIWQRPLRTQKGLIGNCIYENNKKRLAVSHPLYEEYRTWVFINNLNIVAPIGENLQEYLSAKVYPLFYKLKPDFELIDIDKQLKKDGAKRQSRHHEKTKVLPAKLLKQFQDIFGENWKELLQWNVTGSRDSQPTKRSSTSYTFEDLWHVLLTFDGQENLKKFALEKLKLDEEKATKFSRIKLQQGYATLSLSAIKKILPYLQKGFLYSHAVYMANLYKMLDEGVISETLINHFADEVLQILNKDSNNRKNATIINGLISEMLNDEHRYYITDNRKLDDKENEIVLKSIIDNYGQDTWENFSEQVKTETIEFVSEKYLEFLKKTFTQKGNHFIQPERIHDKIFAFLRDTYHVTEDKKKHLWHPSEQENYTKAGDYNEYSIGKKKYYVKEANSQNFLAKNADAHFEGRQIKLLGNPEPLSKGFKNPMALKSLHKLKNLVNYLLQTGKIDEETRVVVEIARELNDKNKRKAIEIWQKDREKENEAYRKELETYREAFPNVKLIDENTLIRKIRLWHEQNKICLYTGRTISFADLIIGNKYDFEHTIPASISFDNELKNLTISDSTYNRVHKKKLFPTQLSNYESEQNFDGNTVNPIIKNIEFIFGGRTVEYKEVKGKTEKIIKWKKIDELEKQFDEWKKKASYASTKEIKDNCIVKYHTIKMDLDYLKAKLSTFTITEYKAGWRNNQIRDTQIITKYALPYFKTLFKRVSVEKGAVTDIFKKVYKVQSKDEKKDRSVHSHHAQDAAILTLIPNPFHRERIIKAYENEIDNRTGKTYHEIPLDWGNFSERYILELKDKVLINNLTDNRTITQTYKTVRKRGKVQYDTDKNGNSSKRISRGDTIRGQLHGETFYGAIKQPVRNEENKILFDENKKMILKDEIYLAVRKPLLYKKDANSAGFKTLEEVEKVIVDKALFEMIKKQVEESDFKTALTEGVYMLDENGSKVNKIRRIRCFENGLKYTTAIKVHKHSFASDKEYKKTTLATNGENTYCLFYKSDKGKAMRILSIVDLADLKLKNIQSLYSEPEFSFVETGRGKNKVEIPLYSVLKKGDKFIFYKDSINELKDLDVKDLSERIYKVYQFEGDSGRMKFRHHLVAGIDTELKKNNPEYSSVNFDEQQIFLRLSQGQWSFALEGKDFDMLLDGTINFKF

SEQ ID NO: 10265 - protein, 994 aa, unidentified
  REGION 1..994: note = Description of Unknown: Cas Enzyme sequence
MFENSNLILGVDLGVKSVGLALIDPANRQIPLTAVRIFPAGVDGDFESGRDESRNRHRREKRLARRQTDRRRRRLAKIHGILTRAGLLPAGDSHDTLKALDAELSVKYGPHPGPPYSLRARALDYPLAPYELGRSLYHLAQRRGFLSNRRAPVKDNEEEGKVTAGLNTLQSAISSSGKRTLGEYLASLDPHTSKVRRQYTSRQMYAEEFEAIWQAQTQHHPLLTQALKLQIHEAIFHQRPLKDQSGRVGTCSLLPTEKRAPIRDLSFQRFRILDRVNALRLSEPERPLTPGERSILVEALSKQSKLAYARARSLLNLPKSARFTIEAGGEKSMTGNVTAAQFEEALNLRWHEFSPERQALLVEDWARAETDEHFKSILLEWSEFDAGEIESLCKVRLPDGYASLSLKAIQRLLPHLEAGMTTGEARRLEFPEIFESKPPVDFLPPVLATLGDLRNPAVTRVLTEFRKAINAIVRKYGKPAEIHIELARDLKRGKKDREELTKHNRDNEKKRADAVAELKKLGLPAPSRDDIAKYLLWLECNRVCPYSGDPISFDGIFGQHSQFDIEHIIPESRSFDNSQANRTLCRRYYNVRKGNKTPWEAFGQTEEWEGMVARVKAFAGRRKFRLFTSTETDVAKILGDFTTSELNDTRYASRLAAQYAGLLYGGVNDASGTKRIFCSAGQVTAQLRRLWTLDGILNPAEWTKSRDDHRHHAVDAATVACVSSGIIQTLSNENQRAREAGQRRLRSLAEPWPHFRDQLAEAIWSRTAVSLRPERKLRGPLHEETHYAVRKNPAGKPEVHVRKPIEKAAAKPERIVDPVVRSQVVAALERNEKEFFMPSGVPIRFARVVENVTVERIATGRRVRNVITGDNHHMEIVALQSRGKTSYVGKVVSRLAAVGRKREGKPVVQRDHGPNSEFLFTLSEGDMVSWKATVWRVRGVAVQSNGRLILSPASDARQKKDIENLESPSVNVFCCSGGKKIHVTPIGETRDARD

SEQ ID NO: 10266 - protein, 1120 aa, unidentified
  REGION 1..1120: note = Description of Unknown: Cas Enzyme sequence
MSNITTPSLQLAFDVGHSSIGWAVLDAPERQEMKLLGTGVVTFQADSCLASQRRMFRRQRRHIRSTRQRLSRIKNLIGHIGAIPVNRLEEKDQAGGGHSAPWLLAARVLRGGSLCNWEELWDVLRWYAHNRGYDGNRAWSKREEEASEDTEKLQNANRLLADFQSKHGRAGSMAEVFCEISCLDPLGDKISCNLAGNKRPKATNAAFPRETVEGEVRSILQKHIGHLNGVDEAFIRCIMEDWTAIPCPQIKLPSRFGQVLADGTLAKGGLLFGQLIPRFDNRIISKCPITFERLYQSVLVETGDIEKSKLEANKLSKVPSKNCREFLRFRWAMQVANIRIAHAEKRETRALTIKERKALDSSIPKEGYFTPTGLKNAVRKITGGAPDNLDQLLVHPDAIEALLIDPARKALSRVPWSDVAFALPDKQLGIVLNKLRRGSSISLHDILAINHPSRTALDEAIAAEAKKKRKTSADEIFGIWQNEKASCPRMNGRAPYSREVMSDVDEFVFSTDRHPVEGTPEGKDNGPLYRSEEIRFAQLQRDIDEQTNNRLVRHRLLILERLHRDILKDFAGGDSERVSRVTIEVNRDLREMSGKTNKLIEQELGLRLGNFKSVSTRLEADLKPHGIRVNAGLIRKARIAEDLGWKCPYTGQSFDALDLHGRTVDKDHIIPRSQRPSDSLESLAITYSEVNRMKGNMTALAFIEQFGGQQVAGRNGLYVHTRQQFEALVNSLETRRGHQDDQRRKKNRKELLLLRDYVEKEFTPRDLTQTSQLVRMGAQILEKAYLGNTNKPVITSLAGSVTGAIRKAWNLTQCLATANPLILNPEDLDSNGNPRPHPKSEIRGITHLHHALDACVLAFTSLFLPRDGGVWGLLVKRRLNPQEASFLKDRLGNMVQIAKDGTFQIAELPNFLKEQIRTRLAEKRVCQHIPSEIRGLIVKQNAWRVVAIKDGKVHLKQRMRQADGTRSTEEKELKEGKVLGISPAIGSGKLKKIKAALEISENYGLALDPEPQIIPFHKVHQRICELTRKNGGKRPRILQNGMLIEVRKKGRRADYRGIWKIFSLKDNSTGPAVDMGWPDAVALKNKTQGHKINVSLQSLLESEMRICAPLLTGTPWGACE

SEQ ID NO: 10267 - protein, 933 aa, unidentified
  REGION 1..933: note = Description of Unknown: Cas Enzyme sequence
QNQDLELAFDVGHSSLGWAVLQNTGGNYSSPTPFAKNSAIPKTPPSPRVNILGCGVVTFGADDCLASKRRDYRRQRRHARATRQRIAQMEKLLAHLKVLAVEELKQKHQQAGGSAVPWFLAARVLASNGVAKFLLGWKELWDVLRWYAHNRGYDGNRRWSAQEAEAQEKDTEKEQNANALMAQHGTQTMAETFCKVLGLDPLGEKQSSDKNFKRLNAAFPRSVVEKEVRRLLELHQKKLPAINDLFLKSLFEDWQAAAVPGLKLPARYQGGLLFGQLVPRFDNRIISTCPITGEKVPSKNCPEFFRFRWALALANIRVAGAKEKELRPLTGDERKKINTLMESEGALTPTELKKAIRELPGCERNNLETMLMHPDAKDGLLLDPIQKLVRGDKLKTLWPAFSPRVQKRVRDLWQRGKLVTLERICAIAQKLGESLVEFEAELSKLADAANAKRGKKEGSFNREALLREPLTIKKLDGRAAYARPLLVRAYAEVMAGKHPKETGGCLEVTDAMRQAQLQKQIDQQTNNHLVRHRLLILERLLKDLIAEPAYANGDKSRVAKVTIEVNRDLREMSGKSAKEIQQDLGRRLANHHSVAAKLEKDLDGKTYNGQPIQITAGLIRKARIAEDLGWTCPYTGKTYDALDLVSRQVDKDHIIPRSLRPSDSLDSLVITFSEVNKMKGQRTAIQFVSDEQEKTVEGMPQLSIVSVTRFKKWAEGLETFKGHDDDKRRKKKRKELLVLQSYEEKGFVPRDLTVTSQLVRLGAQNIRKTLPDLNPSKVVSLPGSVTGTVRKGWNLLGCLAVAAPQVKEADGTLKNKTDIRGVTHLHHALDACVLGLASHYLPNNGGLWELMLKRNPNEADKAVLRSTGYFDFDSQGRFGLTELPETLKEQIRLRLAEKRVVQHIPADMSGMRVEENTRGITGIKDGRVFLRQQ

SEQ ID NO: 10268 - protein, 1002 aa, unidentified
  REGION 1..1002: note = Description of Unknown: Cas Enzyme sequence
MKKILGLDLGVASIGWAYVQEDDIKSQIIGMGVRIIPLTSDERDEFIAGNAISKNAKRRIKRGMRRNVYRRTMRKDLLKSCLLASAMMPSESVFASFTKDLIWQLRANAAEKQISLEELGRVLFHLNQKRGFKSNRKVDGDETADNKETEYKAEIRKNHDVLTSSGLTLGQWVHQELTKDEHFKLKGKIFPRAVYVEEFERIWKCQSAFYPQLNDQLKEKIGYGIIFNQRPLKSQKALVGRCEIVKRWSDLNGKKMDVSPRVSPKSAPIAQWTKILEAVNNIKAEDRKGNQIPIDGALRLSLAHELRFCAKMTSKQVSKHLKLSSDARVNLTDRGIQGDLTMVSLLDKLGKHSDTNALITELKACHFATVESEKVDTATGEIIAHKEIDAGYEHNIYNRIWHLLYSVDQNDIVVNKLMSTFGLSIEAATDLATIDMAKAGFGNKSAKAMRLIIPYLEMGYMYSEAMAFAGFRHSDYLDVLENEQRELLDVIPNLPKNSLRQPVVEKVLNQLINIVNAINADPKFGRPDEIRIELARELQQSKDERNSATKRIAANEKENKEIEQKLVNEFHFKRVTRSLINKYKLYMEMDGRSPYTGAGISLADFLNGNGVEVEHIIPRSKLFDDSQSNKTIAESWVNKAKGNRTAYDFMELQPVPGLLSFEDYIENVNRLFKKGSKERGISYTKFSRLLTKESEIPDDFISRQLRQTQYISKKAMQILRMGTRHVHASSGPVTDYLREKWGWNDVLKLIHWDRYEKLGLTSIEEGKGGKRHYHIKDWTKRNDHRHHAIDALVVACTKQAYIQRLNNLNQTLNKEGNQGSLKEIQDLKLEAIEKAVPFSTDEVKNVVEGINVSFKAGKKVASMSRNKATGHKHLIPRGALSEETIYGKIKLRVKREVALNKNFDTQWLVADPRLRQMIAERLAEHEGDPAKAFKKPMFADKEGVQAIKKVEIWDWQEEVVRKKPLTSLKRKDCDIIVDEVVKQKVVQFFDQFDKESDAIKKL

SEQ ID NO: 10269 - protein, 1038 aa, unidentified
  REGION 1..1038: note = Description of Unknown: Cas Enzyme sequence
MPQMRYRLALDLGSTSLGWAMVRLNPQDEPCAVIKAGVRIFSNGREPARPGEIGTSLAASRREARAMRRRRDRLLKRKNRMMATLLRHGFFPQDEAARKALEKTDPFALRAKGLDQALLPEEFARALFHINQRRGFKSNRKTDKKENDSSALKKAIGQLRQAMQTTGCRTVGEWLFARHQQGLSVRARYRENRIAQDNGKTKIEKSYDLYIDRALIEAEFDALWAKQSELNPDLFHNTARDELKDCLLHQRPLKPVKPGRCTLLPDEERAPLALPSQQRFRIYQEVNNLRLLREGLSEEPLTITQRDQLAHALETNSKRSFTQIQRLFGFSGQFNLQDEKRTELKGNSTSAMLSKKEFFGSQWFSFDEVQQDAIVKQLVTEENLATLIDWLQAQTGIDDITAERIANVPLAEGYGSLSAKALEKILPALRGEVITYDKAVLAAGFNHHSLLQVGDEVAGFTFATGLERVNQQTGEIKPVHAFHQLPYYGQYLQRHVGFGTGKPEDTAEKRYGKIANPTVHIGLNQVRTVVNALIKRYGHPSEVIVELARDLKQSQDQRKEEQKRQADNQRRNERMRADIAKLLHTSPERVRAIDLQKMILWEELSFNVADRRCPYSGVQISAQMLFSEQVEIEHILPFSKTLDDSPNNKTVAMRQANRIKGNRTPAQAAADFAMQGWPIEDMLQRASLMPKGKRYRFAPDGLEQWLREDKGFLARALNDTRHLSRLAREYLSLVCPQDTRVIPGRMTAMLRAKFGLNDILGLDGEKNRNDHRHHAVDACVIAVTDQGLLNRFAQASASAREKQLNRLVETMPLPWDSYRDHVQRAIDHIWVSHKPDHGHEGAMHNDTAYGLLGGGKVQVRKTLDGVRTREIAALKVIEFADAQATARHGLLPNGEPRPYKGYKGDSNYCMEIVRNDKGKWEGEVVSTFEAYQLVRQHGLSRLRHPALSVSGRPLVMRLMIGDSVGIETDGLRKIYRLSYMASAGTMAFSECHEANVDKRTRSKELSYLFKTAGSLQKSKGRRVAISPAGELKDTGFSG

SEQ ID NO: 10270 - protein, 1174 aa, unidentified
  REGION 1..1174: note = Description of Unknown: Cas Enzyme sequence
MIAPSCLVGADAPLPKLPKSFPIEIDESLALGLDLGVGSCGQALIYDTEEAKAACRIRGFPRFPERIAFLGVRAFDVPETREKTGIKLKNPERRQKRRLRVTTRRRAWRMWEIRKLLKSEGVLPADYPTDPEIWKKNPSRGENPLLDRWRDWHSCMTKGVSGVGVMSPLELRVRGLDTKLGPLEWAAVLLHVAKHRGFKSNRKSESADEEGGKVLKALSENKRRMAEGSYRTIGEMLLKHSDFAERKRNREGIYVATPLRKEQENEVRMLFSQQRTLGNPNTGEELEDSYLRLFNAQYALQNPLNLLGDCPFEKAEKRSPRYAPSFELSRALQKLNTLWVIPKGEVKVRLADHVDAANGGYEDFIKQFGSRGTKSEPGRITWADLRSIFRLHDELVFADLPTPKRKLKKDGTEEIQTTEKLEKEDFVTRNNANAAAKGTYLLRNALRDGLYDSLAKSQPEQLDRTAFALSFFEQIENDATTDKYWGVLNQMRADDLDARLIEDIAADLRSEKPSLNKFSGTTSMSVSACRRLIPHLTIGVVYSEACSAEYGDHRQTDLNFDTITNPVVKSVVRECLKQVVHLIDEAGKIPGRICVEIGRDLGKSVDERNAMAEGIRERTDAKNANRENLKGHLGRLPDDDELLRYELWLEQGNHCPYCGSHLGKPSDIVSPEFEIDHILPRSRSFDNSYENKVLVHRRCNRDKKDSTPFEFHRIGNRDEHSDGWRQFTAILSTLKGIRKQKRRNLLNTTFGEDETKFASRHLNDTRYIAKLVTHYLHSLYEIAGETPVTAKGGKKRVFVQPGGLTAIVRKAWGLENLKKDVEGNRIGDKHHAIDALVCALLSDGQRQFVTRRDQQDRDALRHSKIFTDFSRHYRLMEDANDQRRVPGKMDPPWPDFRHDVARAVELFTVSRREVRKGRGGLHNDTIYRVGRENGKDVCYSRKPIIDTSVGKGKAIFKNLEDLQRIKDIGSERNGWLRDSLTAWIKAGAPVEAHLLPRDPQGAIIRKVTLNQGKKSGRRYPQGFVSGGDQVRLDVFSKTKANGERNFFLVPIYSYHLSMEHPPVRAIVANKDEEEWDAVDGTFRFEFSLWPKSRFEIVKKPTSLKPEGESVIGLYAGIDRNTGAFTFVDPDDSQTQGRLTAKTGATSFRKLDTDRLGRVNLIDSEKRTWRGGTIT

SEQ ID NO: 10271 - protein, 1048 aa, unidentified
  REGION 1..1048: note = Description of Unknown: Cas Enzyme sequence
MIRETTSKPSTEPVVLGLDIGAKSIGWALVRGPETGKPEIVAAGVRVFEAGVDGDIESGQDSSRAAVRRMARQMRRQTHRRVQRKRQLFRLLQSVGLLPATPNTQSTTRDATIKAVDTLLLASLPETYGTEGDVAAKLPYVLRAEALKRALTPEELGRVFYHLGERRGFKSNRRTDRKAEDTGKVYDGIAEVRSKKGSQTLGEYFAAGDPKKARIRNHYLARADYEEECVKIFDSQQRHHDCLTPKFRRKLLRCLFWQRPLKSQKSLIGRCSLLTTRRRCSIADPIAQEFRLLQAVNHLNIIDPDGNMRVLTNAERAKLLDALRNQGDLTFTAVRKLLGLKKKESRFNLEEGGEKKLPGNRTHQSMTEAIGEDWEKLSDVEKSQLVGIVRGSTDEASLRGQIGAAFPNLLYACDTLDKVVLEDRPAAHCKKVLADLAERMRDGIPYATARADFEATHKLGGPTEPVDQLPSVRTFLPSLTNPAVIRALTELRKVVNELVRLYGKPNMVRIELARDLKKPRHIRQAISDRMRQREGERSVAVQNLKSKGVTNPSRADIEKVMLAEECGWVCPYTGKSFGMIDLIGSAPAVDVEHIFPRRYLDDSFINKTLCVATENRAVKKDRLPAEAYAGDAPRYQQILDRVRAFRSELRDEKLRRFMADKVDADFASRQLVDTAYASREAARYIGLLYGGIVDVRSDRRVRTSSGRLSGLLRSAWKLNTILGTAESPKGRGVDHRHHAVDAIVVALSTDSIVKAVTDSASKYAARSSGRWTLDIPEQDGLLEAATEAVKAIVVSHRVDRRLAGRLHEDSIYSPPRPDGNGNHYHVIRKALTKLTPADITSDKIVDPRVREIIQEQYRVLCERLGKTKPSDIFADEKNLPHLPNKSGAPIPIRKVRLRVRDSAARIGDADHRQRHIMRDADGLHHTAIFVRRKGDKEVWLEEPTSRLEVQDRKRRGSPVVRTISGLDTDFVLHLCKGDSVELDDATGDRTIYVVRGVAGTDIRVVPCWDASTDNRTPETRIRSPNKLRDRNPRVVVVTPAGRVFARGG

SEQ ID NO: 10272 - protein, 1073 aa, unidentified
  REGION 1..1073: note = Description of Unknown: Cas Enzyme sequence
ANASSDTVNKKPADISLAFDVGHSSIGLAVLRSQATSPDILGCGVVTFQADDCLASKRRLFRRQRRHVRSTRQRIDRMEKLLAHFGVFTVEELKGKHAQGQGNPAPWLLAARVLAACAANMDTSPYLLKWEELWDVLRWYAHNRGYDGNRRWAGDEAVMADDEDGDTEKVENARALMVEHGTHTMAETITSVMFEPHGKLKALDVGDSKLPFFTNKSRYKAKNAAFPRDVVEREVKALLEAHVGALDHVTKDLITLLGEDTSDGATRLRLRGMNINLPRRFQGGILFGQLLPRFDNRIISNCPVSGGKVCAKSTPEFRLYRWLMQVANVRVVRANREQPHQLTEAERAALHGRMVERGAFTPGEFKAAVKEITGCATNNLETMLMHPDADKALVLDPVRKLINSDRVQFLWQYFPESIRERIHKRAAGKWRQGKVLTLNDMLSWCDELGVSSQTVLKAAQDAVSAKTVKKASKAKPINEAELLATPLKIEAMNGRAPFARHILTKASEEVMAGYDPRKKSRANDPAGGEDKLEDGCLVRDSSHAVMCQPFPEYELWKGMWIKKAANTARSEQDALETYQKALSSAVHDAQTNNHLVRHRLLILQRLVTDIIADPLLVNGDASRITGVAIEVNRELKEMSGKTAKLVAQDMGLRLGNFKSVVTKLEDAGILHPSPGLIRKARIAEDLGRYCPYTGRHYDWQDLLQTDKWDKDHIVPYSFRPSNGLDSLVITTKAINLEKKARTGLEFIEWMNQPENLARRDQLGVCSVKEYKDFVNGLESWKGHDDDVKRKRRRKQLLLLPKWEEKDASFLPRDLTVTSHLVRLGALVLHRSLSHLEPHEITSLPGSVTGAIRTGWKLLGCLSLANAGVLEKNGELKTKTDIRGVTHLHHALDAIVIGLTHHYFPKNGRLWEAMVRREKQRSKEDNELLMATGLFHTTQYGVVFAQEPPKSLMELIRRRLAERRVVQHLPSDMSGLLIEENTRGVVSIDEDGTVHLKQVTRDEKTGKLKVNPTKAQPSRLIGLRPGKLNEQRGVRVISDNYGVAILDAPPPKADGTAGDSDDRFVVIPFAGVWK

SEQ ID NO: 10273 - protein, 1213 aa, unidentified
  REGION 1..1213: note = Description of Unknown: Cas Enzyme sequence
MKKVLGLDLGTNSVGFAIVQFSDDENQGQIIQMGARIVPKDPDFHGVFEKGALGADSKNAKRRVKRGIRRGYQRWQGRRNRLLEILKRHNMLPDDLKTDFPDNAVKTDEKSISPAYRLYELRAKAATQQITLKEFGRVLLLLNNKRGFKSNKKAQSEEEKETDYEKPLSDENESIGEKTIGEYLLSLLQKNPYTRLKGRTFYRKKYIEEFDRIWTVQRKGREQILTGEPGKKDYKSLYSILKNDIIYFQRPLKSAKGLVGKCRYEPHLACSPVSSPLFQHFRIWKTLNDIRINRESGEDEFISHQQKLRIFEALHDPASLDANNNLTAKSKKIKDILGIQKNKDKLNFETIPGNKTYLVIRKALETAGVINPENLRFTWENEEHKPASEKTGLNALWHLSYSLDNEETLVNALLKGNRFGMTEEQARMYAKEIGFPQEFSSLSAKAIRKLIPHLENGYNEYEATLEVKYRHTDEETNEEKKAKELEPFVSLVKPNELRNPVVEQILNQAIHIVNAISEKYGKPDEVRIELARSLRATADQRSNQTKRMRELESLNKVFEKEIAQIKGSPTITARDRERLKLWKETKMRCLYSGKTINQSDVFNGRTEIEHIIPRSLFADNSLQNKILVFKEFNEKKGQRTAWDYIQQDKPRDPESYKKEVMELLKNPKKDKNGQGIGKLKRDYLLITQENIPSDFTAAQLKATEYISTEISKRLKSCIRQVTLTSGSVTAILRDDWGLNDILRDINLPRYAKVGKVVQELRYNAHKNDNYTITKIEDWSKRDDHRHHALDALIVALTTQGVIQKINSLNASNGKVNIGVNKQRFPIPVGNIHNQVKEHLNQMLVSFKKSSKAVTIKRSKAQRPNGDRFDIETLVPRGQLHKDNLIGKSKIIADGKIPLTKAFDKPEMIISPTIKELIQERLKAYNFNVKAAIKSLDKKPILVKGRKIEEIKVYQEVNKKRVKVVDLTPDMLEDIIDPVIKKILINWIGTELIEDFQKKDLKKDKKDKENKKELKKAIQEKIKTYLSQPVFFDLKKTIPIYNVTIKINREITPIRFKNDEPIAYALVENNHHAIISQDSKGNWLIDPVNIWTTTARAKLKEPVINRNSNQEKRFIMSLQINDLFYRTPEEDETPNSSWFFQPENMNKIANNLFRIQNLSGENKSCDIVFRQQFETTIQNKIRAVSYERIQSTEKLKRWIKIHLDKTGQIIRVGE

SEQ ID NO: 10274 - protein, 1150 aa, unidentified
  REGION 1..1150: note = Description of Unknown: Cas Enzyme sequence
MENDKYKLGLDIGVGSVGFALIKESESGETGIVRMGVRIVTEDPKFHGNYYTGNSASKNADRTKARSYRRSINRYQLRRDQLIRILNHLNMMPDEDMLTRISSLELFELRDRAVRERIELKELGRIFYHLNQKRGFKSSRKSASEEENKTEYKKMLAENHEALGAQTIGQHFYQKLLQDPFFRVKDNIFYRTDYQNEFDVIWNQQKKYYPEVLTGEPDESENRGTNYRRIRNETIYYQRKLKSAKHLVSKCTFEPLKRVLPKSHPLFQEFRIWNQINNLRAVSEKNETRVPTTEERIKIWKALHGIKDLGKDEKILNSFGDLTATKIIKEILGLSRDYTLNFEKLEGNKTWRTLTRAIADAGVSLSLTPLGEEDLHDMEQADLTRLWHCTYSLENERETKIALMNNFGFSEEAAQLIASSTGYTSDYGSISAKAAKKILPHLWKGLTYDKAVIEAGYQHHSHFETTTFLKKLPAVKSNTLKNPVVEQVLNQVVNVVNGIIEQYGQPDEVRVELARELKSNAKKRSKTSQQQRQLEQLNKGIAERLTSEHKFKRVNGRDLLRYRLWEETDQKCLYCGQPISFSDVYNGKAEIEHIVPRSRLFSNAMSNLILAHVNENREKGQLTALDYLKQQGAKAEENYIQRVNELYNAKKITYSKHKLLLTVGEEIENDFLDRQLNDTQYIARETIGLLKLVFPKVYTTTGSVTDMLKERWQLNHLLEEINLPVYREYGLTEHVEIKDKQGFPKTIEKIKDFSKRSDHRHHAVDALVIALTRQSYIQRLNTLNQHFKKYQDLKESAYEFPAPSPTLRDDAKQHLECLLISFKKPGAKVLTRKTNRVKTNQGIKEQVTWSPRGSLHEDTILGRIKRYKKAEWKDALAEPNNIIDAQVKLAIQELVAREGDVKKALSYLKKNNLELDGIEVSKPLMWEYRFTKRVKLNDQLSPAKVSKIIDPKIRDLVEARIQEFGSIKAAFKEYSANPIWLNIDRRIPIKSVTLFDDGNLEQVRQGFVYLKGNHHSLIYKNHEGEFREKIVTFWEAVERALLNLRETGSIYPIIDRRPLEDGFELYFSMQINDLFLMDCDNYTNDDVLIAKKLYRLQSLSSGDFSFRQQYQTTIALNKEFAYRRITSLKKFSSIMKVRLSPLGQIIRLGE

SEQ ID NO: 10275 - protein, 1031 aa, unidentified
  REGION 1..1031: note = Description of Unknown: Cas Enzyme sequence
MKKRTLGLDLGPNSIGWALVEEDSEQKGGCLIDMGVRVFTEGLDAFDTGKESSRNEKRRVARGMRRQTARRRKRRKEMTDALTSVGLWPLTKKERDHWMQINPYELRAKAVSNVKLAPFEMGRVFLHLAKRRGFLSNRKTDASGKEGEGLLHEIQENEAKRVQSGHPTLGSWLNEKQKTQDPTNRRDDDHVRRRHLSRKQYQHEFDTIWKSQATFHPDLLTDGLRWGNLGPIDFPCKPIPKTDRSATNLELFGIEGLLFFQRKMYWPTEVIGRCELEPKKRRCPIADRRFQRFRIWQELNNLRYVDPDSGKECQLSQPQRKLLFGKLWDVDKLDFSKIRKALGFLESVKFNFEKGEKSSLKGNATDKVAKGIWGKDWIHLEEDLKDEIIEALTNPNLDDREFVNLASGKWGFNSEQIAKLMKINLPAGYGSLSLKAIKKLLPHLEKGLTYSLQDETNSALHAAGYFRRDQLKKRIYDFLPSPQVERSAPIGDIPNPVVKRTLTEVRKLVNAVIREYGKPDEVHVEMARDLKIGAKKRKEITAENEKRAKKREEIADELREHGVLANRENILRYQLWEEQNRQCLYSGRTISVTQLLGDGAGVELDHILPRSRTLDDSQTNKVLCFRDSNQAKGNRTPFEWLASSNPTQFEEIVQRANILLRSGLMPYGKYKKLIQKEVNTDEFVSRQLVDTAYITKVTGEYLRCLFDSDHHVLGLKGALTAELRWQWGLETILEQLPDSPAWATKEEMRPGEKNRADHRHHAIDAVVIALTNRSRLQSLARAMTDRTNQREGELLDEPWKDFRDTIKERVSKVWVSHRVERKVSGALHEETQYGKTERPDWWVTRKSVETLKGNEIPNIRDPLIRDLVKSKLKEAGIDVGRKAEVDPKRLKEVLADLQMPSGVPIRKVRVLKTDKTIRPIRKSKSETFVKPGSTHHLSIFEWEEKGKRKRGAIFLTMLDAINRVKTGVPLIEYTPPNNHSDIPSHARFVMSLSTREMILVERDGRVSLLVFRSAKSTTQQMSFAEHSDARR

SEQ ID NO: 10276 - protein, 1442 aa, unidentified
  REGION 1..1442: note = Description of Unknown: Cas Enzyme sequence
MKKILGLDIGTNSIGWSLIENEIKSQTGKIIGIGSRIVPMEGREKDFEAGIAESKAAERRKARGARRLVQRYKIRRTRLIKVLIALGWFPENFPIEFKDLNKFNINDFVPYSDSTIEEANIHLGYENIKAGKRTLLNDWIIYYLRNKALTKEITLQELARIIYHFNQRRGFKSSRKENKDLEELSELKFPKREKTIEIVTVTSISETTEKSKYGKVFEVLYTTADGLTFTGTTIRKTIPDWVKSSLELEITQIISKDLSSRFELRIPDRTDWEKMKLGLEKDIKESGLHPGQYHFAHLLADRNYRIKDRIIDRSFYQAELKAIWEAQLTFHPELNEKSKLSTIASLLYKHNESKKNEIIEKGLFYIINNDIIYFQRGLKSQKHLIADCRYEFKKYKDQNGKQQAFKVVSKSHPCFQEFRIWQDIHNLKIIELEQKSNNGKKLFDIDVSNKFLTNEGKAKLFKLFDSKNNISQTAIFKELSNKENPLSEKTHRTNYPEHNEFKGNETKTIFRKVFKRHNYVEQGESLLQDKKQIDLLWHVIYSLNDEKHIANAVIKNFQFEDDLAKHFAKIPEFKSEYATFSQKAINKLLPLMRCGDEWNEKNIDTDTLARIEKLINAEYDVDINEITREEITKRNFKQIEDFSSLPLFLASYVVYGRHSERQNLEKYEEADEIKLIETGDLRNPIVEQISNETLQIVKDIWKQFGRPDEIHIELARDLKRKNEERQEITKQNGKNEADRKRIVAILKELSNTNPDSIGDIERLRLWEETGNSEAILTSIKFSKEPTKAEIEKYKLWGEQNHTSPYTGKIIPLSKLFTSDYQIEHIIPRSRFFDDSFGNKTICEAAVNSFKDNSTAMQLINEYGGSEIVHHGFKFRLLNTDEYIQHINSTFKGKKNRAFKSETIPEGFIERQLNDTRYIGRKLSELLFPVAVDAVIFTTGNITSDLKEKWGLHRVWKSLLQTRFERLEKLTGEKLIDFDNETNNIHFKKDYKRIDHSHHALDALIIAATSRSHIQYLNTLNAQNDNNYEKQKYSYLIKSKVRDFVLPWPSFTKDVREALEQIIVSHKNRIRLLTKGFNITTKFVQNEEGKWVKKAFQQTKGQLLSVRKSMFKEPLGKIWLIEYKKDIELKKAIKFQFDFTQKHNSDWKSEYPRIALSELRKKVDAIIKNCEFDEKATTKFLEQNPLLDSNGIQIKKLDISYFKMYSAKRRNINKDFKESTLESIPYSHHLPIAKAIKQHLKEYKNDSTEAFSGEGLEILGKKLGNPINKITTFEAVGNKMDFKGKLVEADKGSNLYFIIYENIESGARMINEKSSLPLLEAVERKANRMHLAEDKKGYISIILSPNDLVYVPDEEELERIKYKHPNPIDWDNKKRIGERIYKVVSFSKSQIFFIPHFIARPLDEKGQELGANNKSETSWTKQMIKKICVKVKIDRLGNIKPAQ

SEQ ID NO: 10277 - protein, 1047 aa, unidentified
  REGION 1..1047: note = Description of Unknown: Cas Enzyme sequence
VIRESNPPAGADPVVLGLDIGAKSIGWALIRGPESGKPSIVALGVRIFEAGVDGDIESGQDSSRAAARRMARQMRRQTFRRVQRKRKLFSLLQQAGLLPATADTLSVARDKAIKDVDTRLLATLGNSYGAAGSTARKLPYVLRAEALQRPLTPEELGRAIYHFGERRGFKANRRTDRQSEDTGVVYEGIAEVQRRKGDKTLGQYFANLDPTQDRIRGCYLGRADYEDEFNRIFDAQKAHHTVLTPKFRRRLRRCLFWQRPLKSQKALIGRCSLLTNRRRCPMAHPIAQEFRLLQAVNHLSIVNADGQSRLLTNDERLKLLAALRTEGDITFAQVRKLLGLKKKEFRFNLEEGGEKKLPGNRTYKAMTDAVGDEWAKLSPDQQALLVGIVRGSPDAASLRGQIGQAFPSLMPHCDALDKVSLEDKPAAHCKSVLVDLVERMKDGIPYATARADFEATHNLGTPTDPVDQLPPVRTFLPGITNPAVIRALTELRKVVNEIVRVYGKPDTVRIELARDLKKPRKIRQLMSERMREREGERSGAAQTLKSAGITNPSRADVEKILLADECGWACPYTGKSFGMADLVGSHAKVDVEHIFPRRYLDDSFANKTLCIASENRAVKKDRLPSEAYGGDETRYREILERVRAFRSDLRDEKLRRFLADSVEEGFASRQLIDTAFASREAAKYVGLLYGGIVDVRSDKRVRTSTGKLSALLRGAWKLNTILGTDSSPKGRDIDHRHHAVDAIVIALSSDAIIKSVSDAAGRYADRSSGRWHVDVPEQEGLLDQAACEVKKIVVSHRVDRRLAGRLHKDSFYSPPRQDEHGRLFHVIRTPLVDLKPADINGESIVDPRVRQLVQQQYAKLCAETGKKEPKLLFANPANLPKLPNRNGPEVPIKKVRLRFRERANRIGDELHRTRYVQQDKDGLHHTAIVAARQGDRESWTEHPTTRLEVQDRKRKQQPVVRIDWGADSEYVMHLCKGDSIELDTADGRRDIYVVRGVAASFIRVVPAWDASDESTADKRIRSPSSLKKREPKPVIVTPAGRVFPRGG

SEQ ID NO: 10278 - protein, 1183 aa, unidentified
  REGION 1..1183: note = Description of Unknown: Cas Enzyme sequence
MLEEIAATKEKQQPPPIRTPNFFYLMKTIWSFDLGIASIGEAVRSLSDCSFPHKVSYLLPEEFGETKTASSRRRMKRTRDAHKAREEWLNELWLDAGLEVLTGRQVMFQNGKWACAEASDKQKENRLLLQREFPKKGEAVCYNSALLRIKLLKGERLAPWQIYKALRSSIQRRGYGIVPWANREVGRKDLSIEEAEREQEKLDADLSKKDPTYRHTLEAWPKFKNEVPKDYHFPCYYDAFQMGLWHPSTPDTLGDRITCHAASTRNVRFDRIDVEREAETLARNAAAQLPELARMFDRVKSAGWTYRDNQPGKEKNFQVFAGDFGEFFVHGPAGAKTLAARNDFAAHLAFLKSRGIHPGAKEEWMGATAQKTPRFDNRIINDCALLDGLQVCNVTVRHDSKQNRPAADSILATEVTFLMKLKNILVHGIDGQRKLTAEEIRTVFSAISAKAASKDASLKDYSSSVIKCYSMTETAWDRDKQIKNLGLFPLPGHEVVRAPKTEGRSRFSRPALRLLRALILSGEKPSVFHKRLLDRDSALLDQIGMDILDEEPVRMAGGAKNFTKRPRPWVLTSQLKFLADLARSNDSWEGIFIPEQRLESLEARHSDDSGQVARDAAIRELIGSVKDPVVRHRLGVFAGRLASLEKEFGRPEEIVMEFVRTDFMGEKAKAQLAAFQRKREESRNTAVEQVGKTNAIKYELAAAQGCVCIYCGTGVGMTALDSFEVEHIVPRSQGGPDAMVNYAIACHSCNEQKGERTPFQWLQHGASWDAFEKRVNSRSTELRNKKVQLLLREDAPELVQRYTALAETAWISRLAQKIVWLHFGWRNGNDSEGKKRVTIISGGLTGRIRRKYRLNSLLNPCPAGEDPADWEAKADIPKNRKDDRHHALDAMLINFLPQWTRDSRKQHFFRFPDAIQANPQAFFRREIDSVTPCNIAFEKPALADTIYGARRDANELVIVQRVPLFALGMKSAGPSKVVFDAKYLSDQLKTVRDPKIAAAIQRYLDSQDPTEASWRHFCDTLHLPRKDGSMGPRVLKVNVTAGSPDEYLDMSKDKSGAYRRGKKGHRGQIVYRFRKKDKKGVEKEIIGVKPVYAFQSRHQAEKSLRQEFGEAVMVYGFFQSGCLVSVDAEVEHDKQKLPAGIYVLNTISAKGQVKVTNQQGKSFPDIPVYSLSKLIAAGFKRVR

SEQ ID NO: 10279 - protein, 973 aa, unidentified
  REGION 1..973: note = Description of Unknown: Cas Enzyme sequence
MFRIGFDVGSNSVGSAWIDIQNGTMAAGTSIFPAGVDETEDKRGEPKNAKRRMTRRTRITLARRSTRKRELRLRLIAEGLLPPDEATFRTLLEQTDPWELRARGIDDELEPFHFGRVLLHLAQHRGAIGLHIADPDEDDGDATKTEDGKVKKSIGEVRLKMLARGARTFGEFIAIVRKERVTTITTSDKRNLAQRRGLRQFRQATRNKSASYEHCADRAMIRHEFETLWTRQKAGLLAGKLTDVLRKAIDDESGDAIWRHKGFLFGQRRATWDVGTLGRCSLEPTERCVPRADMYASRFLVVETVNNLRIIEGGKEKRNLTSDERTKIRTYLSGPLGTVPRRGSQDSAETRPKTTVSVTDLRNLMGWGRATRATKFRFNIEADSERLINTNWFSREIICGAITSEKWAAMNERVRSGINQAILKFDPDNDTHSGRLKSGVMKWGNLTEPQADALVAAWRRRPQLDAKRLNISRKAVRNLLSLMDSEEKTCLSITEIEARKAIAADDNFLDATTGCPMDEATRRRYATGAKGASARDRHYMLKHVLTINGEPILGPDGRPLAEPPPAPMISNPVVRKAIHEVRRHLVAYMKAFSRKPDEVYIELSRESRMGKKAADNILENSRLRGRIRSEIADTFGLDALTKTQRGSSVTRVILAVQQGGICPLCGNTNGRPVITPRMAANGEDCEVAHIIPRASGGHNGLGNVVLSHTSCNREMGRRTPREFWNATAGGGYNACIARVETIFGHVARPKGSERRSASGNSLWLCFFNERDDNLKIDQFKKDVSDVQGMTNRQDAATKYASKQVMAYIADALYAGEGLPERGGTRRVFATNGIWTSRLRREWGLFFDRHGKRSKGIGEGEAQIRREKDRGDHRHHAIDAIVIGYCTSMVEQAWEAREREAGVNLQNSADETQMENYRREHPIPPPSPFRTLLAFREAVCHAVFGSGDLERAICHRPVKRKLVGAFHAETLYGP

SEQ ID NO: 10280 - protein, 1079 aa, unidentified
  REGION 1..1079: note = Description of Unknown: Cas Enzyme sequence
TNRIPHGLLPDRAVIHQVVRKPPCRGFPTDFPYYVNGKLALTVNGEIARRKSTILIFGIDGGIASIGWAVLDLDENAPFISAGVRMFDAPETAKERTPTAAVRRLHRGQRRVIRRRRQRMTELRHLFHSSGLLVEGGKDALAQKRGEQHPDPWTLRADALQRALTGPELARALGHIARHRGFRSNAKRDAAANSTDETSKMKKGIAATQERLAQYRTIGELFALHPDYKDRKHNRGLNFDRSILRSDQEHETRVLFAEQRRLGNSFATKPLEESFARIAFTQRPLQDSEHMLAACTFEHDQKRTARRSYAFEKFRLLSRLAAIRLTERGNDWPLTAEQIGKAAEDFGVQKKLTWRWLRKTLDVHPGVRFAGVSEKDEVHDFVARTGSAAEGTYTLRQALGVDGWRRLMETPERRDRIAEILTFREDPGSVRRGLEEAGVFGDILDTLMVGVEAGTFSAFTKAGHISAKAARALLPPLERGLIYSDACKDIGYDHAAQTEVNLDDVRNPVARKAAGEMVKQVRALIAKFGLPEYIHVELARDIGKSADERDEIKRGIDKRNAQRDRLRTELAGILGREPRLPDLVRYELWKEQNQECLYTGEKINPAWIAADDNRVQVDHILPWSRFGDDSFVNKTLCMASANQAKKGRTPFEWFSAEGLDWAAFSARVEDCKEMKGRKKGSFYLRKNAAEVEETFRNRNLGDTRYATRLLMGLLGRLYPKDDKVHVRARPGQLTAKLRRAWGLDDLKKGPDGKRVDDDRHHALDAIVVAATTQSMLQNLTLAAQEAERKGLPRGFDFDFVKPPVEGFTEIVRGVIKDVFVSRPERRRARGEAHAATIKQVRKIDGADVVFERKAVDKLTIADLENIPTPEPYGKIVDPGKLREEMLAELRRWIEAKKPKDAPPKSSKGDVIRKVRLRTTDKVAVAVRDGTADRGEMARVDVFGKTNKRGKREFYLVPIYPHQVANMKKWPHPPNKAVVGAKAEENWVTINDSFDFLFSLYIHSLIAVTKTDGEIVSGYFKGLDRSTGAIHIALHHSQQQVRRGIGAKTLLGFRKLVVDRLGRQSEVINETRTWHGEACT

SEQ ID NO: 10281 - protein, 1059 aa, unidentified
  REGION 1..1059: note = Description of Unknown: Cas Enzyme sequence
MIPPQVAAKRWKEDPFYTEAVVLGIDIGIEGIGVAVRKGPEVIFRRTFMVSLPESAALEGRRLMRSARRCRTQRKRRDFLLRMFCEKHLAGAWSPITKRVLEQRLRGLEGKLASPHALIQCLRHIIAHRGYSYHLKSEGAFLWGDKPEFKEAEKWLKAAYCDGEVARLLQQQAEDLEWSDEQTEDFAALCEEAVRNSEGRSIEATLHRHLAKTTDNKRERYRGNAWPREHVQRHLEKICRNHPQFFGGQERLEKLLPRLLAILNHERKNAEERAAHARGKAGKCDFAPVLLGKADITRGFQGDEAIRVLNLFDFLSTRRVATSDGLLHYPTPAWIYQQVEFAKADSAAVAQNQPRLRTTPTELKKTLLEALNQALGLTGKQLLKCEKGSSLNKDYFDQLKDLLCLRRTNFDKRASISSEAAGFITSSLLTSPVERVSAINDALSEYRQLRRDRLRSIITSPQVEFLLGGEGRPEGRIQRIFASDEVTKALGKKIKPDFVVIEVVGGAARNTLEAFEIRKAQLEGRKHREELIKKYEINEADAKGETMLRVSLFEQQRGICPYSGKPLGSPTASSLEIDHIFPREMGGTSEKRNLVLAFRECNAAKGKRLPYEAAKAGDLPLDWKEILKFCSTMKWGVVNKDGALNKRTIFESLQDSSKCPDWGNLTRQSQIARELRDSAAQWMGIKGDATKMAQCIGTPTGLHTAVCRRAWKQSIPRKNRADLTHHLWDAITVSFIPPAKGLNTIEYGGIFHHVTEKSAAVTEMTTLPVCPDLSSLDSDTDECLVERLRQSSSKKQRFDKSIYGRKADGSLRIRKPIKKGEGIASDEHSLWKALKASGITDEKIPPPKALRSWLDSDATGPLRLKDGTPVGSLPIKAGKSGTVMTQVAHRNHEGSQLGVRIANEANWRLEVWKTQEGTAVKYHTRVIPHPRALKIFKAANGVAAWKKKDQTTGKTWRQQVTGSLPPYAKKVGHFEKGMKFLVALMKDGAVAGHGEIPYKSIWFTITGIRSDGRVLMRMSGFKSIKENKGTSWPLQDIPASAFECSVANAHKLAHLLGAA

SEQ ID NO: 10282 - protein, 1087 aa, unidentified
  REGION 1..1087: note = Description of Unknown: Cas Enzyme sequence
MNASTNPRRLEIAFDVGHSSIGWAVLSAPESAQPAILGCGSVIFEKDSALANTRRLHRSQRRHVRATRQRIARMEKLLAHRGIFTSAELAGCHRAGGGNATPWLLAARVLASDGAKTLTWPELWDVLRWYAHNRGYEEITGETRDEAEESDEKKKDTEKVQNAKDALAQFGKNSMAETICAWLGQDPLGPRTATTESYKAKNCAFERALVDAEVTRLLASHLGKLPGMDEALVAALILDARAIAVPSIRLPLRYQGSLLFGRLATRYHNRIIGACPISGEKIPNKNCPEFLRYRWAMQLANLRIAESADTPLHPLSAAERATLHAAMVRDGALTPGELKKLVAALPGHARDNLEQFFLHPDAKEGLVLDPVRKLICNDDRLIAVWSHLPERLKKRATGRWRRGKSTTLAKLRDEAIKLGQDCAAFDAAIESLCTPPTEKKKRKNPPPTRAELLTAPLDARRELAKISGRAPYARPLLAQAFDEVMSGRDPKATGGSLEETDEVRRRRETRPLPQQTNNHLVRHRLQILARLLADIIADPAYGAGDPASISRVTLEVNRDLREMAGLTAQDIAKELGQRLAGHKNVSARLEEELPPGTAISAGLIRKARIADDLGWRCPYTGLEFEPKDLIDRRVDKDHIIPRSQRATDSLDALAVTFSSINKWKGQRTAWQFVTDEGGKPVPDAPNFCIMPLARYKEFVDRLDTKGHPDDWQRKRRRKEWLLLPRYEEKARTFTQGQLTQTSQLARLATQVVREPFGNLPNPPQLIALPGSVTGAVRKAWNVLACLEKAAPAVMEVVTQPDGTTKPEVKTKTEIRDITHLHHALDATVLALAAHFIPNRGDVWRLLAERRLNSAQQAELAALGLFDFDERGQFRLRDLGPGLKAQLREKLAERRVVQHVPADMSGLRVEENTRGIVKRENGRVFLRQRKKNADGKVVVNLTNESEGKVIGLPRADGTGGKLHALHGVRVIDSNYGVAILDDATLPPAERFVIIPHERVWKRITELTTRNGGKKPVIWRNGQIIALQKGPRPSLWRIFSTKNNSSGLALDLSAPDAIRGEWINVLLKSLLRDGATISRETLTGLRKEQ

SEQ ID NO: 10283 - protein, 1076 aa, unidentified
  REGION 1..1076: note = Description of Unknown: Cas Enzyme sequence
MINSMSSQAISSHKEGDLTLGLDIGHRSIGWAVLKNKTKDGIPDLLGCGTVIFRGGDCLNSQRSALRRSRRNIRSTRQRIRRMEKALAHSGVLPQAQFERLHAQGKGDPAPWWLMARWLTGLIPALSQGEFWQVLRWYAHHRGYDANRGWSKEDDEEDSKRTNETSKQMSESGINSVAEFLCFKSGCKPSDPKPRFGKSFRGQEASLLFARSIVETEVRKMVNGHIGKIKGLDANLSQTLIGAENDSWARTEWFLGKRLPKRYRGSLLFGQLIPRFDNRIISACPFEAEPKNNGVGRKVPSKASWEFLNFRWAMTTANIRLHIAGMERALTTEEIKRFFQACWDEGDLKPATGKDSKIQKNSDKLRALLTKASIETRNGDNLDQLVVLPESLKSFRLVPIESGLKAFRAVWSSANEIQKRWLRGKLLRGAKFTPSQIFARPQLMFQGWKKVSEDQDLFSGKNECLLEEVFRGDVPQGRATYSRPILIKAFDEVLNGKDPREKGGCLYRQGETPLESAVPLDRRTNNHLVRHRIRITEKLRKDIVKEYAGGTANAFGRVIIEINRDLPSLSGKNAKEIASAEFGKLKDFTQVKDHLESVLKGHNVPLTAGLLRKARIASDLEWTCPFTEQKYSAMELVRGVYDKDHIVPRSSRVSDSLSSLVVTRREVNKFKGNRTGLQFVREEGGKPVPGTSLSIVSEERYRSFVESLQPATRISDDVRRCDIRKRLMLTAHSPNVDEVGFLPRDLVQTSYLAKLALQEVRKGFAIDGAKVDVRPLPGLVTATARKAWKLLGCLVPACPEVKDAAASNDKQAIRKLTHLHHALDAIVLGLAGTILPQEGNILAALASRNQDEGSRRLLKSKMGELIIIAENHAQLADLPKSLKDSISQKLAEGRVAKHIPATWSGTKCGPTMWGVVEKKEGRVTIRQRNKGMSSTSKTDNKGEWKFKDVPQDSIIESPSMPGVLWIEENYGVLLNDPPELLPWNRAYRRLQKEKSSRLLRKGNLISASGSFAGVWRVVGLTLNTKLGILLDLRKPTSVGSTSKQPHISRDNVSLRSLIKSGIQILPSKLTGCPITL

SEQ ID NO: 10284 - protein, 1079 aa, unidentified
  REGION 1..1079: note = Description of Unknown: Cas Enzyme sequence
MKTVSANSPSSFVWSFDIGLGSIGEAIRNLKTQEFIHVASLLLPAEFASTKTAATTRRMFRTRLAHKSREEWLDGVWREAGQEPLAKRTTWRNPKTGKFELKHSGDARLEREFPAKGDDTCYTSCLLRIKLLRSEKLEPWQIYKALHSAIQRRGYDPDIPWKAKIASKASTEELKEKEEDEAKLLKFEQELRVMIRDGAYQLPCYFDAWKMGLWNPEEPDKISLRIDCHAESPRNHVIPRGLVEKEFKLLVAAAAKALPNLKGKEDYLLYGPAGRAYASWYPDSRKKHGLRLGSHTDTKGVLSQRIPRFDNRIISKCALIPRLNVCKITADTATSPTPQSQIVFDAVFLLKLKNMRVAQTSGAQRGLTADEIKTIFENPKRKTWSFTPKQWARAVALFGLLPVAGHEEIKPPRTAGRSRFSRPSLEILKRLILSGESPKTFHAAELARLSGNKDPLKGLVAEDLEFLKKMGDSWDRIHVPDQQLDAILQMSESPELAVRQIIGKQNNPVVRHRLQLFFDRLQNLKSQFGEPQTVALEFVRWDFMGEKARKEYSKFVSEQTKLREQARKEAAEAGLNGKGAALKLTLFKEQGGVCLYTGEPLDISKIDAYEIDHIVPHSRMGPDAPYNRVLTTRHTNNDLKKDKTPFEWLSASPGWEAYLERVKARASQLRNRKVRLLTSQDAEELVDKYTSLAETAWISRLARAVLDATFGWRNGVDKDGKKRVVFVQGGLTARIRRKYRLNSLLAPPPAGVDPREWESKAEKNRTDKRHHALDAMVINFVPQWARDEAKESFFKFPRALGTDPRMFFAGVIDETSPLEVAFEKSVLADGIFGGRSKGPERFAVQRSPLLDLGYSTQNQKRRFDTRYLCKQVRSICDKGIREHVAAHVTIHTSEAEWNSFCANYRLKRRSGGVGPRVVRVAMKIGSLEHYADLSKDRSGSFRQGKKRHKGQLIYRNATLDSVEVMPIYAHASLRSERIRLQNEPGNQVLAFVQSGCRIQTHAPISSANYKLVTISADRREKRITPTLCLAADIYTWRTIDSRTKSVEIESRRGQRLALPLRHLVNAGFSRASAISGANT

SEQ ID NO: 10285 - protein, 1045 aa, unidentified
  REGION 1..1045: note = Description of Unknown: Cas Enzyme sequence
MPYRLGLDIGTNSIGWCLLNLDERNRPYGISDMGVRIFTDGRDAKTGTSLAADRRGARGMRRRRDRFLLRRKDLMNALVEHGLMPTLPSERKALEGLDPYEIRARALEEPVTLNELGRALFHLHQRRGFRSNRKTEGGDDEGKIKNAVSQLRQTMEESGARTLGEYLYRRHVKRAPTRARLNGSGVDAAYELYPDRNMVEAEFDILWTTQAVHHPELNDQIRDDLRGIMFRQRPLREVEPGRCTFKPDELRAARALPLAQQFRIYQELANLRIILPDLRERRITIKERNILANTLFARNDLTFHRAQALLDLPEAARLNLASEKRDGLKGDETAKVLAHKDRFGKDWRGMSFADQTEVVERLLNEQNEQMLVGWLIERWGLDKDAANAVSSARLPQGYSRLGATALNNIVAALRDGGAEAVDPETGEVVDIPLAYSQAVELAGYHHSDFRPEELHHRLPYYGSVLQRYVSGTGGPNDPREVRHGRIANPTVHIGLNQLRRVVNAIAAEHGPPTQIVVELARELKLNQTEKQRIHREQAENQKRNESRREELARLGQIDSGENRLRLRLWEELPVHDRRCVYSGQPLSLERLFGPSVEIDHILPFSQSLDDSAANKILCVQSANRAKGNRTPFVAFGNSPAISGFDFDWSGILSRADALPPNKAWRFAPDAMEKWESTRDFLDRQLTDTAYLARVARFYLENICKDVSVTPGRLTAMLRGKWGLNSLLSDHNLKNRVDHRHHAVDAFVIGLTDRAMLQRIAGAADDTRARLIEKMPEPWQGFRDEVAEHLKRIVVSHRADHGVQGRLHEDTAYGFVSDPQAEDGYNLVYRKPFADLNENELARIRDRDLRASAQQQIAQAKAEKGGELTTAELKQALEDLNTQREANGLPPVRRVRLLKKEEQVVAITDGGGQAYKAYAAGANHHIDIYELSDGSWVGEAVTVFAANRSKFVSTMKIEYPDAQFIMRVHKGDLIHLGNGSEDSFFRVVRLSAKANTLYLADHKEGGELQKRHADPDDYFRWFFASYSRLKKEGARCVRVDELGRIY

SEQ ID NO: 10286 - protein, 1061 aa, unidentified
  REGION 1..1061: note = Description of Unknown: Cas Enzyme sequence
MSKMRYRLALDLGTTSIGWAMLRLSNDQEASPHPVAIIKCGVRIFGDGRDPKGGSSLAVDRRLARGMRRNRDRKLKRKQRLMETLVDSGLMPMDRVERRALTQLDPYALRARGLEEELTPFEFGRAIFHLNQRRGFKSNRKTDSPEAEGSLLKGTIAKLREKLEADGYETVGQWLAERHANRQSVRARLRGSTVKDKAYDLYMDRSMIDHEFEKLWRAQHGFNPAFYSTEKYEAITDTIFFQRDLLPVRAGRCTLEPELERAPKALPSSQLFRMYQEVNNLSIEVSPFTYRSLTLSERDVIADRLNTKKANSFDALRKALKLEGGPRFNLESEKRKDLKGNVTAIELSKPDCFGDQWKVLTLEVQDQIVTQILEETDEEKLIAWLTENHNVSDDNAKNISESRNALTKMSSGYANLSNTAIHKIMPHLISDVRKYSDAVVAAGYKSHSGLTHMEQTGEILSELPYYGEYLQRHVGHGTGIKTDLPAIRFGRIANPTVHIALNELAKVVNALISQYGAPEHITVELARDLKKTQEQKKEETKEQSLRQKENEFYSQQIYEATGITASRKDLQKMRLWVELNKHDPTGRRCIYTGEMISINRLFSPEVEVEHILPFSRTLDDSLNNKTVSMVRANRDKGNKTPYEAFGSSPEGYDYAAIVERARNSSSHRAKRFAPDGYEKWLREDADFLARALSDTAYLSRIAREYLQLITPEPVTVVPGRMTASLRRHWGLNNLLSEDGEKNRMDHRHHAVDAIVVGLMDRGSLAKYAKAQGRGKDIREQLERTPHEEPLKDLRMKAQRAVNAIKVSHRPNHSHERQMNNDTNYGFRPNGFVSQRKALDNFDSAKAIKNAHFADKYLQEKILRFVGDSESTEFTALIADYSNNHGTRKARIWEKLNAIPIPLNKNARHRAPKGIKTREDNSPRGVKGDSNYCIEISINEKNKWVGEVVTTYEAYRIVREQGNARLRDSHSTQSEKPLVIRLMRDDVLEVDIEGTEDRKLMRVCQFSSNGRLNLAEITEANVDARVRTKEIKYLSATAGTLQSRNAKKVTISPDGRVSKRNL

SEQ ID NO: 10287 - protein, 1047 aa, unidentified
  REGION 1..1047: note = Description of Unknown: Cas Enzyme sequence
MTSEQTGVLYEETILGLDLGTSSVGWCLLAAPEGRPSAIIATGVRVFEAGMEGDIASGRGESRGVARRQARQARRQGDRRARRKRHVFNILQRAGLLPPGKARDVLPELDRHLQQCYFPGLPDPQRHTLAHTLPYWLRTQALGRRLDPHEIGRAIYHLAQRRGFLSNRRASGDDKEEGAVKAGISELRQAMVDAGARTLGEYFASLDPYKRRIRKRWTARDMYVDEFGAIWSAQAEHHPAVLTDELRATVHRAVFRQRPLKSAKGLVGPCALDRGARRAAAALPAAQRFRLLQQVNNCKVITDHGEVRLFTGEERRALIDALDVEGDRTFAKAKRLLGLKRTCHFTLEEGGETRFIGNRTGAKLRGILGEHWDGLSDDDRTRIIHDVRSFQNVDALTNRARRCWGLDETTARTLAQAELEPGYSNLSRKAIDKLLPLMEKGVAYSTAVKEVYGEFAARTELRHNLRAVSHFPEIRNPVVMKTLTELRKVVNAVIRKYGKPGRIRVELARDIRQSRKQRQRATARNRTNERARKAAADKVIAETTIQNPRRDDILKVILANECGWKCPYTGRGISMGSLFGPEPKFDIEHIVPFSRSLDDSFLNKTLCYHEENRSVKRNRTPFEAYADHAERWDEIIGAVKRFTGEAANEKLRRFQLCEIEAIEDFASNQLNDTRYASKLAMQYLGSLYGGLWDASGTRRIEASRGGTTAYMREVYGLNGILNDGGLKTRDDHRHHAVDALAVALTSPGAIKMLSDAAVRADQRRDTHGRFKTPSEPWAPFITDVRTAIGEIVVSHRPSRKINGPLHKETLYGSQSDGNGKTVFVVRKPLEALSPRDVSSDAIVDDVVRQLVRAKLDELGLPPQRAFADPANHPVITGQTRDVPIHRVRVRCAVNPLTVGKGHRRRHVTTEKNHHLEVVAMLDEQRNETKWTGLLVSKYDAMRRLAKRQPVIKTDHGPDMLFKFSITPGDTLRLKTPGKEPELVHVRSVSQEKGGATRIEFVGVRDARIGSEIKKDHAWFKPASGTLRNLGAEKVSVSPLGEVFIANG

SEQ ID NO: 10288 - protein, 1065 aa, unidentified
  REGION 1..1065: note = Description of Unknown: Cas Enzyme sequence
MRLGLDIGTNSIGWWLYATENGAISGVIDGGSRIFSDGRDPKSKASLAVDRRVARAQRRRRDRYLRRKAALMKRMAEVGLMPSDPAAAKELEQLDPYALRAEGLDRALPLAYLGRALFHLNQRRGFKSNRKTDRGDNESGKIKDATARLDQAMMAKGARTYGEFLHMRRVAAPDPKNVPGVRTRLSIAARDNSDKAESGYDFYPDRRHLSEEFEKLWSAQAAHHPNTLTNDLRDEIRVIIFHQRPLKTPAVGMCLFTDEKRIPSAHPLNQRRILLETVNALRIAERGAPARGLTHEERDQIVHALDNKNHTKSLAGMALKLKALGKVIGLRSEQSFTLETANRDAIACDPVRASLSHPDRFGPRWSALDSDAQWDVVQRIRAVQSDAEHLELVQWLETTHGLDQVHAESAASKPLPEGYGRLGLTATKRILAALKADVIPYSAAVAACGWHHSDGRTGEVLDELPYYGQILDRHVIPGSYDENDDDVTRFGRISNPTVHIGLNQLRRLVNRIITVYGKPDQIVVELARDLKLSEDKKREVQRKIKENTVAAIKRGEKLEEIGVPNNGANRMRLRLWESLGEDVMTRNCPYSGQRISIGMVFDGSCDVDHILPYSRTLDDGFANRTLCLKEFNRQKTNRTPWEAWGDTGQWDTIAANLKNLPGNKAWRFAPDAMERFEGENDFSERALKDTQYLSRIARAYLDTLYDGGDHKRHVYAVPGRMTEMLRRHWGLNSLLPDKDGAVKAKNRTDHRHHAIDAAVVAATDHSLINRISKAAGRDELIGNAAEDVARTTKEPWDGFRADIRAQLAEITVSHRADHGRIDREGRKSGRDSTTGQLHNDTAYGIIDDQTVVSRAPLLSLKPGDIELTTMGKNLRDSYLQRKLALVCKGKDGKDLEEALRKFAANEGPYQGIRHVRLMESLQASARVEIADASGKPVKAYKGDSNYCYEIWRLPDGKPKAQVITTYEAHGETLRRPHPAAKRLLRVFKRDMVAIEREGERIICYVQAMHVANGLYLAPHTEANADARNRDKSDSFRFFQMSAGSLLKAKIRRVFVDEMGRLQDPG

SEQ ID NO: 10289 - protein, 912 aa, unidentified
  REGION 1..912: note = Description of Unknown: Cas Enzyme sequence
MAKILGLDLGTNSIGWAIVDKDGNDFSLVDKGVRIFSEGVKSEKGIESSRAAERTAFRSARKIKFRRKLRKYETLKVLAEKNMCPLSVEEVIEWRKSGFKKYPLKPEFLKWLRTDDDQNINPYIFRDRASKQKVSLFEVGRSLYHIAQRRGFLSNRLDQSAEGVVEQHKPAFLDILENVSTITELQMELTDYFQDRDLIERKATDLDEGEKKLKTLYNSFDKAIKDNSKDFEKTKSILIERINKKEDLGAVKQKIGEISQAMKDGNFKTLGQYFFSLYNKGKIRNQYTAREEHYRSEFEVICLAQGIDGIIANEKLPEKRYFGLAKELYKAIFFQRPLKSQKGLIGKCTFEKSKSRCAVSHPDFEEYRMWCYINTIKIKTPDDESLRFLSNEERLKIIPKFLRKKDNFNFDDLAKELVPSGSKYAFYKSSIAASVNYLFNYNMNSSVSGCVVSTSFKNALGEDWKTKIYTYETLNKNGESVTRNVDYNDLWHLISVSTSDLYLQEFAKDKLKLEDKKAILFSKIKLKKDFASLSLTAINKINPFLRAGLLYSHSVFMANIENIVDADIWKNLDDRRYIQTKIAELIATNTFDNNVLEIVNGLIKECKVGGFYYSKEAEATYKLDLDKKVRSFVKLNQIEDQKESILNQLFPVYIEQLKKYEFVTIKRLDEKVFDFLDGQNDDGQVFCKAKNKLKKLYHPSDIDVFRKQILKDGNGNEKLVLGSPLISSIKNPMAMRALHQLRKVLNALIVEGQVDEKTRIHIEMARELNDANKRKGIQDFQRDIEKSRKEYIEEIKKDYKAESGIDIEPTEDDILRYQLWIEQDRKTIYEEHYTNISICQIIGSDPDFDIEHTIPRSRSQDNSQMNKTLCSKRYNREIKKNKMPIELSNHSDILARVSPWQKKYLALEYDIN

SEQ ID NO: 10290 - protein, 1112 aa, unidentified
  REGION 1..1112: note = Description of Unknown: Cas Enzyme sequence
MRKILGLDLGTTSIGWSFINEAENDNETSSIINTGVRITQFDNFCKVDKVSGKITESKNPESDFNSGNGLSPNAGRTKKRGARRGLQRFKQRRDALLESFSKIKLIPASFTYAETGKETTFSSYKLRAKSATEAIGKDELVQVLLMLNKKRGYKSSRKAKTAEEGDAIDGMKIAKEIFENNLTPGQWIYNSLSKGGKFIPDFYRSDLQKELENIIRFQEQFHLDSINNSLLNDIQGKSRTQTSQYFTKILKIELVENKGTREETKLQHYKWRTDALTINLDLNIIAFIITEINNQINQSSGYLGAISDRSKELYFNQETVGQFQYKQLQSNAHAKLKNQVFYRQDYLDEFEKIWETQAKYHTELNDALKSEIRDITIFYQRKLKSQKHLISNCEFENGHKAIPKSSPLFQEFRIWQSLNNIIVKNEITKEPSLLSEELKEQIAAELQFKDGFTDVQLMTFCELKKGSHSVNLKKIEGNRTNAALYKAFEKILELEGYDMDFSKMNSQEIKDAISNIFETLNINIDILDFDPTLQGNDFDKQPYYQLWHLLYSAEDDGFLKKNLMGKFGFKENHIPFLLNINLQADYGSLSAKAIKKILPHLMDGHIYDKACTLVGYNHSSSLTTEQNNERVLKDTLELLKKNSLRNPVVEKILNQMINVINAIIADPSMGKPDEIRVELARELKNNNEQRSEMTKAINKSTAEHEQIRKLLHTEFGIHRVTRNDIIRYKLWKESDGISLYTGKPIEPSRLFSKEYDIEHIIPKSRLFDDSFSNKTICERQLNIDKSNKTAYSFLKEKLSAEEFDQFEKRVKSLFGKISRTKQNKLLMADNEIPEGFIDRQLRETQYIAKKAKEILLEVSRNVTATIGSVTDKLREDWELVEVMKELNWDKFHKLGLTKEEEGKNGERLYKIQNWTKRNDHRHHAMDAITVAFTKPAYIQYLNNLNARDINSKKANVILGIESKYLKRDKNNKLRFIAPMPNFREEAKKQLQSILISYKAKNKVVTNNKNITKSKGGSKQRIQLTPRGQLHKETIYGKLQQYATKEEKVGMNFTADRINNVAQKRYREALLRRLAQNDNDPKKAFTGKNVLSKTPIYISLKDNIVVPEKVKIV

SEQ ID NO: 10291 - protein, 1448 aa, unidentified
  REGION 1..1448: note = Description of Unknown: Cas Enzyme sequence
MAKILGLDLGTNSIGWAIVDKEGNDFSLMDKGVRIFSEGVNIEAKTNSESSKAAKRTEFRSARKLKYRRKLRKIQLLKVLSDNNLCPKLSDEELFDWRYKKIYPQNDEFRIWLSTDNQDNEDDRKKQNKNPYSFRFKAANENLNLNYKEDRYILGRAFYHIAQRRGFLSNRLDSSDNSIIEDKKDDIISIINDATSIVEFSDSFLEFLSAFDKDEVSNKPLFTLSRAFNAIVKENAVIGYSDLKEKLLERLNKPEFLGPVKRAISDLTEKIREEKCNTLGEYFFTLYQKGEKIRGEYTHRIDHYLNEFNFICNKQTISTEVKDAIEKAIFFQRPLKSQKGLVAKCPLENRKACVPISHPDFEEFRMLSYLNNVKIKLPSDEKLRLLNDIEREQIQSLFFRKSKPNFDFSDIVKKLTPKNLKFGYYRDRNASEYDVLFNYNLGSNVAGCPTIANLVDVFDANWKEYLLSNFVKNTKTDNDIKIQKSVDDIIDDVWHVLFRFNNEELLKQFAIQNFNCDEKTAIKFSKIKLKQDYGSLSLKAIRNILPYLRQNLIYSHAVFLANMKNILPKEIWNDEENKNVIDNEINSIIESYKLYSNNIDIVNGLIKNVKKENGTWSSTNNFVAEAYKNGLYKQVKDFFGTKKWNDTTEKYQSKILSECFELFSNQMQLNSGRGEFAKKHTIDEILKTFLSDNFNVTEESLKKLYHPSAIEVYKKAKRSDEDGKKYLGSPLISSIKNPMAMRSLHQLKKVINQLIKDDMIDEETLIHIEMPRELNSSNERVAIRQWNEELKNRKNKYADEIKSIFRGDLKNEGCNDANSNYSDYELTDTDILKYQLWVEQNKVCLYTGKTICISDFIGNNPKFDIEHTIPRSRSLDNSQLNKTLCCATYNRQTKKDKIPFECSNHEEILPRIKHWYAKYKSLEQQLKDLSKKVKAASTKEKRDKYIIDRTKMRFEYAYYLKKYKSFNIEEIPEGFKNSQSVDIGIISKYGNLFLKTVFNRVYPIKGKTTANLRQMWGLNEKSRDNHAHHAKDAVVVACCTRDINDALANYYHDLEQFEFFGKSKPSFSHRIPWVGFHKDVDDFDTNTLISHHTPDNLPVQSKKAIRKRGIIQRNENGEIKYKQGDTVRGALHKESFYGAIKREEPNKKTGEVEEVIKYVKRQAIELFKDTDLKNIVDDKIKEIVTNGREQEKQLKKEIEELKKQLKNLSEEEEQPIKDAILIIENKIRRELYVLPNKSGNPVPINKIRYYTSDVTNPLFIKKHRDVSRHEHKQFYHAKNDGNYCMAIYEGLDKKGKLSRSNQLINIIDAGKYFKLSNDDKKVYPIAPEKDENLNQLKYVLTKGKMVLIYDKSPKELFEMSEEKLLERLFEITQLDVEDSCIKLLHHSEAREKRKLTPLMGLKTGMKGGKNIGEHKKYPWIKIGVNSFDCLVEGYEFRLTSTGKIKFVQ

SEQ ID NO: 10292 - protein, 1460 aa, unidentified
  REGION 1..1460: note = Description of Unknown: Cas Enzyme sequence
MVKILGLDLGTNSIGWAIVDKDGNDFSLVDKGVRIFSEGVKSEKGIESSRAAERTGFRSARKIKFRRKLRKYETLKVLSTNGMCPLSIEDVEEWKKSGFKEYPLKPEFLKWLRTDDNENVNPYSFRDKASKQKVSLFELGRALYHITQRRGFLSNRLDQSAEGIFEEHCPQIQSVIEDLNTTDEVLIELKDYFLNRGILDESIKGGFKKDLDEGEKKLKTLYNSLFAITKKNENDIAKCKDELFARLTKKEDLGKVKGKISEISQAMIDGSFKTLGQYFNSLYNKGKIRNQYTAREEHYLAEFEIICKIQGIEGIIYNEQLPEKRYRGLAKELYRAIFFQRPLKSQKGLIGKCSFEKSNSRSAISHPDFEEYRMWAYMNTIKIATQSEKTLRFLSQEEKLSLIPKFLRKKDNFNFEDLAKELIEKGASFGFYKSSKRDSFHYWFNYKPTDTVAGCAVSASLKNVIGEDWRIKKFTYPTLNSKGIEANRTVDYKDLWHLLSVSTSDIYLYEYAKVKLKLEEKNAKSFSKIRLKKDFASLSLNAINKILPYVKEGLLYSHAVFMANIEGIVDEAIWNDLAQRKHIQDKIAEIIANNTFDNGLLEVLNGLIKECKVDGAYYSKEAEPTYRNDLTKKLVSFFKYHNITDVLEQEVILNELFPVFIEQLEAYEFIKVKRLDEKVLEFLKGENEDGEVFCSNPKQLNKLYHPSDIDVFKKQKARDEDGKETGQLILGSPLTSSIKNPMAMRALHQLRKVLNALIVEGQIDESTRIHIEMARELNDANKRKGIQDYQNENKKEREIYKEEIKKLYLAESGKEIAPTVDDLLRYQLWIEQDRKEIYENGNSISICDIIGDTPKYDIEHTVPRSISQDNSQMNKTLCSQKFNRDIKKQKMPIELVNHLEILPRIAHWKKEAENYTREIEMIIRSTKTAATKEAKDKKIRRRHYLTLKRDYLQGKYDRFIWTEPRVGFKNSQIPDTGIITRYAQAYLKSYFKKVESVKGGMVAEFRKIWGIQESYQKDGKKYFVEKDRSKHTHHTIDAITIACMTKDKYDVLAHAWTLEDKEHLTDARKLLADSKPWKTFKEDLIKIEEEILVSHYTPDNLKKQSKKIVRIRGKKQYVAEIERDANGKAVPKIDSNGKIIYKLGKDGKKLPRLRQGDTLRGSLHQDSIYGAIKNPLNAEEIRYVIRKDLESLKASDIENIVDEIVKEKVKQALANKILVLSSNAQQKNKIAEGEKIWMNEEKGIAINKVRLYANSVKNPLVIKEHNLLSKSRHEHKQKVYGQNDGNYCMAIYEFEGKREFELINNFNVAKLIKEKQGFYSLYKYKENQGIKTHIPIAKRNGRDLVLKRGKQVVFYDKDVENPEDVSDLTDFSGRIYIIEGLSIQRIVRPSGKVDEYGVIMFRNFKEARKSDEIKKDKFKPDGVFKLGEIKPTRKMNHNQFNAFVEDIDFKVLPTGKFIKI

SEQ ID NO: 10293 - protein, 1403 aa, unidentified
  REGION 1..1403: note = Description of Unknown: Cas Enzyme sequence
MEKILGIDLGTNSIGLTLRENNEFTWYGVYTFRKGVGEGKSGEFSYAAERTKHRSSRRLCNARRYRKWGTLKVLIENGFCPLDIEKLDKWKHYEKGIGRVFPIDDKGFQRWIKLDLNGNDSPDFSSPYQLRRLLIEKKLDLAIPENKHIVGRALYHIAQRRGFKSSRKQGANEKTSVYKGSNETKTIGRDKYEELIIKHGSLGAAFAYLEDEGIRVRNRYTLRSDYRDEVNKILEFQEIQNKAFKDKLLLESKNGSIFYQRPLRSQKGLIGKCTLEPNKPRCPVSHPKFEEYRAWSFINNIKYRTDKDARFEPIPLELKEKLYHAKFFYKSSGKREFDFIEVRKFIESNGGNDWELNYSKKMDKVSVSSCYVSARLKSVFGQDWQNFEKKVSRKNKKGEDKVKTYNIEDIWHLLFSFEDEEYFEEFLIKTLGLNEDQVKELKMLFNSFPVGYANLSLKAINNILPFLKQGLIYTEAVILAKIPEIIGKEVFEANKEIILNSIKDEIKTNRHQKKIITITNNLIFKYYALDYQNRFGWKDTSYKLDKSDLKDVETATIEHFGNKSWIKLIQYEKDQIINEVAAKYQVFFASAKREHIKPPHLVNQIKDFLDANFNISERLLDKIYHPSQIDIYPKKEVQQFLLSPRTAAFKNPMAYKTLYRLRDVINYLIETEIIDEETRMVVEIARDLNDSNKRWSIEKYQRDREAENREFANAISDLINDPNFSGLANPESKDDVDKVRLLLEQTDEMQSDEELELRKILRDPYKRQKEKNETQKLLIKKYRLWIEQGMRCMYTGRIIKLTDLFDKNRIDFEHTIPRSKSFDNSLANLTVCDADYNRKIKKNRMPTELENYENDAHGYSAIKPRLYAWKKKVEHLFNQIDLWKTKSKNAKDKAEKDNAIRTRHLWQMEYDYWKNKLDRFTRTEIPQGFVNSQLTDTQIITKYAFHYLKTVFNNVDVIKGNNTAQFRRIYEIQPKDEVKDRGKHYHHAIDAAVLTLIPSSRLRQEILGKAYLYEEKNWDKQYHEKPFKGFNYSMIEEIKKNILINNIADKDQTLTLGKKIDRNRGRIVWLKDRDGKFLLDNNGNKIPKIAQGDSIRGELHQQTFYGKIRVVDRDENGVPLRDENGGWKFLSKNKEFKYALRIPIENLKGLDKIVDPHLAKMIEAQLNGRSLKKAIGEGIHMLDVDGNKVNQIRRIRVWQSVNPIPVKEQTYKSSKVYKNYYYAKNAENYAFAYYRNDSGDIAVIPINLYQVSTFNDRNSINDIRDLFEYKVFNKKGVEIPLFHVFVPGQKVIFYENDKKELKSISNLSNYLYFVRRLYQANRGNIQFQHHLEARDDKQLLIDFPTDMIAFDNKRFGKRGVNGFLKFETDFVAPRLLLSPGNFNFIIEEKDFEMKLDGSIEFKF

SEQ ID NO: 10294 - protein, 993 aa, unidentified
  REGION 1..993: note = Description of Unknown: Cas Enzyme sequence
MKVMRQHGLMPRDKMAAKALEGLDPYALRVKALDEKLTLYELGRALFHLNQRRGFKSNRKADRVSKAGEDGKIASGTKALDEAMRILGARTLGEFLFGRDQKRVRMRPEADGYDFYPDRKHYEAEFDAIWTAQAAHHAVSLTDAARKAIHRVIFYQRPLKEQEIGYCTFAGWNGVPDDERRLPKAHPLFQQRRLYEEVNQLEVVTPGEGSRKLTLAERDALIMKMRDKKRISFTSLAKAIKLPAGSRFNKESENRKDLLGDEVRAALSDRKRFGSRWPAFDLIEQTQILDRLQDEEDPDALLAWLMRNYGVGEDVAIAIANSPLPEGHGRFGETATQMLLEKLQAEVVTYAEAAARAGFHHSDQRTGEGFDSLPYYGEVLTREIAPGKDDYGDALERQFGKITNPTVHIGMNQLRKLVNAIVAVHGRPDQIYVELARELKLNEKQKAEQSRRIKQNTDAARARGEKLIEMGQRDSGGNRMMMRLWEDLNPQNALDRRCPYCGGQISAEMLMNASVDIDHIIPYSRCLDDGAANKTVCHAKCNRQKGQMTPYEKWGNTDNWATIQDQVATMHRSKQWRFSPDAMERIERDGGFIARQLTDTQYLSRIAAKYLSALYTPDEGRRVYAVTGRMTAMLRRLWGLNELLPDHNWVENEHSNAPKNRLDHRHHAIDAAVIGATTPSMIQKISKAAARAAQHDLDKLFDGLPTPWDGFRDELRDKLLATTISHKADHGRKGTPSRHKDVTSGQLHNDTAYGLTGRTTAKGVPIVVSRKPLLSLKPGDLTDPERMTDHSLQDALYAATQDCDGKDFEKALRDFAKSDGPYSGIRRVRLCESLKVIPIHDKDGVAYKAYKGDGNARFDVWRMPDGKWITKWKDLDGREHSSVISMFDAHQHSHIEEKPHPAAKRLLSLRQNDLIAVERDGAAREIVRVVKFGSNGQMFLALANEAGPLKARAADGIDPFKYISTTANGLKKMKARQIRIDEIGRIFDPGPRE

SEQ ID NO: 10295 - protein, 973 aa, unidentified
  REGION 1..973: note = Description of Unknown: Cas Enzyme sequence
RSRFMDALVSHGLMPNKAEDRKALEHEDPWTLRVKALDQKLSLHQLGRGLFHLQQRRGFKSNRKTDAGGDDESGKIKSAAAAVNDAMKKTGARTLGELLAAPRIKNPKSAHTNPVRTRLKGSGAKAHYDYYPTRDLIEQEFNCLWEAQKNFHAGALTDKWRDELHDILFFQRKLKPQPVGKCSLDPTEERAPKALPSVQRLRIYQEINHLTVSLPGQAARPLTLEERNSLVNKALVTQKLTFDAARKALKLPPDARFNLESDKRKHLDGDKTAAVLASDKRWGKGWRGLPFEDQETIVEKLLEEEDESALLDWLMSNHNLSAETAEKVADAPLPDGHGQFGRTAINRVLAKLEKDVLSYDKAVVAAGYPTHSQLDFDGEVFDALPYYGEVLDRHVAFGTGEPADLPEKRYGKIANPTVHVALNQIRRVVNGLINRFGPPSEIVVELARDLPLSAKGKSELDKTQRENQNANDGRRKVLAEMGQADSYENRLRLRLWEELNPNDPLDRRCPYTGDQISLNRVFSAEVEIEHILPFSRTLDDGIGNKTLSMRHANRFKGQQTPFEAFASSPKGYDWESISARAVNLPKNKSWRFNPDGMDRYNSSERDFLARQLTDTQYMSRLATLYLKRTGADVWVTPGRFTSDLRWAWGVDSILAGHNLEEPFVPVKNRNDHRHHAIDAVVVALTDRGLLQQVATVAGRAEERFDKRYLADIGDPWINFRDTVRESIEKIVVSHKLDHGVQGALHEDTAYGMVLDPLTGEPRLASRKMLAGLTRAEIGKIGDLKIRADLESLTNSVSDKEIKTVLEKYGSEKSIRRVRIHKVEDSYKVIRHGGNYTKAVIPGENNSVDIVQTPDGKWRGVGVSMFDANQKDATPQWKNNYPDARHIMKVRKNDLLKLEVDGHEQVMIVVRLNPSSNRFYLASHTEAGSLQDRHNDKDDPFRWDLASFGKLKVRKARLVHVCPAGRVFDPGFKE

SEQ ID NO: 10296 - protein, 917 aa, unidentified
  REGION 1..917: note = Description of Unknown: Cas Enzyme sequence
LNVRGNLQSQELLKLLVENPKDWELNFKEIEGNRTNKSLYDAFINMMEFDGHDFEQYQPQGVELKNILFDYFKTQGINAEILNFDSELIGLDFENQSSFQLWHLLYSFEEDPMKPSSKEMLVSKLVTKFGFKEAHAKILCNIDFQDDHGSLSTKAIRNILPYLKDHQYDKACQLAGYNHSNSLTKEENAKRILASELDPLPKNSLRNPVVEKILNQMVNVVNAVINDQSLGRPDEIRLELARELKKSAKEREKMTAQIGSAKKINDSYRKVLINEFGILNPSRNDINRYKLYLELQPLGFTTLYSKTYIPREKIFDGEFDIEHIIPQSRLFDDSFSNKTLESRAINIEKGNSTAVDFIEEKYGNEELEAFRHRANLLFKQKEHPISKGKLNKLLMRGDEIPDDFIERDLRNTQYISKKAQEMLLKVFREVNTTTGTITDRLREDWGLINVMKELNINKYRTLGLTTHLEKKDGTTKEVIMEWSKRNDHRHHAMDALTVAFTTRGHVEYLNYLNARKNESHKKYGKIFALEQKLLKKSERGGKRFRLPMNDFREQCRSKLEAVLISHKAKNKVVTRNINKIKIKNQVQTKIALTPRGQLHKETIYGKIRVRKSNEVKIGASFDSLVISQVANQSYREALLKRLGEHNSDPKKAFSGSNSLIKNPVYTMDKERVPERVKLTWFEDQYVIRKEINPTNFSNLKQIEKIVDQGIKRKLIKRLELNKGNAKEAFSNLDDNPIFLDNEGTIPVKAARIKGVNNAEGLHNKYDHFGKLILDKIGNTMDVDFVSLGNNHHIAVYQDENGKLQEMVVSFFEAVRRSNSREDIIDKTYNEHLGWKFLFTMKQNEMFIFPSDSFDPNGVDLMNPLNYSEISKNMFRVQKIAVGDYVFRHHLETEVIDNPKFKGVIWKRIGLSSIKNII

SEQ ID NO: 10297 - protein, 965 aa, unidentified
  REGION 1..965: note = Description of Unknown: Cas Enzyme sequence
MANHSEKQSYILGLDIGSSSLGWAVLETNKTNKPTGVLACGVRVFPAGVEGLETGKDTSPNADRRQKRQIRRQLMRKARRMRKLFRILMLNGLLPTVEKVTPEAIDTALKQLDQELAKKWITKGDTESHLAFPYRLRAAAAKSPLELFELGRALYHLMHRRGFLSNRKSVRKDDEELGKVHSGIETLKGAMEEAKCATLGAYFFSIASHEVRLRSRWTSRQMYLDEFAAIQKANPQVPELVWKELHKAAFFQRKLKSQAHLIGKCSLVKDRPRAPLWHPEYQRFRILSAVNALRVADDSIPDGNRSLDVEERAELIEALKNQQSMTAGGVKRLLKLPKSSTLSIDETGSGDMIGDRTAATMRKAFGDRWNALSHPEHLEALHDVNSFEKDDALGRRGQKHWKLSVEQSKEFSKIVLEPGYGSVSVAAIIRLMPHLEKGMTYAEARKNEFPEQFTKTDVLELLPPVKDYKDAMRNPAVARSLSELRLVVNSLIRKFGKPEQIRVELARDLKKPKKQREQISKDNRSREKTRETHAAEIVAKTTLKQPSRADIEKFELWKECGGVCPYTGRQINMSDLFGATPQVDVEHIVPFGRSCDNSFANKTLCFSEENRNVKQKKTPFEAYGSSSRWGDMIARVKRLNGSAAKAKLARFLNESSAQDMAEQFSTRQLNDTRYASVLARQYLSQLYGGFSDEEGKSRVQATAGQTTAFLRREWRLNLLLNDKDQKSRKDHRHHTIDATVVALTSPRQIKALTDAASRATGAKGQRLFAPIEEPWNKFFEQIQAAIDPIVVSHRVRKSLSGALHEETNYRAPMASDPTSSFVRKPLTALTKTELEGIVDPKLRDLIMKAVGKGDPKKVFQEQNSLPTITGSDGIVRRVRRVRVKANRPTMTVGSGLNRRFVSSGGNHHMAIYETATKTGVKWNHKIVSRLQATQRNRSGLSVVDRAVPDSTNFIFSLCPGECIAI

SEQ ID NO: 10298 - protein, 1054 aa, unidentified
  REGION 1..1054: note = Description of Unknown: Cas Enzyme sequence
MAMVLGLDMGSNSLGWALVDPEKNTLIDMGVRIFQAGVDNLNGAKEESRGVSRRLKRGMRRQYRRTRQRKKALRLFLIMNNLLPNDANEFDVLLMTDPYPLRKMGLDEKLTLLELGRVIDHINSRRGFRSNRKASSDEEDTGVIFEGDKTGTKPGINEIEDALDSRLRSMKAYRIIEPEIELSGLQDLDGFRTAGEYLASLDPVVRRRRCRFTLREHFEIEVQILFKKQQQFYPKLLTDEMLTQLNKLIFWQRPLQSSRKLVGNCTFEPGKKRSHKSHPDYQRFRMLQQLNMFTIRGSGRIKDDEAVLMEGERSALYNHLITKGKLKEIQDKSTAVIKLLKLDKNLTWGFGLNQLDAPYTELAMKSALGPDLFVTLCKDEIHDIWNVLNFAVDKDWVIQWMIKQYQLTEDQAKAVAKIKLEDGYGSVSLRAARKILPFLEQGLLYHEACEKAGFKHSQPQTDIPVTNRIPALAPEDARNPIVQTSFAEMRRVVNLLIKTYGPIDTIRIEMGRDVKQPKNERLKSDKINRENKAKNDEVREMLRSEFGLHNPSKNDIQKYKLWDSQNHKCIYTGVNISQDDLFNAPIDVDHVIPYSKSLDDGMANKVVCLRDINAKKGDRTPLEAIQAGLLNEHELRERLEGLVRANKMNPRKARRFFLSKEEVAELVGDDFHIRQLNDTRYVARLTHKYVRHVCSDISISTGVLTSMLRHKWGLSGIIPELAEQGLAWIDAEAVANSQKSRADHRHHAIDALVVALTTRSIVKQFADLNKSNELHNLDKHIGSGRISIPLEPIPGLRALALERTKNILVSHRVNRKVRGQLHEETIYGLHKDYNGVHIANANGMPLYAVRKPIESLSPGDVLSIIDGGIRRAVANRLLELGEDIDNPKFTVPKTAFLTPLFLPKKDGSKGPHIKSVRIARPSTGMVRIREHGAYAETGSNDHITLGPFNEKRKREYFNVKTLFEASSAMKGKQTNTEAMTFRTNEMYVQELDNGEGNSAQFYRVQKINKADGQICFRHHSASGLIDNNSRLLKTPNTATGAKVAIDALGRLLNS

SEQ ID NO: 10299 - protein, 996 aa, unidentified
  REGION 1..996: note = Description of Unknown: Cas Enzyme sequence
METYTLGLDVGSNSIGWALAETKDKPSIIATGVRVFPEGVDRDTGGAEVSKNAARRDARGARRMRGRRGIRKDKLVSTLEQAGLLPVDKKEFAKLMLSEPYRLRAKGLDEKLALHEFGRVLFHINQRRGFKSNRKSGQAKEDGVVKKAANALQTDIDNAGCRTIGEYFSKVDPHGERIRSHYTFRSMYEHEFDKLWEKQSSYYQDILTEELCKKIKDETIFYQRPLKPTDDLIGDCSLEVGEKRCPRSDWFARRFRIMQDVNNLIIQNPDGSSKKLTPEQRKIILGELVIKKQVPFDAIRKKSGLIASQVFNLEENGKKKNIKGDEFAAQMRSKKVFGSKRWDGLDIKKQIEINDVLIDDDIDDEQFTEMLMTEYRLSQEQAEAAVNVSLPKGYMSFSRKAIQKLFPYMEEGLLTFEAIKEAGYERNNNKQTDCLERLGSPEDLRNPIVQKGLFEVRKVVNSIIREYGKPKSIAVEMARDVKGSLSQRQEIAAKMRENERINNNARTRLVEDIGLSNSSYDDILKYKLWIECGKVCPYTGKVISQNALFGPNPEFQVEHILPYSRSLDDSFMNKTLCHVKENVRKGNQTPYETYGHNEQEYEQIKQRIRVLPWPKRRRFLQKEIDLDSAISRQLNDTRYITREVVRYLKGIGVYVYGTKGQSTASLRHCWGLNNILDYTGAGLKNRDDHRHHAVDAVVVALTTNKHLRRLATSKYGNKDVEFTEPWEGFRNEVAAKINSITVSHRVTRKVSGQLHEETAYGPTGEKDEKGQEIYVYRKKLEDLTIAMVGKIVDPVVQEIVRGRLMEHGVDSDKAKKIPKEVWNEPLYMKSNKGLKVVIKKVRIRGVFNNMILLNDESGKPYRAVAPGNNHHVEIFECKDKRGNTKRDGRVITMFEAVRRSRNSEPVINRDYGDGRKFVCSLAKNEMFMLELEDGEKILHRVQKITQGGGIILRPHTFAGKLSDIDRPPAIQRKSINTLKGHKVSVDPIGRICAAND

SEQ ID NO: 10300 - protein, 1066 aa, unidentified
  REGION 1..1066: note = Description of Unknown: Cas Enzyme sequence
MASRGVLGLDLGPNSIGWALIDEEEEAIVDIGVRVFPEGVDNFDTAKEVSKNEDRRISRGMRRQAERRCRRRRQIRDALVEAGLFPAEPERQEALLASDPYELRSRALDKKLSPHELGRVFCHLGQRRGFLSNRKKDRGDKEVKGMLAEISELEGEMKEAGAETLGRLLYRKAQSLDHASRRENDHLRNRHTRRKMYEDEFEAIWQSQCRLGNDGLLTDDLKYGKFKPKRGHEQLYPRKPARRPAGLSPLEAFGIHGLIFFQRKMYWPRSAVGTCELEPKQPRCARADRRAQRFRLLQEVNNLRYSDLETSEEERLSGEQRTLLLDKLSQSAKVTFDQIRKTLGFMESVKFNLEKGKRPGLQGMIVDALMAKAVGEAWHARDERQKDDIVRLLINNEREDDELAERLVDRFGMTAAEAEAALDVDFPSGHVHLSLKAIDKLLPHLERGLILQSESDPEKSALHAAGYLRRDELKRRLFDRLPDPQRARDCPIGDTPNPVVKRTLVELRKVVNAIVREHGTPAAIHVEMGRDVRTRPKRGTDAYRKYQDRIDEMRTREKRRADAAEKLRESSIRVNRDNINRYLLWEDQNRTCIYSGKPIGFGQLFGGEIQVDHVLPYSRCLDDSQNNKVVCFGKTNADKGNRTPYEWLADAQSDHYEQVCQLAGKLMHDGRIPYAKYRRFVQKELKLDDFIERQLNDTRYIARLAGEYLRCLFEADHHVLGVKGQLTATLRHDWGIENLLEELPDSPAWQDSSKLRPGQKNRADHRHHAIDAAVVALTNRRRLAELASIRMAGGTEATGELAVDPWLSFRSDLLDAVREVKVSHRADRKVSGRLHEEMFYGKTERPDVWVLRKKVEELSPSEVPNIRDREIREIIIARLRTYGIQVGRKQGKDEKKWKQAMAGLTMPSGVPIKKVRVCKKDGTILSIREGTDNAAFVKPGKTHHLCIFEFSEKGKTKREPVFVTMLEAIGRVKRGETVIQRNHPQRPEAEFVMSLSRGEIVLAEMNGEEKLLVYRTGASTSGQIRFAEHTDARKGSDYKILRATANSLKARKVTVDPLGRIRWAND

SEQ ID NO: 10301 - protein, 998 aa, unidentified
  REGION 1..998: note = Description of Unknown: Cas Enzyme sequence
MSKILGLDLGTNSIGWTIIDDKKEEIIHAGVRIFQEGVNRSATGSEISKNADRRLARGIRRQNFRFKRRRDELVEKLIQYGMYPENDNSIQEYFKDDPYKLRTKGLDEKLNLFEFGRVLYHLNERRGFKSNRKTKTKDDSKIYSGKDNTAGITDTENAIKSGNFRTLGEYLASLNPHEQRIRNRYTLRKMYQEEFELLWSKQKEFYPGLFTDEIKNDIYDTIFFQRKLKSQKHTVGYCTLEPKKHCIPKSSPSFQYFRILEQVSRLRISTDSRINDSLTEDERFVLIKYLELYKDRTFDQIKKKLKLATDCYFNLEHQNKLFGDRTSSDLSRVFTKSGWSQLSPEKKYEIWHTLHFSDDDEWLEKYAREKWNLDEKAIEKLLKISLEKEYARLSRKAINKMIPYLEEGLTYDQAALKAGYHHSKINLSDTMKDFLPKPENIRNPIVQQTIYELRKVVNDIIQKHGKPDIIRVELLRQLKLSKKRRDSIHLDNLKKKRKNEEIRNRIAEEFPFIPSREDIQKYLLWEECNKICPYTGKHISLAALYNGEFEIEHIIPYSRSLDNSMANKTLCYKGVNLEKGNKTPFEAFSGNQKRWDEMCHRVYKKLKRKYSRFTIEDAAKEINEDFFEHQFTDSAYIAREVFNYLKMICKRVQVSKGLATAQLRHLWGLDKILSGAENIKNREDHRHHVVDALVIANISPTSLKNLSNYHKFGKTAVSDKFPIPWSDFRTDALDSVNNILVSHKVNKRVRGRLHEETFYGKIKTKDGKEHFVVRKPLTSLSPKNVGNIVDPVVRKTVLKRLREYGVNTETKFKIPKEAFVEPLTMPTGNTKIKSVRVLIPTQIMIKLYDDRELYVEPGKNNHIEIFRNDKTGKQTGRVVSLFEATQRLKNHKPIIDKTSPAEGYRFLMSLSINELVLMDFNENDIDWNNPPNYKIINSQLYRVQKMSSTQQITFRHHRVAILKDDKGNEPGVLRKNPSVLNAIKVRVDSLGNIRKYND

SEQ ID NO: 10302 - protein, 1206 aa, unidentified
  REGION 1..1206: note = Description of Unknown: Cas Enzyme sequence
MKLLGLDIGSNSVGSAWVDTDKKLIEMGVSAFPAGVEESETKRGAPKNQARRSQRQQRHSIERRAKLKIRLRKYLLEKNWIPTEKEKLQEWENINPWLLRRDAARKELKKDDNFSAGEKFGRILLHLAQRRGAWWFDEEPEETENGKKKKKDPAEIPGTFEYTKKIMKEKGAETFGDLIAIEYENRKTNTANKKLRNDRVRNRANAFGEKESEFVADRHMILAEFLKIWETQKSFGGELSTQLTDEVKKEIYNPQKTNTWRCQGVLFSQRKAYWDIGTLGRCDLEPTDEKCHKADMYAQEFLVLTSVNNIRITPPAKPIRKLNDEERSKVIKAVRKQRTASEGTIRKALGIDKGANKTLYTLNTDEDKFTVNGDWFYSQIVCDVFGDDTWASFDSKIKDSVNKTILKFDPNEEDDKTKLSDGCKKWWNLTDEQTEKFISVWEKRPKKDQRVNLSRKAIKNLLPYLRDGWSVTEARNMYAEDASNGADDLTRKRYSTKEVVVSKHIRYFQKKHPGLLPPVSDGISNPVVRKSIHEVRRHLMEYTRKYGRPDRVVIELAREARQSEKVIAKKVQKNKAIDGLKKEIIETHNLNAHNITSTQRENAVKRVRLCKQQREMCAYSGITITDKMAADGSGLEIDHIIPRSKGGDNSMSNLVLCYSTANQGKGDRTPIDWLSEEKFGNVEKIFKHLHSQKGEKGQRFITKDNVDMVDEAKWKNLHRRTPKEGFTEEQLRSAAYAATQTSDWINKVLYGSEDRDKRYVFASNGNYTGILRRDWGLFFDEQGERSEKGIKLRGDHRHHAVDAAIIAMTIQRLPKIKESFIDFEKQEENKSVKPQWKTIEQPWEGFSEQIAEEYKKMRVSHRAYNKRIAGHLHKDTIYGPAVIYERHKKDDAKKGIKKGDIKIDKNGNPVLKKGMYIKSIPAIGIKQNHLRMPDDWDKLKDEYKNAPTKSQRKAIRKKMLFLEDIPPAKSGIIRDIELRDKIRDWLKEHNFSDMEKAKAYIKENGLIINGTPVRKLRVLWKLNEVKEIPRKKYDFESGRIVKDNNYKTSRVYQTQNNHHIEIRENEKGNWIGEVVTNFDAAKRVRVKPPKPKPQGWTPPPAVNREDTKKGRFVMSLSKGEIVHMRHPETQKDNYFAVFKIDSPNTIHFTPHTDANPASSKKKGVKIREDISLVPDDLRQHIIFTEGSVPEKVRISVLGEVKVLVRD

SEQ ID NO: 10303 - protein, 1051 aa, unidentified
  REGION 1..1051: note = Description of Unknown: Cas Enzyme sequence
MTTPPEHTTILGLDLGATSIGWAVIACQDGDPRRILGTGVRIFEAAAGEPEKIESGGEVSPNAARRQARQIRRQLERRARRLEKHAGVLQRFGLLPEGDVSAPQRRHEFFLALDAELRAQHEDEASETYHHVFPYWLRARALDHKLEPYEIGRALYHLGQRRGFLSNRKTAAREKDEEKSKVYQGISELEKEMQAAAARTLGEYFAGLDPTDPEKRRIRHRWTSRKMYQAEFEAIWQAQAKHHPGLLTEQVRTAICEAIFHQRPLKLQKHLIGMCQFEYKGKHPRRRAPMALPIAQRFRILQKINDLKIVDPDFQEHDLTPDERGVLLQHLETSAELKFTQARRLLKLPKDSKFNLERGGEERLLGNRTSAKLMGIFGDRWQQMTPLERDRIVEDVRSFEKDDALARRGEKHYGLDPDTAKKFGAIEFEPGYCGLSQQAIEKLLPLMEQGIWYSAAAKQVYGGDEEAVPVELLPSVSDAIRQRLIPELRNPVVSRVLSELAKVVNAIIAKFGKPDTIRIELARDLKRPREQRKRISIKNRRNEKSRRSVADKIRELTGDDHPSRDVIERLLLHEECGGVCPYTGKPISEADLLSAQSQFDIEHIIPFSRCLDNSFLNKTLCHHEENRTVKRNKTPSEAYSGDRYEEIIARVKRFKRDARDEKLRRFLLTELEEFESFSSRMLNDTRYATTLAADYLGLLYGGQHRKHIQAATGPITAHLRDVWRLNKILGNGGIKSRDDHRHHAVDAIAIALTDPKTVKMLNQAAERADAEGRRRFASVSPPWDRFLEDVQETIHHTNVSHRVSRKVNGRLHEETFYSPQPCADDGKPCVHVRKPVDALTAPDLKEGVIVDPIVRKRITEKLDELGISDPKKAFADRKNHPYLETKTGRRIPIHKVRIAKVLTTFQVGKECRARHVTTDSNHHMEILEVKDKKGETRWEDLIVSQYEALQRLKNHQPIVNRNHGEAKRFLFSLASGDTVEVQTDEGKKEAVVIRSVSKDMITFARAGDARKKADIIAAEDWFAWRLNRLRNNGCRKVLVTPLGEVRRVGRE

SEQ ID NO: 10304 - protein, 1294 aa, unidentified
  REGION 1..1294: note = Description of Unknown: Cas Enzyme sequence
MPVYLGLDIGSNSVGSAWVDTDLREVCLAASVFPAGVDEQEDKRGAPKNQARRQTRSQRRTIGRRACRKRKLRRFLTEHRLLPADPAALQALLNLDPWHLRRKGLAEPLSPFEFGRVLLHLAQRRGAVGVVTDPDDPEEGKVKEGMDRLAREMHQAGAHTVGQFIANRMDESRQPIRRAPDEKCSRRTVARRGRQAERWAGRDAQRPGPHCQAPIRNRQYRIAPDQMLFAGRELIRREFHRIVEVQRSFQDSELCAMLTDEVVRHLDNPTQTGTWRHQGLLFGQRRTYWETGTLGRCVLEPTDRCVPIADRHASYFRVVETVNNIRVRHRGDQELPLTPEQRDKVVHLLRGPLGLHTKGKHAGKPKTSVSVAEIKHALGIKPRDKAVKLNIEADEEREINTDWFHREMVHGAIGPETWRRWEEAERQEANLPQRSAQAQRPEAVNRAILKFDPEEPADEERLRKIATSHWGLDSEAAERLIAAWKQRPKLEKRLNLSRRAILNLLPYMDRFDEQSNRWPTQQEARKAHAKALQERFECTGKQADRIAAQRYASAALGLTADDRRYMRLEKHQIKHSGEVVRDAEGRPLALPPPAPMLSNPVVRKAIHEVRRHLLAYLRKFRRKPDRVVIEFARGVKDTAKRRNLQLKANRDREQKRNLIEANLREWGIRESNWDRAVLRVRLCQEQKGICPFSLQGPNANRPITERMAAEGQEVEIEHIVPEALTGKTMAFNNVVLCFREANRGKGMQTPADWLGPEGVQAMLQRLENAPIRDNRLKWKRLQAPTPDEEGFRNSQLTDTAYAARQVAAYIADALYDGRGLPERGGPRIIFTTKGEFTARLRADWGLHESTIDRAHALEEPPSPEALHADPGLEQASRRARKEPKDRSDHRHHAIDALVTAMIGPELLTQLGRMAREDREYKERTGHWPRRKAVEPPGLWTTPESFRDDVLACLENMIVSRRAVKCRLVGAFHEETHYGPVIAPMPRHRTENHGSLFTNRIPASALTPNHLRVPVGWDELSAKLDDPNLPQQQKRGITQHLAAMEDPSPGKSGIVRDRALRDRLRKCLRGNGLNPDAFTPADIKKVLADGNLTMRSGVPIKSVVLLRTIADPVIIPRKKLDPDTGKMVPEMDPNNPLSPHPRTKRVYIGGNNHHIEIRQRERKRKGQVATEWVGQVVSTFESAKRVRNGKRGAVDRSENDQGPFVMSLAEGEMIFARRKDRPEEPADYYVVCKLDKAGNSSRIHFAPHWDARKASEQDRWDVTPGDLKDCGPEPGKPPQKVRVGPLGDVTLLEND

SEQ ID NO: 10305 - protein, 1179 aa, unidentified
  REGION 1..1179: note = Description of Unknown: Cas Enzyme sequence
EGKSRGNSKKYQEAKMYSKTLGLDIGTNSVGSAWIDLKQHKIRMGASVFPAGIEESDTKRGAPKNQARRGARGQRRSIERRAKRKHQMRSFLVQKAWIDTDERKWLGMNPWILRREGLKRELSPYEFGRVLLHLTQRRGAFGFDSDSDEDKEQGKIKEAISHTRQEIAKYNAETFGDLMAMKFEERKIPIEKTDKEGKKIEIRTAIRNRTKASGEGTYEFCADRDLIWEEFDRLWNRQKSFHGELATHLTDECRKELANPKGDAAWRYKGILFGQRKTYWDMGTMARCDLEPTDMRCPKGDMYAQEFLVLETVNNIRITPRGESNRPLTREEREKVINALEKQKTASEATVRKALGIDKGEKKTQYTLSLEKDPERGLNTNWFRREIVLGAIGPERWAKMGDRDRESINRAILTFDPQDKNDAEQLTTGCRKWWRFDEGQTAQFIEAWKKRPKVDDRVNYSRKAIKNLLPYVREGFTVNEARRLFTEDAENGATAEQRSRYNFGAKTGNRRMRQYGEKHPDLLPPAPDDLSNPVVRKAIHEVRRHIQAYIREFGCKPDRVVVELAREARQSAKVRNKQLADNRQREKERKAIIHNPDFNLEGSTKNQQEKAIKRVLLCREQRQRCAYCEEEKDTISEKAAAEGTEVELDHIIPESRGGDSGMNNLVLCHARCNRGKGNKTPREWLTQEQFGRLEKRLQHLKKTTKWDNLHKDAPDIDGFVESQLTDTAYASRQVVGWLRDVLYDGERDGVRRVFTTKGRYTSILRRDWGLFPDKKDGNSEGEQGKKNRADHRHHALDAVAIALSGPERLSQLAQAAEKQELAKSEGYEYRKREPVRAPWGDFECFRADVMKEWNNIVIAHRPERRKITGAFHRDTHFGPLLDKKGQLTDHCTVRKFAVELTPKHLRVPNGWEESRKKMEISASKTEQKHIREQMLSLEDKKPEMSGIVRDRWFREELRDCLRRNNLDPDDFTAKEIKELVKNKGIVLRSGVPVRRFTLMRAPTVVEIPRKRWNPDTRKMEYETNRQSVRLYEPQNNHHIEIRQNKRAQWFGEVITNYDAAKRLRPPKNSGQVGQTAVNRNDTEGGAFVMSLSIGEMLYMTHPETKEPGYFVIFKIDGTGSIHFTPHWDAGRAKETEKFPARDDIALPAKRLQEMGVEPALPPQKVWIGPLGDVKILVRD

SEQ ID NO: 10306 - protein, 1026 aa, unidentified
  REGION 1..1026: note = Description of Unknown: Cas Enzyme sequence
MAELTLGLDLGPNSVGWVLLDEEARKLVGVGVRVFPEGVDRDTKGAEVPKMQQRRLARAMRRQIARRARRKRALRRLLVQAGLLPDCALLPANDPRRVTWESEQFRREDPISLRDRALREPLEPHEIGRSVLHLSQRRGFRSNRKTDRARKKENSEILSEISALAAEMGERTLGQYLAHVRGADPHRFHLSRLRGRHTHRDMYEKEFGAIWGAQQPYHPSLLTDELRQRVHRTIFFQRDLRPPSPGLVGRCELEPRLPRCPRADRRAQRFRLLQEVNNLRVLNTSARAERRLTDEERTALIAFLSKKKERTFDEIRKHLFPQYESVRFNLEAGDRKKLKGMPSDAALAGRALIGKPWQKLSEEHKDRIVAAILDDEEDRLRHLLNEAGLDVGLAGPLLEQIDLEAGYASYSLHAIKRLLPHLERGLPLTSRDANTPCALREAGYVMPWEHTADRRPLLPEPPMVTNPLVRQALHEVRKVVNAILRELVYKDGHTLTRIHIELAREVRGTAEQRRKLSLDMRDREAARADAADRIREYGVKPTRHAIDRYLLWKEQGENCVYSGRQIGVAQLFGGEIDIDHILPYPRSLDDSLMNKVVCLRSENNQGVNPSAKGDRTPHEWLAASDPQKYEQVLQRARHLPYPKLKRFYQESVELTDFFARQFVDTAYITTQVHQYVQCLGATVLCPKGQHTADLRWHWGLERVLSELADSPAWQAASDMRPGAKNRADHRHHAIDAVVIALTNQSRLQQLAAIRRAGGTQATGEVLPDPWPHFRQTVKEAIAQVKVSHRVSRRVSGALHKDTIYGPTNTAGVYTYRKPLASLTPPMIDDIRDSTIRRLVAQRLQAHGIDPPTAKKIPAEVWKEPLCMSSGIPINKVRLLKRDESIRPIRGGTACVKPGSLHHLCLFEFPGAKGRPEREAIFVTMLDALDRVRARQSVIERQDPKRHGAQFLMSLSANEMLLLEHDGKEDLYRFETAASTSEQMWFRHHTFAGKSSDKRGQVSKMPGTFRGRKVIVDPLGRIRWAND

SEQ ID NO: 10307 - protein, 968 aa, unidentified
  REGION 1..968: note = Description of Unknown: Cas Enzyme sequence
IRNRTNAAKEPVYEFCADRDLLWNEFDTLWKKQKSLNGELANQLTDPVRKKLDDNSSDATWRYKGILFGQRKTYWDMGTMGRCDLEPTDLKCPKADMYAQEYLVLETLNNIKITPPGEVSRLLNKEDERPKVFEVLKNQKTVTAATVRKALGLHKGENKTLYTLSLDADPKRKLNTWWFYREIISSAISESNWEKLTLAQKDSVNKAILKFDPTSEKDKKYLAEGCKKWWGFDEKQAEKFIEAWTKRPKAEDRLEYSRRAIRNLLPYMRDGFTVNEARSLFAEDATNGATNEQRRRYSFKGGSGNHAMRRFQQKHPDLLPPAPAMLSNPVVRKAIHEVKRHVQEHIRKFGCKPDRVMVELVREARQSAVVRNKKLSENREREEEKRKIIEEFGLAQKTKNQQNKAVDRVRLCREQRGMCAYSGQVITERIAAEGNGLEIDHIIPQSRGGTSFLNNLLLCFDGTNRGKTNQTPKEWLTDEQFREFERRLRHLKEENYVKWDNLHKDAPDLDEFVASQLTDAAYAAKQVVNWVRDTLYDGERDGIKRVFTTSGRYTALLRRDWQLFPDSKRGEPFEKDRSDHRHHALDAVAIALSGPGRVKQISLIFQEREKAEAEGKKLMERPPIEPPWGDVENFRAQVMNEWKKLIVSHRPAARKIIGAFHNDTQYGPILDKDGNLVEQFTIRKFAIELTPNHLRVPDGWEELRKKMENCSSKRERKSIRLEMLKLPDVKPEKSGVVRDRWFREEIRGYLRNEGLDPDNFSKKDIKKLIKEKGVFLKSRVPIRQFTLLRSPTVVTIPRKQWNPNTGKIEYDSNPKAIRAYEPQNNHHIEIRENGKGKWTGEVITNFDAAKRVNPPKSSGVKSQPAVNRNDTEEGKFIMSLSIGEMMYMKHPETKEPGYFVIFKIDGTGAIHFTPHFDAGRDKETEKVKAREDVRLSASQLQTLGVEPDGVPQKVWINPLGEVKELIRD

SEQ ID NO: 10308 - protein, 1382 aa, unidentified
  REGION 1..1382: note = Description of Unknown: Cas Enzyme sequence
MGNNAGKYYVGLDMGTESVGWAVTDENYALLRAKGKDMWGARLFPSAQTAADRRSYRVSRRRRQREVARINYLKMCFADAIQKIDSGFMLRLDESKYFYEDRSEENKQSFSVFNDKEFTDREYFKKYPTIYHLRSELLKKDPIVPHDVRLVYLALLNMFKHRGNFLNNSLSIDSKGANISEAYKTLVDVASYFDIAFPNEVSTEELQNILSSQNLSKREKLEKLSNLFEFSKKTNPEAYEILQLCCGMKGKLRNIFGELIEEDNKNFSLSFSDSNYEEEATEAIELVGDDYFEIVAAAKEIYDIGLLANIMKGETYISDARVADYDAHHKDLIILKQVFKEYDIQSYDDFFRKMEEGNYSAYIGSVNSKYEKTRRNGNKGRSQEDVYKTIKNIIKKFPAEADKDQRVAYILDRIEKGIFMPKQLTGSNGVIPNQVHAREMKQILDNASTYLPFLCEKDESGFTTSERILKMFMFNIPYYVGPLGQEYLDQPGYNVWAKRIANGPIYPWNINEKIDVNEAAEKFIVRMLRNCTYLHDQKALPKQSLLYEKFTVLNELNNLRVYGNKISVEEKQDIFNDLFMRGKKVTRKTLCKYLVGKGIISKDDSEDEIISGIDGDFKNYLSSMNKFEPIFGRENIYGSNREMIEKIIFWGTVFGDDRKVLEEKITEAYGDSLDANVIKRISGFKFSGWGNLSREFLEMPGKSGSSEADKSIIILLWETNNNLMELLSSSYSFKEALESKNLKKQKELLEWNEDDLSELYLSPSVKRMVWQTIKILKEIYQVTHKEPEKIFVEMPREDSEKGKRTESRKKKLESLYKGQKEFLDAIGKYDEHDFRQKKLYLYYLQNGKSMYTGNEIDLENLLSNNSRYDIDHIYPRHYIKDDSLDNNLVLVEKEINNDIKGGDYPLDSSIQARMAPMWKGLLRKGFISKEKYDRLLRTTEFTEQEQADFIARQLVETRQGTKAITQILKEVFPSTKVVFSKANVVSSFRQKYDIPKVRCMNSCHHAHDAYLNIVVGNTYYVKFTANPLNFIKEAGKKWKDPSYHYHMDKIFNYRVERNGEVAWVPQVGDDSGTIKKVRATMSKASVLLTAKAYMVHGGISNKATIYSAKEAQSNPNAYYPTKTSDSRLKDVSKYGGITSIANTAYALVQYSVKENKKIRQLVGVPIYLGDCNKDSALLAEYLHEKVKEDNSKTEIKDFSIRLYPIRFNSTISVDGFTYLVGGATGNYIYLKDFVPLYLSKWATAYLKKVDKACNISDFDEIAEGSKVITSENNKKLYLELTDKLGNTIYKNKKSSIFTVVNEGISIFDKLSIEQQCNVIMQIVLWVNSAVQSANLIDLKEVGGVAHAGVLRIKNAISDYEKVFLVERSTLGLYERKVDLLKV

SEQ ID NO: 10309 - protein, 1074 aa, unidentified
  REGION 1..1074: note = Description of Unknown: Cas Enzyme sequence
MKKRFAFDLGTSSLGWAVYLLNDKGQPCELIDCGSRIFSDGRDPQTGESNAKDRREPRAMRRSQDRYLQRRKYVMSELIKAGLMPAEEEERKKLVELSPYVLRANALKSALHLHYIGRALFHLNQRRGFKSNRKTDNPDESGKIASAAKRLHENMGGHETLGSFLAERQADEDVRKRKPVRIRADATNKEELYEFYPMRQMLEDEFDLICQRQAEFNPNFPSDEKIAAVRKAIFDQRPLKEVKPGYCSFYDDQFRLPRAHPLAEDFVYYQKINQLYAWDEDGYKIEITMEQRDQMIAMLKSGIDLTWTRARKILELPGKTGRINFEEGGEKKIDGSALTKRFQGTDKKPGPFHNKWAEFTLEQIETILAAYKNSNTDEELLEALAEFQLNAEQQALAVKRSLPDGYIAICERAAREITEELKKDIITYAEAAHRAGLHHSDKRDGEIFDRLPFYNEVDQLKRHLGYGTGDPKDNRDKRNGRIANPTVHIGLNQMRRVINALMDKHGRPSEIVLELSRELKQSKKQKDEYSKKRNTNKAANDARREELEKTGFYQAGDRRRTREAFTRLRLWEELANSPNDRFCPYSGKPIHSISLLMSDQIEIEHILPRSRTLDDSMSNKTVAYRQWNRLKRNLTPSEAAAHYPDKFNQDHMIARTKHMPPNKRWRFQEDAKERFDDEEEFLGRQLKETQYLGKIMRHYLSKINPADPNQQEMAVWVTTGRLTAELRRKWGLNLGSNYKNRNDHRHHALDACVIGVIDRAMVQKIAHAAARDEEDQKLGRILSSIEQPYEGFSDQVNAAVRQVIISHRPDHRISGQLHEDAAYGLVAENEENINRGEPDIGNVVIRRAVSGLTSKQIGQVRDLQIREALEQILYEAMQLWPDAKNFKKKFPVMLGEWSRKTGTRRVRTLKPEAGIVPIDRRKDASRYKYVVPGSNHHMDIVETPDGKWHGIAQSTFEANQEQRQKKNGITVTEKWQIERPDATFIMRVHKGDTLQLFDDDGVNQIKRVVRINPSANRLFLAYHNEAGILAKRHMDKDDHFRWDLATISKLKARRARRVRIDQTGRIHTIPQGKM

SEQ ID NO: 10310 - protein, 1835 aa, unidentified
  REGION 1..1835: note = Description of Unknown: Cas Enzyme sequence
MTNKKILGLDLGTNSIGWALIEIDHENGVVKVLGLGSRILPMDAGEIGDFESSGKIKSTAAGRTEKRGPRRMNERYMLRRDRLHLVLNLLDALPSHYKLEIDLERNGKKCGQFKKDKEPKIAHVPSNVDSKKKVFLFEDAYGAMLQDMGIENKKGSRVPRDWALYYLRQKALEKEITLEQLAWVLLSYNQKRGYEKLEVEDTSSKSNELREELDLQVKSVKSVTDADGKRFYEIRLSGNDGFVYKEYSEKQMTFENDLKEIVKVSKVDDQGNIDPKKTEFTVIDIYPLSIQNVVHQKEGGKHQFQLTYNNGWEETKVAAKYTFKYRDAGEKLFDYVVETSYDALGNIKKAQGKDRKLREPDFSDNSSDWTLLKKRTEKDALKFNVDQGFLNDDGSAKNYISPKIYSVLKNDAKSGIRTKIIGGLFQVVERKFYREELNQIISTQRSFHAKLNDTEVFERCVKTLYPKNETLADSLLSNKRSIEHLLTEDILLYQRPLKTKKSEIANCKHEIRSWKNAIDKKTGKSIEVVDEETGEISIKKEPVYHKVVSASHPYFQEFRIWDKLHGLKLMQLEKQVNGKLSTNVNVTEEYFTENTYQQLYAKLNKRKTLTHKQFLAFCKTNFKIKDIGNYVWNFPEDEELKGNETRVSFSTRFKRWGFSQSEFDQFLTQEREIELWHYLYSVNYRERKENSNKSLYTFFNRFLDNSEVSDDIKEKVVEDFANYPKFPSNYCAYSEKALKKLLPFIRMGEARFLGKFDISSNDADLKNINYDGTKIAAYLKPTDATLSKEERKSLEMRKQNLHETLWKHSVNERVDEILSRLDKVDFDVERPDFSKVVSDGEGTRYGELPYPKGLFNAFRGFNMANEFTSLDLTRTSYLVYGRHSELAEAKYWDSPEIIRKELHNELKQHSLNNPVAEKVILEMMQMVADIWDYYGEGQEKFFTGIHVEVGRELKKSAKQKKSLASNQKENRAQNKRLRMVLEEFLSTNTYKAKPKSSDHFERLKIVEDSARNQLNKKGYFDDKKYSKKDIENILNKPYIEKQDFDKYKLWIEQGYKSPYTNRIISLTDLFDGAKYNVDHVFPQASVTNDSLSNKVVCETDVNKMKSNQTGREFVNNPKERTFYSDAHKTDRNPKGEITIVDDITYVGIVRSQFSGYKKQILLSKEIPKEFTNSQLNNARHIARKAMELLSHVVREDGEIEFLSKNVLPVTGAVTGKLKSAWRLTEVWKELVAPRYKRLNELTESNLFGQEQISKSGHKYFDCNLNDGIRNKDESYDIKRIDHRHHALDALIIALCTRNHVNYINNFNADTRSKDIGKQKRLEAYRGTLKKKIRFTKKDDTQDDRNWYYMLPGEIRKQGDKTSSIATVLSKSYQYKGFTSFQRDYKEMILTALRHTVVTFKQNLRVINKTVNRYNNTPNKKVFVKQEGEKVGNKYNWAIRRSLGKATFYGKKNLNGEERAVIRKEVDSTFNSTKILTITDTGIQKILTNHLQQFDTLELSFEEAIVHYDALLEKAELESIVKNKKDYGFADINGLIQNLRENEFKKENTDYSKLNVFIEQVPERNFRDDEQFRKKIMEHPEIAFTPEQIEKMNEPKFMQRLNGGKRHTPIRKVRIARGFGKQRRLSENKHSVKFNQYVVNDSGSNLYLGFYERLYVNNDGENVRERKFKGIGLIELIKTLKLDGSNRHHPLPEKIIEGQHEYERKFTLSPLDLVYAPTKEEIEDPSSVDITAFTVEQLERIYKYVDGGGGIANFVPYSISKPIWKFHDNKKKAEIHKELSATGGTQISLDNLIKDEFGFGSQQTKNQNMIDGETSIKKICWKLEVNKLGNITNIVR

SEQ ID NO: 10311 - protein, 1155 aa, unidentified
  REGION 1..1155: note = Description of Unknown: Cas Enzyme sequence
MSTTLGLDLGPNSIGWALVDAEKRKIIDLGVRVFPEGVDNFDTRKEKPRNEERRLARMMRRQIRRRATRAHQLRSTLIELGLFPENPTDQLELHETGPYELRAKALDEKISLHELGRVLLHMNQRRGFLSNRKKEQKDGEVKGMLAEIDDLSKEIKQSGSRTLGKYLHTKLGTLDHAERIEDDHIRGRHTQRQMLADEFRDIWEAQSVYHDKLTDELAYGSFGVTVNLEERSIARIVHPQAKSSDRRNGESDLQSFGLFGIIFSHRTLKPVPMEVIGRCELESRLARCARADRAAQRFRLLTEVNNLRLIDSTKTPAEDRELNDQERALLLDKLSKTKGATFDQIRKWIGALPGSPAPDQLCFNLEEGKRKKIDGMVTDAILAAKGAVGPSWRALPEGTKDAAVRELIKSVDDDEAYEILVNTIGLTPEQADGALTVDLSMGPTAGYVRFSLVAIEKLLPHLERGLDLMGNDENDSALHAAGYMRPDELKRRIFDRLPDPKRIKDAPIGEIPNPVVKRAVVELRKVVNAIIREHGRPDAVHVEMTRDVRRSAKGRAAQTARMRENEADRDAAKKFLGDHGQRYGSRGSNILKVRMWSHQGHDCPYCGQKIGQSELFNDGLTEIDHILPYTKTLDDSQMNKVVCHRKCNADKGNQTPYEWLAARDPERYERVCQIAFSMMRSGKMPYQKYRRFTQKELVLDDFIARQLTATGYIAKATLQYIKCLFENEHAVLGLKGQLTAELRWQWGLNLNRLLRDDELNVKTRDDHRHHVVDAIVIALTDRSRLQKLSKIRKSGGTQKTGEVLAVPWDGFRDEVVDKLEMLDGATDERGNRRGISHRVQRKVAGGLHEETIYGPVHDRFGKRQEGTFVVRKALADISPNEIDKIRDDAIRGIIQERLAERDVEFGRGVKNNKKWKDTVKELFCNVSDPVRLPPSKKRLREDPNAMGIPIHKVRVLREEQTIQPIREDRAEKEGDPDLVAWVKPGATHHLCIFEFTIKGKKKRDAIFVTQLEAKNRIKRQSQELARQVKQWAEQGLSKGDIKRHKARAMREIAEKYPLIQRDATKLDGKDRECIPENAAFIMSLSQGELVLAQWKGEEKILKFKTAASTQGQIYFCGHTDARKSSEYKKYAANANTLNARKITIDPLGRVRWTSD

SEQ ID NO: 10312 - protein, 1044 aa, unidentified
  REGION 1..1044: note = Description of Unknown: Cas Enzyme sequence
MNIGKKFEKLNTAFELNDDIVLGLDIGIASCGWAWLDTTAKKIIAAGTFGFETPEVAKTRESKAAVRRVFRGQRRRLRRRRNRMRDIRQLLHKNGLLSTATPPIEGQPKPTINPWQMRAKGLQKKLDGDEFASALIHIAKHRGYRSNSKSEGAQDAPSEDKKALSGLAAILEKSARYETVGEMFALDEEFTSKKRNRAGEYTHTVFRHLHETEIGILFEKQRRFGSKFTDVTLEQEFATLAFDQLALGGSEDMLGRCPFEPKEFRASSLAFSFERFRFLSKLLHSRISDDSRSGRTLTREELAKAMNGFGKGAKAISWSRLVKQIGLPTGTGFVGVGDKGMKKDVARNSKGCAFGSNTLYNVLGEAAWNSLVKTPEVLDGIAHILTFQEDVDHISAKLGQLELSPSILDTLMAAVKQGKFAKFAKAGHISTKAARNILPGLLAGKVYSEACEFAGYDHTTENPAKLEAMTNPVAKRAVLETLKQVNALVRHFGQRPGAVHVELGRDMGKGPKERGQIKAGMDRRTAEKSVAKAAFCQLVGKDDCSFDELQRYELWKEQMHECMFCYPRSNIEPMALRHGQHVVEIEHILPIGRSQDNSWNNKVLACATCNRNKGAKTPFEWFGDDHGRWDEFSFRVKSLFGDGKIKGFKVRNLTMRDFDERAGGFIERNLNDLRYASKVILGELRHLYQPLETEGRKRLFARPGTVTGILRRLWGLQSTKYIKTGDNTEKRIEDERHHAIDAIVVAVCSEAVLQRLTKEMQHREMKSLPPLKIDDFQPPWSEFRQDVLNAREAIPVARTENRRARGAGHAATIRQIRIEDERRIVYERVAVDKLTHAKLDLLKDPERNQEVLDALFNWIAAGKPADQPPVRANGYKIKKVTLRAEKKPTTQRAGFTAHGGLVDNADMVRLDVFEKAKKFYLVPIYAHQVADKASWPKPPNRAITAHKSEDQWPVVDDTYTFKFSLYPFSWIECVSRKGEVFEGYYRGTNRSTGYIILSDEYSRQQQKGTGAKLLHTFKKFQVDRLGQKTEIKSETRTWHGEACT

SEQ ID NO: 10313 - protein, 933 aa, unidentified
  REGION 1..933: note = Description of Unknown: Cas Enzyme sequence
YDPWVLRAAGLDRVLADEEFACTLIHIAKHRGYRSNSKSEKATNAPSEDKKVLVGLASIEEKSGKYRTVGEMFAQGSMFQNKKRNKHGDYSLTVLRSLHEDEIKTLFKTQRRLGSSFANEDMEAKYAKLAFGQLPLQDSEKMLGSCPFEPDQYRASSLAYSFEKFRYLSKLNNIRLENDSKDGRLLTKNELSMAVGGFGKTAKISWTGLRKLLGLPNSAKFVGVGDKSMSTDMARAAKGCAYGSNALYKVLGEAAWNSLVKTPKILDLIAHELTFRDDITNIENGLQKLELEPSVFKAVMAGVNSGAFARFSKAGHISTKAARNILPGLLERVTYDKACTLAEYDHAKENIADLATLTNPVAKRAIVETLRQVNALVRHYGFRPGVIHIELGRDVGKGPDERGKILKGNERREVDRRKAKTAFCELVGKKDCSNGEVQRYELWKEQKHECMFCYPRKTIEPLDLCDGKHACEIEHILPRSRSHDNSWNNKVLACTKCNREKGRQTPFEWFGDNADRWNEFEFRVKAIYGEKLIKGFKIRNLLMKNFEERKEGFLARNLNDLRFAARVTKNELYGLFTDKELAGTRRILARPGTITGTLRYLWGLNRLKYLDVNGKKERIEDERHHAVDAMVVAACTEGRLQALTKAMQKQEDMYAAPLKRNSFPPPWGDFVTQVFAIHSGAPVARSENRRARGAGHAATIRQIRNEDGRRIIYERVAIDKLTKASLERLKDPDRNVDVYDNIFAWIAAGKPANNLPTRNNGHRIKKVTLRAEKNPKTQRAGFKAHGGLVDNADMVRVDVFTKGKKFYLVPIYAHQVADQKEWPVPPNRAIPTTTKPEHEWLCVDDSFGFKFSLYPFSWVETVNSKGEVKEGYYRGTGRSTASINLSEEYSRIQYINSIGCMRLHSFKKFQVDRLGNKTEIKSEARTWHGVVCT

SEQ ID NO: 10314 - protein, 1049 aa, unidentified
  REGION 1..1049: note = Description of Unknown: Cas Enzyme sequence
MAWRLGLDLGTNSLGWAALDLNNQGRPTGLIASGVRIFSDGRNPKDGSSLAVMRRLPRQQRRRRDRYLKRRSEFMERLIAHGLMPKDPAERKQLEKINPWNLRVRGLDEKLSLHELGRALFHLQQRRGFKSNRKTDKGADDETGKIKSASAKVKMAMKSAGARTLGEYLAKARIDDPKAAHEHPVRARLQGSGAKAFYDFYPTRDMIAAEFDTLWKVQKGFHNAALSDAARDALRDTLLFQRDLKAQLVGKCSLDPSQERAPHALPSVQRIRIYQEINNLKVRLPGEAEHNLTLEERDVLAAKALAHLKLPFDTARRLLKLPGDARFNTESERRKHLDGDKTAAVLAHKDRWGPEWRKIPAKTQEEIVERLLKEENEKTLVDWLMAEHNLSAEAAEKIANVPLSAGHGRLGRTATQRVLGELERAVITYDAAVVAAGYASHSDLDFDGEVFDALPYYGEALERHVAFGTGEPADPLEKRVGKIANPTVHVALNQLRRVVNTLIKALIKRYGRPTEIVVELARDLPLSAKGKSELKTLQSNNKKANDDRRKELEKLKLSDTYENRLRLRLWEELNPANPLARCCPYTGKQIGIERLFTDEVEIDHILPFSRTLDDGIGNKIISMRIANRVKGQKTPYEAFASSPDGFNWPEIAARAANLPNNKSWRFGPDAMERYDNEERDFLSRQLNETRYLSRLAKTYLLRTGADVWVTPGRLTSDLRWTWGLNSVLAGHNLEEAADPAKNRNDHRHHAIDAIVIALTDRGLLQAVATEAGRAEETFDKRLLAGLKEPWPNFREAVQTSINRITISHKPDHGIEGALHNDTAYGIVEPANKETKSLVVHRVPLSTLSKPANLEAIRDPIIREHLMAKTEGLSGKEFTDSLVKAGEAMRPPVRKVRILERLSVIPIKDKSGRAYKAYKGDANYCYDIFSGKNGRWDGEVVSQFAANQKGFDPSVKQSRDGIKLIMRLRGDDLIAIEDGGRKRLMRVVKFSKGQIALAEHCEAGPLKKRDKDKADTFKYLSKAPSGLQRLKARLVHVDPAGRVFDPGPPR

SEQ ID NO: 10315 - protein, 995 aa, unidentified
  REGION 1..995: note = Description of Unknown: Cas Enzyme sequence
GNYTFKVYPESERIQEWEEKRKKKPEWEGKEFRFLVTQKTKKSGKEYKITQLKPQLPTDDDWNLAMVTLDEELEKSGKEVGEFFFDKLVENKNYRIRQQVVKRGRYEKELRAIWEKQSEFHPELKSKDKLEEIARMLYPLQSENKLPKWTEITNGNLFDVISKDIIYYQRDLKSQKNLIDECRYEKKPTYTNKNGEEITPGYKVAPKSCPEFQEFRIWQDIHNLRVLLKEDEETGKVDVPLSDSLLTAEIKEKLYELFDGQEEVTQQQILKIVDTGFSNKTHKINLFANREKLKGNETKALFRKVFKKYDFDGEHLVNDKDKFQLLWHILYSINRKDAEKGIRKALTNPKNSFGDISEDVVTHLAEKTKEFSGQYAAYSRKAIKKLLPLMQCGNYWNEQGFSDELRERIDKFIDGEYDESIDDKNRDKIAKFGLDEIHKYQGLPLWAACYVVYGRHSERESDFKYKTWEEIDPMKIIPSNSLRNPIVEQVVRETMQVVKEVWKQYGRPDEIHIEMGRELKNNADRRKSIAESQTKNYNEKQRVKKILLELKAGNPNSPIDIEKFRTWKGNGGEEADNKFNELFDSKNLFVKDADIQKYRLWAEQNHRSPYTGKQIKLSDLFTENYEKEHIIPRSKLKYDAMANLVICEAAVNDFKGNRLAQVMINEDGGIVRRNEKLRSAVNLLSRDKYLQNCKSLDKRKRKNLTAEEVPDDFIERQINDTRHITRKLNELLWPVAKDKEGLIFTIGSITADLKQQWGINTVWKDLIKYRFERLGKILDKELIVNDEKDKNKYHFNKPDDKVDLKRIDHRHHAMDALVIAATTRAHINYLNALNSHEKREKWKYIAKEKIRDFHLPWQDFAKDAKDKLSEVIISHKYNNRVLSTPHNRYLKWEQQADGNWKKVLKKQKANTSWRAVKMAMFNENPQGTIYLKEPKPEKVVKAIKVQIERAKGVKDENGKPRDYIYDKHAREQIIKLVEQYSGDEDAIKKHLKKNP

SEQ ID NO: 10316 - protein, 1062 aa, unidentified
  REGION 1..1062: note = Description of Unknown: Cas Enzyme sequence
MTSIRYRLGLDVGSTSLGWWIWEEDVTGEVIRSVDGGVCIYSDSREPKTGTSKATARRVARGIRRRRDRYLKRRDRLMNQLVEFGLMPSNSSKRKELESLDPYKLRVRALDEQLQPFELGRALFHLNQRRGFKSNRVVDSATEQTEQGSIRSGISTLDKVLMDRKYRTIGEYLLSDHKSKKSVRFRPGVESYPSRKHYQDEFNFIRRIQEPLQHLPSEHWDALEQTIFFQRRLRPIEPGKCTLFPDENRAPWALPIAQQFRVFQEINSLQVIQIGERDRRLSTEERERAFHILSTQTKVRFESLRKKLNLRLDSRFNLEGETRNHLDGDKTAAILRKKENFGKSWDQLDLLEQTRTVKILLTRQREDEVIRILQEEQKLSKASARAISTLRLPKGYGNLSEYAMEAIVPHLKQGLLYHEAVTAAFPDRDHSQVDEHKKVDLLPYYPVLLDRHVSRGSNDPNDDLFKKLGKIANPTVHVGLNRIRRVVNAIVMQYGPPAKIAVELARDLKNSFEEKQKIKRRQAEERNKNERRREDLENCGRNPNPEYLRKIRLWEEQGPCHARCCPYCGRILSYEMVLDDRTQIDHILPFSRTLDDGLSNKVVCCNSCNQIKRNKTPFEAFGFSENDKFDYDKMLYRISSNWPKNKKWRFYPDAMARYEDEECGFLARQLNDTRYLSRITKTYLQFLCDSPTQVSVTPGHLTALIRGKWGLNFVLADSNYKDRTDHRHHAIDAAVISLIDRSMLQRVSSAAAAGVNVNRFLPNMPEPTKCRNFRDQIKDHALNHIFVVHRPRHVNTRQSANTTSGQLHNDTAFGIVNSSDSNVSFVGVRRLLLSDLNEAEGRKLLLGKAGPGERIRKTVRDESLRRQLLKVWLSFSERKQSWREFCEYVAKPGRVTKYGVRKLRYTEHKDSLIKIRDINGRVYKGFKPASNARMDIIRLPNGKYKGQCVSTFDANQERLEPERSRNHPEVKCVSHLFQNDLIAIGAGNNREILRVVKLAKSGRVCATHHYEGGKLDARDKDVNDPFKYIDMTAQRFVEAGLRKIKIDPIGKIYDPGPIITRA

SEQ ID NO: 10317 - protein, 1057 aa, unidentified
  REGION 1..1057: note = Description of Unknown: Cas Enzyme sequence
MNGLVFGIDQGIASCGWAVLRHPTPSDPTGEIRAMGSWMFDVPETDKERTPTNQIRRGNRLLRRVIRRRAQRMGEIRRLFAQHGLLAGQEPDALKRAGLDPWELRARGLDKLLSAAEFAVALGHIAKRRGFKSAKKGKEANAAPDDKKMLAAISDTKTKIARYGTVGALFARDPEFSARKRNRDGIYDRTVERIDLQDEVRTIFAAQRRLGNALATAELEEAFTTIAFRQKAPQDSEKLVGMCQFEQKEKRAAKFAPSFEKFRLLSKLVHLRITTPDGERPLSPEEIALAAADLGATAKLTVKTVRKRIGLPDHQRFTAIKPDDESQDIAARTGEAMHGTKKLRDALGDALWMKMQAQPEQLDRIAHVISFYETADMIATELRKLGLPSGAVDALLADLGAFSRFKGAGHISALAARSLIPHLEGGLRYDQACEAVGYDHAASRWSKREQVADKQAFNRLVEDMGQEIANPVARKSLTEGLKQLWAMRNRWGLPDAVHIEMARDVGNSLEKRNEIKRGIDKNTAERERQRGEVRELLNIEDVNGDTLLRYRLWKEQAGRCPYTDKAIPPTAIFATDNSYQVDHILPWSRFGDDSYSNKVLCTARSNQEKKGQTPFEWIMAAQGEEAWDTFVARIEGNSAFRGAKKRNYVLKNAKEAAERFRSRNLNDTRYACRLLAEAVKLFYPEGQRQEKDGERRVFTRPGGLTAALRHAWGVESLKKVDGKRVDDARHHALDALVVAAIGEWEVQRLTKSFQEWEQKGMARPLRQVDPPWGDAASFRREVKDAYDDVFVARPERRRARGEGHAATIRQVKERDGAQVVYERKAITDLSEKRLADIKDPERNQGVIEAIRQWIADGRPADKLPRSPAGDEIRKVRLRTKGKPAVQVRGGSADRGEMVRVDVFTMKSTKGKNVGRDEWYLVPIYPHQVMDKNRWPEPPMMAVASGKDEQSWFPITSAHEFKFSIYPRSFIEVVKSDGQILAGYFQGLNRALGAITLSNDKDTRKISDNDDNSMSNIGAKTLLTIKKYNVDRFGARSAVKSEVRTWHGVVCTFPIQPG

SEQ ID NO: 10318 - protein, 1028 aa, unidentified
  REGION 1..1028: note = Description of Unknown: Cas Enzyme sequence
VKYTLGLNLGISYTAFALVDKDNSKIIKSGVHRFRVAENPKTGASLSTPRREARSARRRLARRRMRLDGVLNLFKKNNFKDVERINEMPCKNSPTYNPLQLRSEGLERELTDLEFGIAIYHIAKFRGFKSSRLDGSSAEAEKLGKLLEGKEALKKDFTNSGSPTIGHFLYEKFKKDGIVKNKDGTYVMTCLRDILRDEVKLLCQRQIELGQPKITSELQEKLENIIFFQRPLKSITSKIGFCNIFPEVHRAVKNAFTSEEFVFWNKINNLRIGSDKTLRELTLEEKENVLSKALEVDKITFKQLRKLLKIDSDVPINLQRINDKETKTFIEFKGYSTLRKVFEKFDPNLWETIESNVDLLDYIAHVLSTHFDESKIVSELKAHPFLKELDATLIDSLCGITTFKGTVSLSLKAMKILLNYMRDGEMYYRALSIARETGAIPSFNQRELEILPPVKKTENPVVDRALSQARKLVNAIIRKYGLPEEIKIELGRDVGKSAKERRLVEKENKKKEEINNQAASALKDMGFENPSKDLIVKYKLWNEQNKICVYSGQEISVNDFMSVKTEISHIIPYGRSFDDSFSNKVLVFKEHNISKMNRTPKEFIQTKDLASFEERVKNIYAKNIYKQKKLLIENFDEKGLIARNINDGRWISSWFRNHLEQNLGSVNKVDSTNGMLTYTLRKSWLSNHIVYPHAHLAPASDAILIAFASPELENKITSYEQKKVFEVQRFNPLFDLPWESFHDDVQKSISEIQITHMPDRKYSGLHSKETLMSYRGDDYDKQSTRLFNQFTELESGQRISNIVKRIPLSSVTLESLNNMVDIKANKEIYDTIKERLTEFKNDPKKAFETPVYFKKKDGTIINTVKKISIYDDSIAVVPVRNGVACNGDLLRLDIFKSDEGYIVSPVYVNDFLAKKLPQTYLSNSLEYPLDPNWPFVITMHKNDYVELTSFKKSTNTLSIVRGFYNTFNRFGSSIQLLDIIEITQDMETGEIITNYYDDKRFGLKTLVNIQKYEMTLLGEKYLVKEKRN

SEQ ID NO: 10319 - protein, 1473 aa, unidentified
  REGION 1..1473: note = Description of Unknown: Cas Enzyme sequence
MKRVLGLDIGTNSIGWSLIEDNRDVFKGEILGLGSRIIPMTQDSIKDFNIGNSSSKTKDRTFSRGVRRLYQRDNLRRERLHRVLHILGFLPQHYADAIDFDKRLGQFKEHTEEKINYKKNEHGKYEFLFHDSYQEMLTDFRKHQPSLFYTKANGEESKIPYDWTIYYLRKKALTKAISKEELAWLILHFNQKRGYYQARGDEESDSNKEYVELEVKELIPTGEQVKGTEKYEVLFTNGWLYITPIKDTQNWIGRTKEFIVTSKKLKDGSIKRTYKAVDKKADWLAIKTKTEQDIEKFDGTVGTYIYDVLLQNPNQKVRGSLVKTIERKYYKEELAQLLATQIRLQPTLFTSALYDACLYELYPNNEAHRKNILSKGFNYFFVEDIIFYHRPLKSQKSNIANCPFEYTVYKQQDKENNTIQVQKPLKSVPKSHPLFQEFRLWQWLANLKIFAKEKIIDGKSAFDIDITAEVFSTEEDIENLFDYLMTKADISQDQMISYLIAQKKISKKDKDNYRWNYVQEKKYPCAETRASFINRLKKVNGIDPISFLAQKDTVGNQAMTKEEQLWHIIYSVTDFHEYKKALAKFAKKCAIDEQTFVQSFLKYPPFDSNYGSYSLKAIKKLISLMRVGKYWQQNQIHPETLGRIEKIINGEYDEKIRDRVREKTIALQQLEDFQGLPLWLASYVIYDRHAENTQQNTWTKAKDIEGFLEGFKQHSLRNPIVEQVVTETLRVVRDIWQYYGEGKKDFFDEIHVELGREMKNPADKRKKITDKVTENENTNYRIKKILEELKRDTSIEGDIRPYSSSQQEKLRVFEEGIIQNPNVAYGSVSEEDIDSIRKTLNPSATQINKYKLWLEQQYISPYTGKPIPLSKLFTKAYEIEHIIPQSRFFDNSLTNKVICETAVNSHKSNKTAYEYIKQNSGAIVDGHTLFTLEAYEEHVGEFFKKNINKRKNLLSEDVPEQFINRQLNDTRYISKYVMCLLKRIVQTPEEEQEAGSKNLIAVTGAVTAKLKKDWGLNDQWNEIISPRFKRLNQLTNSSDYGYWDEKIKAFRTQVPDQIAKGFTKKRIDHRHHALDALVIACTTRTHILYLHSLNNQKVKYELQPSLMVKNKEGHFTKRFLKPWDRFTVQAKEELQKVVVSFKQNTRVINKTTNYFWSYRDEEGKLNLSKDGKPMKKLRKQTKGDSWAIRKSLHKATVAGLVKKDEKGKNITFTRKSLSSIKSQKDIDKIVDKRIREVILPNHMQNYQSKDGKVNFGEAFSPEGIQNLNQNIVSFNKGKKHHPIYKVGVEETGSKFSIGTKANKASKYVEAAKDTNLFFAIYWNEQKKKRTYETVPLHEVIAHQKQVAHLPASDRIPIQPKAAYGTFLFTLSPNDLVYVPTDEELDNPSLVNFQDLLPEQVDRIYKMVSSTSNECYFIKNNVATLIKRYDKKSKIGEFGSMNKLEKTIEIESPYVIKERCWKLKVNRLGMIKKT

SEQ ID NO: 10320 - protein, 1158 aa, unidentified
  REGION 1..1158: note = Description of Unknown: Cas Enzyme sequence
NRLMKMYISKRKKKKRITATSRLLTPETDSPQLFDDLAAKKEIAEDSLFGLLKIKKAERPQYRWNYQQDEKKYPVFEVRNSFLLRLEKVKGFKKNKKDEGISALHFLMEKTSVGKKQTKEESREEQLWHIIYSVKNPHEYKKALLSFAKKHKLYYSELCLSSNEDKECFVSQFSNFPIFKSEYASLSLKAIKKLLPLMRKGKYSDAEAIDHVTLQRINHLVNGEEDDTIKQSLREKIQKEQLAKLEDFSGLGTWLAAYVVYGRHSEDADAKPWNSPSDITDYINAFKQHSLNNPIVEKILLETLRVVRDIWENYGKNEKGGYEKDFFEKINIELGREVKKTKKQRESITKRQAEEEKINRKIRTILRELSTSLAEDEQPNLTSGKHFERLKIYEDGVFNAEDLKFKSKAKKGYDESKEGFQEFKEIKTIRNKVEPTPKEVLRYRLWLDQKYVSPYTGVPIPLSKLFSKKYYDIDHILPKSRYYDDSMSNKVLCERDVNSPHKGARTAMAYIKEKGGEQASAHVGATLKVKEYEELIDKLFPEGSKKRENLLSEEVPESFIERQINDTRYINKLVLGLMRKLVQEEKGEEIIHKNVLSLTGKVTHKLKSDWGLPQVWDSLLTPRFERMGQILDKEGIPNELRVTDPETKKEKNVIPLKIDGKSKGVCKGKKRLDHRHHALDALVIACATPEHIRYLHTLDNKEEKYKLRSSLIKKDKKEQYTTVFIKPWKSFTEDCKKELEATVVSFKQNIRVISKSTNFYWSYKDNEGNINRNKEGKAVKKLRKQIKGNGLSIKKQLHEENPFGYVEIKEKEPLSLSKILEEEKIKDICEREIKDLIDQKVNEFDFDIKKVQKYFKDNPIVHNEREIKKIDVYCWTKNATAKRELLNVTFDKKKIKKITDSGIRKILLNHLKAEKYSHINEAERHKTAFNESGIRYMNEHITALNDGKFHHPIYKVRKYADGSKFPLVKGFELKNREEKKRAKFVGTASDNNLYVAVYVNEQNKRDVQVIPLKDVLQHQIKHAHLPMNEKTPFSMDSIKGEFLFSLSPYDLVYVPTDEEIASPHLIDFNELTPAQANNIYCFRRASGKTCYFLQQSIATLIKSQKNSVEGDSGKKTGEFESQDMISKTMDFENPLKIIDRCWKLEVDRLGKIKRPDRF

SEQ ID NO: 10321 - protein, 1050 aa, unidentified
  REGION 1..1050: note = Description of Unknown: Cas Enzyme sequence
CEAPTERVKGKLIKTIERKFYKQELLQILKKQAKFHEEFQDKNLLQQAIAELYPKNVAHRSVLQRKDLIHLLLNDILFYQRPLKSKKSTIGGCNYEFRTYIKTDKKGGKKVVKAPLQAIAKSHPLFEEFRLWQFLANLKIYDQEQADQEVTQDFLATDEAWEDLFQFLSTKKEVKQQLLIDHLLKSKYKKPTKEQKERYVWNYVADKTYPMMLTKAQIETRLSKIGKTKAIKSLLDFDNLVALWHIIYSVKDTEQFKTALGTFAKKHGIDKLLFVDTFKSFPPFTNDYAAYSEKAIKKLLPLMRRGASWNEEAISDEVKERISAITERLQSIAYDPKRIEEVADDDLPKGMLKSFIAFENRSPFKALSTYQACYAVYTRHSEAIDDKPWYKASNIDTFLENFKQHSLRNPIVEQVVGESLRVVRDIWKQYGNENERLFDEIHIELGREMKSDNATRERMSKKNAENEETNRRIRELLYEMKADSDYKNVIPHSPSQQQILKLYEEGVFNAPDPDDKKYQKLSSDEVKRIRKGEKTKVDVRKKDIQRYKLWLEQGYVSPYTGKVIPLSGLFTESYEIEHVIPRSRYFDDSMSNKVICETEVNRLKDAMTAYEFIEKHGGNEVKCDGKQVSILSVAKYEEQVNTYFKHNRVKLANLLSPDVPEGFITRQLNDTRYISKFIKGVLSNVVREQGEKEATSKNLIPINGAITSKLKQDWGLNDQWNALLVPRFERMNQITNSQDYGFFDPKINAFRIQVPDELRKNFNKKRIDHRHHALDAIVIACTTRKHVQYLNALNSKNEKMALQKGLLRKNDNGDYTKHFLAPSPNFAPVVKKALEGIVISFKQNLRVINKTNNKTWQWREKDGKYKKELVKQTKGTNWAIRKPLHKETYYGRIDYIPAPKGKVVSTEKLPLSGLTNKKKIESICDPHIRKLLERHLENYNQDGKLNFAEAFSELGVKTFNENITQYNQGKPHHPIYKVKTYEIGSNFAVSDNLQSAKSKKYVTTAEGTNLFFVVYWNEAKKKRVFETVPFREVVEHQKQEAHLPREQRTG

SEQ ID NO: 10322 - protein, 1025 aa, unidentified
  REGION 1..1025: note = Description of Unknown: Cas Enzyme sequence
MEKPREYILGLDLGAKSIGWAAVALKGRKPCGLIAAGVRVFDAGMEGDIASGNAESRNAERRDARQLRRQTDRRRRRIKNVFRILQEARLLPPGKPREVLEVKKGEIPSSLAHVFPYRLRARALDEKLEPYELGRALYHLAHRRGFLSNRKARKKDEDEGVVKKGIAELDEKMRSAGARTLGEYFAGLDPQTERIRNRYTSRAQYELEFEAIWDAQQKHYPALLTDELKNRLGKAIFYQRPLKSVAGLIGRCALEEDRRRAPWAICAAQRFRMHQMVLNTRLIFDGRETPLSDDQRSKLIEKLEHDGDLTFAKAKKALGFKSKDVSFNWEEGGEKRFTGNRTNAKLAAVFGERWWNMPEDDRNRIVEDLLTFEKEEPLIRRGMKKWGLSRDAAEKFAALELERGYCNLSRKAIEKLLPHMETGLSYPEAVIKVYGRFNREREKCAELPLVDDAMPALRNPVVHRILTELRKVVNALVREYGRPTKIRIELARDVKHSRKRRREITKRNRANETARKKAAELIAHEMNIANPSRDEVLKVLLADECCWTCPYTGKQISMDALFGANPQFDIEHIIPFSRSLDNSFFNKTLCHNEENRRVKGNRTPWEAYGSDPARFEEILERVRRFKGGAAREKLRRFLIEDIEDIDEFASRQLNDTRYASRLAMEYLGLLYGGLTDEDGNRRVEAGRGAVTALLRAGWDLNRILSRDGSKSRDDHRHHAVDAVVIALTEPGSIKMVSDAARSWSGAKVKLFDRLKEPWPGFWHNVFDAVAGMNVSRRPVRKASGALHEETYYSKFKKDADGRDCVHIRKSVVDAARNPKLIVDDKVREAVCRKLEEVGGNPKLLEMAGHEPFLESKGRRIPIRRVRMRCYQLPFTIGKGARERRVFPGANHHMELFAVLDAQGNQTAWEARMVSRFEAARRVRERKPLVDRDGGPDRKFLFSLSSGDLVEMDDKNGERALFAVRTVTERQKSGIAIEFSRATDARLKKDIIKTGDWFAKTPNKLRELHCQKVIVDPLGRVRRCNA

SEQ ID NO: 10323 - protein, 1155 aa, unidentified
  REGION 1..1155: note = Description of Unknown: Cas Enzyme sequence
MSNVLGLDLGVNSLGWAVVNPDKKEILDAGVRIFPAGVNEDTLGHDERELSRNAERRMHRMMRRTTWRRKLRKIKLLELLIEEGMCPLSQEELRKWKNWDPEGKSGKRAFPSSGDFTAWLRTNPYELRYRAIHGTITKEEFGRILYHMIQRRGFQSSRKGDSEEKGKIFEGERGISDLKAQLGDKTLGEFLYLKSHKDGEPYSFQHEKNTGYRLRNRYTLREMYVDEFARIWKKQAAHLGIANKEKQVIRRRYLQGSQQGKRNSEKIAALIHRYGENNVEIKGNLVISREKISLKELLAGKIRRKEGRIIYSSDQSILFWQRPLRSQKFLLGECRYERTILNENGKYLFRGRKPCPLSHPDYESFRAYQFLNNITYGTNHHLTAEQKEVVMNLLNKKEKIKFKEIPKALELTYEKFNYESDFQVKGNTTTKNLKCLFPDEIWEENKYAIWETFYFYNDNDLLFEKLKKDFRLISDDPEKIRKIHLEKDYGSLSLKAIRNILPYLKKGYNYSHAVILGGVRNVFGNRWEYFKEFHEEIEKNVMSIIFSGNSEGEMIERIKTFLSDPSNNFGFVKDDKRFLRLYHPSQEVVKKMKRPRLSPVDNLRNPIVQQGLNEMRRVVNALLEKFRNKYGKDFFFDSIHVEFARELKLSKEQRAGITRHIRSNEEKNKEARQRILEYGLRPSRENIQKYLLFHEIEERAGRVQCPYTGITININDLLGTDNRMQIEHILPYSISLDDSFANKTLCESNFNREKGELTPHKFYLENPDPKLWGAYSWEEIEQRAFRLLPYAKAKRFVTRRDLSEEKIREGFIERQLNDTRYISRKAASILTEICDDVRVMPGQVTAELRHLWGLNNILSETTLELSNRSGITDTPEPYRIVTDKNGKAVKVIRIKNDRPSKAADEFLLAGEVINGKFIFQEPGHDSRQWDAPGLSNGKYWMKIKMHTMTGIYPVFRKKPEGNEIMVVLSGTVTKGRFSNESLKKNIPTAVEDGKYWGTFPVISKSFSDGNKKPAPKGKKLYLVLFGHVSNRRFRSYIYETSTDLEDGAYWVTLELDPANTRFYPKANKVPQVGEEEILLTGTVNRSGTFVPDADKDFRWDTDENEGKYFTLFLLDKENREYFPMENPTPQTGRGEKILEGDLWVDHKTGEIRFDP

SEQ ID NO: 10324 - protein, 919 aa, unidentified
  REGION 1..919: note = Description of Unknown: Cas Enzyme sequence
MKSLGLDIGTNSVGSAWVDTDRKLIEMGVSVFPAGVEESETKRGAPKNQARRGYRGQRKNTKRRAERKQQMRLFLTQQGWIDPNEKKWMELNPWILRREGLKRELSPYEFGRVLLHLTQRRGAWWFDEVSEEDIQKDVEENVEETAQEEKDKEAKKIKGAINNTKEEMKKYNARTFGELMAMKFEEQRIGVGEKGKKIGMPIRNRTKASSEGTYEFCADREMIRDEFDKLWTTQKNFGGELAAQLTDDCLKKLDDQTEDATWRHRGILFGQRKTYWDIGTMGRCDLEPTDQKCPKADIYAQEFLVLETLNNITIIPPGEVKRHLNSDERKKVLMLLKTEESITENKVRKALGLHKGENKTLYTISLEKDPKRELNTWWFHRDIITGAIGESIWEGMSLNQKESINKAILKFDPANKKDIQTLLEGCQEWWNFDEEQAKRFIEAWKKRPKIDNRVNYSRKAIKNLLPYMREPYWLTVNEARQMFCEDASNGATKEQRELPPAPEDISNPVVIKAIHEVRDHIQAYIRKFGCKPDRVVVELVREARQSAIVRNKQLAENREREKERKKIIEKYKLSGLNKTQQKKACDRVLLCREQKFMCAYSGQTITEETAAKGDGVEIDHIIPGSRGGNSFLSNLLLCIDGTNRGKTNKTPKEWLTDDQFRGIEQRLRHLKKENKVKWDNLHREAPSIEEFAKSQLSDTAYASRQVANWLKAVLYDGEKDGKRKVFTTKGAYTPWLRRDWQLFPDGADADRWKKDRSDHRHHALDALAVALTDVERLKKLAYAVEAWELAKAEGKEPPKRKRLDPPWGTVESFRKQVMDKYKDMIVSHCAARRGLTGKLHKDEHFGAIPGDDKHFTKRIFAGELTTNHLRVPEGWEELRQKLENAKSISEKRLIRSQMLAIEDVEPGKSGIVRDRWFRE

SEQ ID NO: 10325 - protein, 1169 aa, unidentified
  REGION 1..1169: note = Description of Unknown: Cas Enzyme sequence
MYSKTLGLDIGTNSVGSAWVDTEKKTVKLGVSVFPAGIEQSDTKRGAPKNQARRRKRSQRRSITRRAERKHRMRTFLHKMAWMPRNEEDEKQWLEESNPWILRKLGLECKLTPMEFGRVLLHLAQRRGAYGFDVDEEDEDTGKIKQAISDTRKAMNEVGAETLGQLMAIKYQERTRQVGTKGKMIRAAIRNRTKGTGEGTYEFWADRDLIWQEFDKLWNKQKSFDGDLAAQLTEECRKELDNPQGDAAWRYKGILFGQRKTYWDKGTVSRCELEPTDMKCPKADMYAQEFLVLETVNNIRITPRGELERPLRKEEREKVIAALEKQKTASEATVRKALGLDKGANKTQYTFSLERDPQRTLNTNWFRREVVGGIGADAWESLTKEKRESVNSAIRKFDPSQKRDVLQLAGGCEKWWGFNEEQTERFIKAWKKRPKIDERVNYSRKALKNLLPYMRDGFTVNEARRLFAEDAENGAGLNQRERYSLGAKTGNRRMRQYGEKHPDLLPPAPDDLSNPVVRKAIHEVRRHMQAYIREFGCRPDRVVVELAREARQSAKVRNRQLANNRGREKERKAIINNPDFGLQGSTRSQRERGVKRVLLCREQRQRCAYCDDERDTISEKAAAEGNGVELDHIVPESRGGDSGTNNLVLCHTRCNRGKGNKTPKEWLTEEQFNRLERRFEHLKETRKWDNLHRDAPDLDGFVESQLTDTAYAARQVVSWLRDVLYDGEIDGVRRVFTTKGRYTSILRKDWGLFPDKRQEDAQKEQGKKNRADHRHHALDAVAIALSGPERLSQLARAAEKQELAKSEGYEYPKREPVEPPWGNLGSFRVDVMKAWKEVVVAQRPERRKITGPFHRDTHFGPVLDENGEFTGLSTVKKFAVELRPKHVRVPNGWEELREKLELSTSKTEQKRIVGEMFALEDVKPEMSGIVRDRWFREELRGYLRCNNLDPDNFTAKEIKELVKNKGIVLRSGVPVRRFTLLRAPTLVEIPRKRWNPETKKMEYERSRHSVRLYEPQNNHHIEIRQNKEGRWIGDVIRNFDAATRIRPPKNSALEPQPAVNRNDTEKGAFIMSLSIGEMVYMRHPETKEPGYFVVFKIDGTGTIHFTPHWDAGRARKSEKCPAREDVKFSGKKTGGLTAGQLQRLGIEDGKPPQKVCVGALGHVRALLKD

SEQ ID NO: 10326 - protein, 1038 aa, unidentified
  REGION 1..1038: note = Description of Unknown: Cas Enzyme sequence
MEQRSESIVLGLDLGSNSIGWALVAFEADTPQRIVRTGVRCFEAGVEGDIESGRDESRARKRREARLQRRQIWRRARRTAHVARLLQRAGLLPTGKIDTEEERLEFFTQLDRTISSRILSALPKGANRRRMAHVIPYHLRARALDERLDPHELGRALYHLAHRRGFLSNRRAPVKVDEEPGKVSAEIGELEERMEQAGARTLGEYLAGLDPEQERIRSRWTARRMYEEEFERIWESQSRFHSSLLTDQLKTELHQAIFYQRPLKSQKGLIGECELERGYRRAPKSSVEFQRFRFLQKVNDLEVISKQDGLVRPLEAEERETLISKLEEAEKMKFTEIRKLLGLRGTVFNFEHGGEKKLLGNGTVAAMIDVFGERWHDFSTADKERILEDVCSIQKDEVLKRRGMEVWGLDEDAAEKFSHTSLEEGYCNLSRRALRKILPELEKGRRYSEIVKELYGEPERPVLDWLPAVDKTDLALRNPAVHRALTELRKVVNSIIREHGKPDKIRIELARDLKQPRKERKYRSAQMRKNETARNEAKARILEETGLGQPSRTDILKVQLAEECNWQCPYTGRQINMGQLVGPEPQFDIEHIIPYHRCLDDSFVNKTLCYHEENRDVKKNQTPFEAYAETDRWDDILQRVRAFKGRMQHEKLRRFQLESLEEFEDFSERQLNDTRYVSTLAADYLALLYGGLWDKDRVRRIQASKGGITAQLRNAWGLNRILSDGPGKSRDDHRHHAVDALAIALAGPGTVKSLSEAAARCIEHGQRRWWNHVEPPWEGFLDDVRAAVDQIVVSHRVSRKVNGPLHEETYYGHKEGSEYVHVRKAVASLSKNDVGDIVDDMVRACVSRKLGGGDPKEVFKKSENHPFMIARDGRKIPIHRVRLRKRGSVNTIASGVRRRHVMTGSNHHVEIVEVTDIQGNRKWKGYVVSTYEAMRRLKAREPIVKRQHSGDERFLFSLAINECVRMRDDEGQAELYRTAGVSEYGTGQVVMDLTAVNDARQISKIPRKGRTKTPDTLRKLQCEKVMISPFGEVRWAND

SEQ ID NO: 10327 - protein, 1038 aa, unidentified
  REGION 1..1038: note = Description of Unknown: Cas Enzyme sequence
MKKPAEEHILGLDIGANSIGWALVAFEKGAAKRILRAGARCFEAGVEGDVASGRDESRAQKRREARLQRRQTERRARRIAKVARILQRAGLLPEGPIETSEQRLRFFTELDAKICSRYLQDRPKKDPERRRLAHVIPYNLRARALDERLEAHELGRALYHLAHRRGFLSNRRAPVKKDEKAGVVTEGITSLEQHMQEAGARTLGEYFAGLDPERQRIRERWTSRTMYEQEFEQIWEKQVEFYPGILTEELKRDLQHAIFYQRPLKSQKGRIGECQFEPGCRRAPTAMLEFQRFRMLQTINNLEIICLEDGLVRRLTQQERAKLIAELETKGDITFARARKVLGLRKSSYAFNLEQGGEKKLIGNKSAASLAKIFGSRWEDLSPSEREAVLEDVHSIQKEETLKRRAMQVWGLDGDGAEALSSVRLEDGYCNLSRKALRKILPELEKGRRYGEIVKELYPKLQRRAVECLPSVERSGIILRNPAVHRALTELRKVMNAIVREHGKPDKIRIELARDLRQPRKERKRRTGEMRKNQAAREAAKRRILEEMGDPSPSRTDILKVQLADECNWQCPYTGLQISWAKLLGSEPQFDIEHIIPYHRSLDDSFVNKTLCDITENRNVKKNRTPFEAYGATDRWDDIVERVKAFKGGLAREKFRRFRLQDLSEFEDFSTRLLNDTRYVSTLAADYLALLYGGLSDTEGVRRIQATKGGITAQLRNAWKLNALLGDGPGKSRDDHRHHAVDAIVVALTDPGTVKNLGKAAQRSIEKGKRRWWNYVDLPWEGFLEEAKQVIDSIIVSHRVSRKVTGPLHDETYYAHKRGSEYVHVRKAVQSLSKNDVNDIVDDKVRESVQDILGDGDPKKVFASAEDHPVLHARDGREIPIHRVRIRKKASVQTIAKGVRQRHVLTGSNHHVEIVEVSDRNGKPRWKGYVVTTFEAMRRLRAREPVVKRDHGNVKQFLFSLTQGDVMRIGSEDGQPAYVKVLTFWLQAGEARLQVRALSDGRPTTQDRGRSYMVTKLGKLQCSKVSVTPLGEVRRAND

SEQ ID NO: 10328 - protein, 1312 aa, unidentified
  REGION 1..1312: note = Description of Unknown: Cas Enzyme sequence
TSFEAFLNQRREAGIRIGAFEEWMAALGQKTPKFDNRIIVHCALIPRLHVCKVTPRWRQNRNGCKELDPRSLLAAEVTFLLQLKNLQVDDASTDTVRYLKTEELNEWLDRVREKAASVPFSETWERDVLGCFRITKAEWRRWCLSKNLLPTALGRSEAALAMGQKEEPLAEAVSEAEQVGPKPHSKSEDVVKAPRPTGRSRFSRPALAILRYLLLHREKPQDLAARLQNRDAALLNELGFEVLDTAPIEERPAGNGKKLKLYRQQPRTWLLAEDLEFLNHVWKATDGDGNPRDFEPYQLRIPDMALRNLRHKCELTKTPYSELLRQNSDELKRRDKAIAELIREQKNPVVRDRLTRFWQRLKHFQNPIAIPDSKKQQPGLGLTEPESLVLEFVRDDADNSLEGRKRIEAIQQALRENEQRREKAREKLAKCGLPTTDDMVVRWLLLDAQGPACIYTNKPIGCADLPNLQIEHIVPRSLGGPDAFWNWVLCDEEANAEKGDRIPYVWFKEERTDAEWADYKRRVLARAAKLGRRKVDLLLRPDAAELVGEKYTALAESAWIARLAQSITRLHFGWPLDDEPGKERVITISGALTARIRRKYLLDSLLGADNEAENLRRKIDSALDELEALRTDKSRSEELRQRLATLAAESKKNRHDQRHHALDAMLLTFLPNWARDRNKEDFFRFPRKIGDNALYAEEDQSNVAKIRSEQARLYQENKPVFREIKQARVAGDLDRMQQLKASVFPARKRIADLYRALDKLKQPRNIRAVRKWFRAQLEGGPSTAAGPVLPKTIARKRAPIEATLYRRVYLIHRDQTERGLLPLPELALAPNPPNPQERAFDLKWLRARIQSIADHRSYDRKKLQNVLSIKLEAALAACRSAGRPFGQKDWQEVCSDSETAACFRPVGRRREKRSPKPSECLVKVCKVEVLPATRYQLMELGYVSSRNYVWNPEYLEQTAQRILRKDETQAQRRGRRPTAAPAPSPPASVDALPWPGFLEDRELQAKLTSPEFRQAVQQQLAPYLLPPKPTRMSQAERKDWAAREAQWKKALERFSQTHNLPKRFYLFTSESDRPPRRPNASLVSVLFEPKEKVFSREGLAKQAKSVVDVQLRQCLESFADSLGQITDPRQQEQAWRDYCDVVRVVPKRALEAFTREHPTPGPQQWIAFFKSATGPRILFVTQTVGASLAEYTDLSKDGCGAFARGGNKGYWLCQQGEAIKARPIRYFETAWAVKRRLLKQGWKLLDTKPWRTGDLLHLPETTQTKTRTVPAGYYFLGSFSNDRNANLKPCFGGDVPQSVSLKTLWNRGLRRC

SEQ ID NO: 10329 - protein, 1105 aa, unidentified
  REGION 1..1105: note = Description of Unknown: Cas Enzyme sequence
MKILGLDIGTNSVGSAWVDMDSKKIQLGVSVFPAGVEESEEKRGAPRNQHRRDMRSQRRTIQRHAELKHRMRKFLLSRGWIPSDQEEEKKWRENERNNPWKLRREALERELTPCEFGRILLHLAQRRGAYGFNNEFEDKESEDMAGEKSKDEKDKEEGKIKEAIDHTRKEMKKVGARTYGEMIAIEYEQRRKSVGKKNKHIRMAIRNRKNAAGEDVYEFCADRDLLREEFDSIWKTQQSFKGALAKQLTEDCRKELYDHTEDRTWRCKGILFGQRKTYWDAGTLGRCDLEPTERGCPKADMYAQEYLVLETVNNITIIPPGEMKRRLEEPERQAVIEILHKQKTATAATVRKVLGLHRGAAKTQYALSLDADPKRSLNTSWFYREVISAIGKEQWEEMTEKQKESINQAILKHDPKSAKDQKKLREGCKAWWGMNGEKTQKFILAWQNRPKTDERLNYSRSAILNLLLYMRKGMNPNEARVCFSADSDSGASDIQRMRYGFGTKAGNRALRHYQEKHPELLPPAPMLSNPVVRKTIHEVRNHIQAYMRKFGCKPDRVFVELTREGRQSAKIRNQQLAKNRKREKERNEIIELYDLAGLTKTQQNKAIRRVLLCREQRSVSAYSDRSITEKIASKGDNLEIDHIIPESRGGENYLNNRVLCFSDENRGKGNKTPKEWMTPEEFGHMEQRLGHLKKENPVKWENLHKDAPDIQEFAQSQLTDTAYASTQVADWLNEALYGGESGSKRKVFTTKGRYTSWLRRDWKLFSSNGKGYVKKDRSDHRHHALDALAIACSTPERLQELAHAIEAWELAKSEGYDFPKRKPLSPPWGDFESFRKQVMEKYDKLIVSHRAARRRLAGFLHKDTQYGPVDIKKSLFTSRISAVQLKSNHLKVPKGWEELRKQLEECTSKSGRKLIRKKMLDIKDVTPGKSGIVRDRWLREELRSYLRKNNLDPDLFTYKQIKEFVKSQGIFLESGVPIRRITLLRIFREAVKFPRKRLNLTTEYMEDETEERSLRVYESRNNHHIEIRENAKGIWKGEVITNYDATIRVKPVKKSGAAPQSIVSRNDTKEGQFIMSLSIGEMAYMLHPKTEEPGYFVVFKIDNSG

SEQ ID NO: 10330 - protein, 1018 aa, unidentified
  REGION 1..1018: note = Description of Unknown: Cas Enzyme sequence
MVIVVQLSREKSQKILSFFEGGNMTGYILGLDIGSNSVGWVLLDVEGERIVDAGVRVFQEGVDRDTKGAEVSRNTTRRMARMARRTRKRRNYRKDKLFRMLVRHGLLPENKEELQKVFDMDPYMLRAKGLDEKLAPYEFGRVLYHLNQRRGFLSNRKSGKSKDDGVVKKSATELAQAMEASESRTLGEHFSRVNPHEKRIRGHYTFRAMYETEFDALWAKQQSCYPDLLNDPLKKAIKDETIFFQRPLRWDPETIGDCELEPGEKRCPRADWHARRFRILQTVNNLKLYNPDGTEGDLSEHRETIIGELCNRKEVSFDSLRKKLGLIESQIFNFEEGAAEKAKAKLQGDEFVPQFKKAIGAKAFKEFDDTDIIEINDALIDDNIADDELAAKLIQHYGFTEEQATGVVNISLPSGYTNFSRLALQKLLPKMEAGLRTDKAIEVVYGKPQAVGETKKCDRLGPVPELRNPIVMKALWEVRKVVNAIVREYGTPRKIKVEMARDVKGSAKERKEIRLKQWKNEQEKKRAEEELKAMGIRSPSFNDRLKFKLWEECGKECPYTGKPISQYQLFGEHPEFQIEHILPFSRSLDDSYMNKTLCHVNENVRKGNETPYEYYAGKHPDRWEQILQRIKRLPFPKRRRFWQKDVLLDSFIERQLNDARYISREVVKYLKQLGCIVMGTKGQITSELRHQWGLNSILDYTGAGLKNRDDHRHHAVDAAVTAVTEQKHLRGLAASKYDKAGIEFAEPWEGFREQLAEKVNGINVSHRVTRKVSGQLHEETSYGPTGLRDEKGQDIFVYRKPLEALTLTMVDKIVDPVVHEIVCERLREFGIDPDGKSKISKEVWKEPLYMKSKSGKGPRIKKVRIRDVFNNMIYLKDNEGKAYRAVAPGNNHHIEIFEYKDKKGNTKRAGRVVTMYEAVRRSVNGEPVIRRDYGDGKRFVCSLAKNEMFMLEVGDGKHVLHRVQKLIQDGRIVLRPHTYAGKISGSDNPPIVQRKNYNTLKGYKVTVDPIGRIHRAND

SEQ ID NO: 10331 - protein, 912 aa, unidentified
  REGION 1..912: note = Description of Unknown: Cas Enzyme sequence
MPKILGLDLGTNSIGWALIDDRQNKIIDSGVRIFQEGINRNTTGSEVSKNKDRRDARGARRMNARYKMRRDMLIEALQELNMFPQDGADHFFQIDPYQTRAKGLDEKLSLFELGRALFHLNQRRGFKSNRKTTSKEDGTIFKGSDDKIGIDEARKELKEHFRTLGEYLASLDPHSRRRRNRYTLRVWYEEEFNKLWEQQKQYYPDILTDENKENLFSIIFFQRPLKSQKHLVGMCTFEKKKRCSPKSSPVFQYFRILEQINRIRITTDERTNEPLNENERSIVINKLQSAKELNFKQMVKLLDLPDDTRINLDTEKLLGNITYYEILQIFGKERYSKLCEEDKYTIWHTIHFANDDDWLRNYARNKWQLDEKSVDRLMKTTMESGPNNGYARLSHKAMKKIIPELEQGMRYDQAAWAAGYHHSEVDKIEELQEFLDDPENIRNPIVQQSLYQLKKVVNTLIHEYGKPDIIRVELARELKASKQQRDKMRIENKIRQKEAEKIRERLSQEFGFSKPSRDDVIKFLLFEECSRRDPYSGDVISVAALFSGEYEIEHIIPYSRSLDDSFANKTLCRKDYNNKKGNKTPYEAFGATPEYELMLNRVKKFKGKYAFGKLRKFTIKDADKELEDFVARQLNDTAYISREARKYLQTICKKVQVAKGGATAKLRYLWGLNSILSGDIEIKTRDDHRHHAVDALVVANITPHMLHKLSSYHKYNYSDKTAITEHRFPMPWDHFHEQAQKSINDILVSFHCRNRVRGKLHEETNYGQIIDPETGEKVYVVRKKIESITAKMITNIVNKETRNLILNRLREFGVDTLKKFKIPKEAFAEPILHPKTGHQIKSVRVKIPSSNMIALYGEDRKLFVESGSNHHIEIFANPDNSKKVGYIVTLYEAIQRKRKGKPIVNTSPIDKE

SEQ ID NO: 10332 - protein, 940 aa, unidentified
  REGION 1..940: note = Description of Unknown: Cas Enzyme sequence
TSFEAFLNQRREAGIRIGAFEEWMAALGQKTPKFDNRILAPCVLIPRYHTCKVQPRLEKDETGKLTGKLVPESLLACEVTFLLKLKNLLVADAAKGQRKLTVEEVRDIFAFAQRRLRNLVLLSSEGEPVKEWPKKVANCFAIKRSDWSRIAKEAECLKRLAHFTVQEHGAARPLTSEEAEALLHAVAGRGRAGHIALPSHLHPLVKAATAVWKEATQASEAKILRPLPGHEEVRAPRTSGRSAYSRVALRILKELILSGQAPSAFHARLARREPELLARLGPAPNKPLALFNDSTAAEKRQRELENTANRKRGLLISELGFLLQMRKDDRSPDSWENLFIPAQTLEALQQKHTEDGRLDADAAVRELLGTIKDPVVRHRLGLFDERLKKLQVGDPRENLPGFGVPDAIVLEFVREDFMGEKAKRELQSFLKRRERARTEAETEARKLGLASRSAGLRYELFKAQGGICLYTGKPLSETQLDQYEIDHIVPRSLGGPDAMVNYVLTFPEVNSRKEKGKLTPYAYVLLHGTEGWDAYVARVEARAATLRNKKVQLLTREDAPELVERYTALAETAWISKLAQTIVNLRFGWRNGVDYSGPQPVKRVTVVSGGLTARVRRKYSLDKLLYGENTQPEVLAKKIKNREDDRHHALDAMVMTFIPHWARDPRKEGFFRFPPEFRDADGREDHQRIRSFFAERLQQIVPRPVAYEPSVLADTIYGRRLENGRSVIVQRVSLRELAYKQEQQRPVFNLRYAKGQIDHVRDARIRRVLEEFIESGPDQTAWDNFCRSLAKGACAELAGRKVLKVTLNRDEEPKEFKDLSKDASGAYRTRKGGHRGQFVYVNERGRVCVRPVRPFESLAAVKAEVQRLADGGRLVGFFQSMCLVELKRRVTHGELEFHPGVYRLNTITQDGRARISNVSGEKSPKITLEKLVAAGFRRKA

SEQ ID NO: 10333 - protein, 1028 aa, unidentified
  REGION 1..1028: note = Description of Unknown: Cas Enzyme sequence
MGKTILGLDLGSNSLGWALLEEIDGQASSIVDIGSRIFTKAVEEKVPTPKNQKRRDMRLGRRVLQRRARRKQRMLNYLVSLNLLSNELQRNFQPEIILNDLGDPYSLRAKALDHQLTPHEFGRVLLHFVARRGFLSTKKQVAGDLVDDPDMLAYLNEIEIDDAPSVDKEEGAFKADITELRKAIETSGARTLGEYLYKLERGECKRNRSHDGGHLRTDRAMYKNELSLIWEKQKHYFANLPDDFMAKNKGIHQIIFYQRPLKLRKDRVGSCSLEPQKNRAPMARLEVQRFRYLQDINNLQYFERQTECWLGITDVDKKKLAFYFENNSKVTVSLLKKELGLDRPTKINLETKNLKGNITACEIRAVIGGRWDDYSNQEQLSLVEDLLTIKKKSALKTRLLKHWGLNSGDVIQLCLLEFEPGHSSHSLKALNKLLPYLEEGFLYSEARIKAGYGYEVEQIESQGTLGAPEETSNPIVNKGLHELKRVVNAIIKQYGKPDCIRIEMARDLEMNTKRYKENEKRQAKNKKANEIAVDAYKGLKLGSYPSHDDKIKYRLWEEQSHRCAYSNKTIQLNTIFTAEVEIDHILPFKKSLDDSYMNKVLCFTAENRNKGDKTPIDAWRGNTDKWNQITQAISQWKGLDSKVNRFYQAEKDLQERDFISSQLNDTRYIAKLAQDYVRQLGCDVSVTKGFVVSQIRHQWGFNDLLGETNKKERTDHRHHAIDAVVIAATSRNLYKKAVAQIKHNKLKIPAPYPNFREELQERLKHTVVSHASQRKLSGALHEETGAGYIERHGGLVYRKNLTPDFTVKNAMNIVDSTVQGIVLSHLENYGNNSKKAFAVGETVFHKDGSTPIKRVRVLQSKTTVKKLEENKVGIKDKAGNVFKYMSYGNMHHVEILQNKETSKYRGEFVTMMQASHRAKGIQSRLNLDGRKKPLVQTLHGDDWVFVMALHINDLVSRLTEGGDRMFYRVQKLDAGGKRFILREHHASTLQNKDEELYVSINLDQFTGYGLKRHQMNAIGVIADDKANN

SEQ ID NO: 10334 - protein, 999 aa, unidentified
  REGION 1..999: note = Description of Unknown: Cas Enzyme sequence
MAQYTLGLDIGSNSVGWALLDTKKGNVIDAGVRIFQEGVDRDTGGTEISKNQARRIARGTRRNRQRRNYRKDKLTRMFRRHGLFPQSETELSELMDTDPYILRAQALEQKLSLFEIGRIFYHINQRRGFLSNRKTGKQNEDGVVVKGANEIQQAIDAGNFQTLGAYFASVDTNVSRIRGHYTFRSMYEDEFERLWSKQSGFHPNILTDELKKQIKDQTIFFQRPLKWDPETIGNCELEPEEKHCPRADFFARRFRIWQNVNNLKINNPDGTQHELTPDQRDTVLNELFQKKEITYDALRKKLGLLETQTFNFEENSNNAKTKMKGDEFVAQLKSKKVLGPKTLKTLGQADIIDINDALIYHEDSDEQLTSWLMEQYDFSQTQAEAVVNISLPQKYANFSRLALQKLIPHMEKGLRTDQAVKQVYGQSQPTKKLEITDALTPPEDLRNPIVNRALWEVRKVVNALIRQYGKPTHIFVEMARDVKGSKKERDEIRFKQSKLNKENDHARDFLIYDMKITKPSRDDIIKYKLWTECGRICPYTGKSISQTALFGEHPEFQVEHIIPYSRCLDDSYMNKTLCHVDENRRKGNQTPYEFYKDSEQFEQVLQRIASLPYPKRRRFQTKEVDLDKFIERQLNDTRYITKKIVEYLKTIGVIVKGTRGQITSELRHQWGLNSILDYTGPGLKNREDHRHHAIDAAVVAVTNNEHLRRLAVSKYDRSGTEFDPPWPNFREQLLQKINDINVSHRVTRKVSGQLHEETNYGPTGLKDEKGQDIFVYRKPVEALTLAMVPKIVDPVVRQIVSARLEEFGLVPGGKGKISKEVWQQPLYMKANDSKGPQIKKVRIRDVFNNMIYIKDTSGKPYRAVAPGSNHHIEILEYSDKKGKTKRDAVVVSLYAAVQRSRKGLPVIQTDHGPDKQFICSLAKNESFMLETEKGLHVLHRIQKLTQSGNSISIILRPHTFAGVVKDTDQPPIIQRRSPNTLKGYKATVDPIGRVFPAND

SEQ ID NO: 10335 - protein, 1208 aa, unidentified
  REGION 1..1208: note = Description of Unknown: Cas Enzyme sequence
MKLLGLDIGTNSVGSAWIDTEKKIIKLGVSVFPAGVEESGDKRGEPKNQARRAQRQQRRSIERRARLKRRLRQYLVKKNWIPTEKERLQKWENLNPWLLRRDAVRKELETDDNFSSEEKFGRILLHLAQRRGAWWFDEEPEETEGTKRKKKDPTEIPGTVEYTKGIMKQKGAETFGELIAIEYESRTTSTKNKRTRNDRVLNRADAFGEKVSEFVADRHIILAEFKKLWETQRRFGGVLAKQLTDDCRIELYNPQKTNTWRCQGELFSQRKAYWNLGTLGRCDLEPTDMKCPKADMYAQEFLVLTSVNNVRITARTEASRKLAPEERGEVVNAVRKQKTASEGTIRKALRIDKGANKTHYTLNTDEDKFTVNGDWFYSQIVCGVFGEDAWRKFDINTRESVNRAILKFDPSEDADVEKLTSGCRTWWKLDEEQAKKFIAAWQKRPKIDSRVNLSRKAIKKLLPYLRDGWSVTEARDMYAEDASHDADAPTRSRYSTREVVVNKRIKHYQGKHPGLLPPVSEGISNPVARKSIHEVRRHLMEYISKYGKPDRVGIELARKARQSERVVARRIQKNKAIDALKSEIIEKHNLKGGNITSTQRGRAVERVRLCRQQRYVCAYSGLNEEPEKYACAYSGKAITEAQAVRGEGLEVDHIVPRSKGGDNGMGNLVLCYASANQGKGSRTPIDWLSKEDFGQLEQRFKHLQKTDKGKRIITKDTVDMVDSAKWKNLHRRTPKEGFTEEQLRSNVYAATQTSDWIKKVLYGREDKDKRYVFGSGGQYTGILRRDWGLFFDEDGERSEKGRKNRGDHRHHAIDAAVIAVTAQNLAKIKQSFVDFEEQQENKRIKPEWKTVDQPWDGFSEQLAEEYGKLKVAHRAYNRQIAGHLHKDTLYGPAVIYETHKKDDERKGIRKGDLKRDKDGKRILKEGMYIKAIPAIGIKQNHLRMPADWDRLKREFENATIESERRAVRRKMMALEDVAPGKSGIVRDTELRDKIRDWLEENNFADMDKAKAYLKENGLIINGTPVRKVRLLWKLKGVREIRRKGFDYENSSPEAQRKSLRVYQTQNNHHIEIREKVNKKGEVKWSGDVVTNFDAAERTRRNNEPIVDKSESKKGKFVMSLSRGEIVHMRHPETRQPNYFVVFKIDKAIHFTPQTDANPARSKKKDVNPREEVGLPPNALREAMIFTEDGVPEKVEISPLGEVKILAND

SEQ ID NO: 10336 - protein, 1169 aa, unidentified
  REGION 1..1169: note = Description of Unknown: Cas Enzyme sequence
MKLLGLDIGTNSVGSAWVDTDKHLIKMGDGVFPAGVEESETKRGSPKNQARRRYRGQRKNIERRAERKHQLQRFLLDKRWMPNTNEEQKKWLETNPWFLRKEGLKRELRCDEFGRILLHLAQRRGAYGFDIEEEEEDTGKIKEAISHTRDEMKKCNAKTFGELIAIKFEERRKKVGKKNKRIGMAIRNRTKSSGEGTYEFCADRNLIWDEFDKLWLKQKSFGGEFARQLTDKCREELDNPKGNETWRYKGILFGQRKTYWDVGTMARCDLEPTDMKCPRADMYAQEFLVLETVNNIRITPRGELKRPLNKEEREKVMAVLEKQKTASEATIRKSLGIDRGDKKTAHTLSLEKDPKRGLNTNWFRREVIEAIGEDKWENMEDGKRESVNKAILKHDPQDERNEKQLKDGCKKWWGFNDGQTDRFVKAWKGRSKVDDRVNYSRKAIKNLLPYMHEIPWPTVNEARKLFAEDATNGASDEQRERYAFGAKAANRLTRRYIEKHPDLLPPAPEDISNPVVRKAIHEVRRHIQAYIREFGRKPERVVVELVRQARQSAFVRNKQLAQNRAREDQRKKTIEEIRKYVDWEGLSKTQQTKAIKRVLLCKEQRYHCAYCGDERDTITEIVAAKGVSVELDHIVPESRGGDNGLNNLVVCHTKCNRGKLNRTPSEWLTDGQFRELELRLGHLKHESKTKWDNLHKKVSDLDGFVESQLTDTAYASRQVVGWLEKTLYGDKDDGKRHVFTTKGRYTAILRRDWGLFPDKKDGEKEGEKNRADHRNHVIDALVIALSGPERLSQLARAAEAVENEKVPKREPIAPPWGDFDSFRADVMREWKKIVVAHRPEKRKITGALHNDTQFGPVVDRDGNLTGEFTIRKFAVGLKPNHLQVSKGWEEFRAKLEKEQSKAEQRSIRSQMLEQPDVAGGKSGLVRDRWFREELRSTLRREGLDPDNFSIKQIKNLVKNKGLILESGVPVRRVTLVRRPTVTPPIKRKQWNAKTGQMERDRNPRSKRYYEPQNNHHIEIRENKKGKWFGEVITNFDAAKSVRIKPPKLKPKGWTPPPAVNREDTAKGRFIMSLSIGEMIYMKHPETEEPDYFVVFKIDGNGTIHFTPHWDGGKDKATEKCPAREDIKKLGSKTGGLKPSDIQNFGVEESKKPQKVWVGPLGEVKILERD

SEQ ID NO: 10337 - protein, 991 aa, unidentified
  REGION 1..991: note = Description of Unknown: Cas Enzyme sequence
MKSYTLGLDIGSNSIGWALLNDRGKAGIVDIGVRVFPEGVDRDTKGAEKSKNATRREARGARRIHRRRNFRRDILVKRLQTAGVLPKDKQQLKELLKKEPYKLRAMGLDEKLDLFNFGRVLFHLNQRRGFKSNRKTGKANENNKIAKAAGELQQKIDKAGCRTLGEYFAGLNPEENRIREQYTFRQMYEKEFDRLWKKQAEYYPEILTKELGNKIRDEIIFYQRPLKPTDNLIGDCDLEEGEKRCPRGDWYARRFRILQDVNNLKLQNPDGSEGKLTGEQRKTIIEVLEKRKELKFNDMRKKLNLMEMQEFNLEQGGKVKSLKGDVFSFAMRSKNLFGPKVWDTMDEAEKIKINEWLVDLDDDELIENMKSEYDLNDEQIDRVLKVPLPQRYMSFSRKAIRKLLPLMEEGKRTDEVLVKVYPDRNKKDIEEKDKLDLPEDLRNPIVNKALFEVRKVVNAIVREYGKPKKIKIEMARDIKGSRQEREQLQFKMRENERRNEETRKRLIEDIGIRNPSRDDVIKYNLWEECGCTCPYTGKHISQSGLFSDNPEFQIEHILPYERSLDDSYMNKTLCDVYENIHVKGNQTPFEAYNSDSEKYEQIKQRIKVLPWPKRRKFLQEKIELDECIGRELNDTRYISKEVVKYLKQLGVNVTGTRGKITAELRHQWGLNNILDLSGSDMKNRDDHRHHTIDAAVVGVTRNEHLRRLAKSKYAKTGTGLKFEPPWKDFREELAEKVKHINVSHRVSRKVSGQLHEDTAYGITGLKDKKGQDVYVSRKKLEDLTAAMIKKIVDPEVQRIVTKRLLSYGFDPAKNSGKPPKEVWNKTLYMTTIKSKKKVPIKKVRIHNVFSNMIELKDKNGKPYRAVSPGNNHHVEILEYRDLKGRTKREGKVVSLFEAVSRLRKRRPVVKKEHGADKKFICSLCKGDMFMFEKNSEEAILCRIQEIWESTNIVLRPHTNATESVDINKTASKLRGHKVTVDPLGRVRRAND

SEQ ID NO: 10338 - protein, 992 aa, unidentified
  REGION 1..992: note = Description of Unknown: Cas Enzyme sequence
MGSYTLGLDIGSNSIGWTVLSRGKKASIVDIGVRVFPEGVDRDTKGAEKPKNATRREARGARRNRSRRNRRRDELVKTLRASGLLPENKQELNNLFQEDPYQFRAKGLDERLELCEFGRALFHINQRRGFKSNRKTGKAKEEGKVAKEAEGLQQKIVEASCRTLGEYFAKVNPEEHRIREQYTFRSMYEEEFDKLWDKQSEYYPQTLTEELRKKIRDEIIFYQRPLKPSDQLIGECELEQGEKRCPRGDWYARRFRILQDINNLKIYNADGSESNLTDEQRQVLLEELSKKKEMKFDAIRKKLGLLKTQEFNLEQDGKVKSLKGDVFAAAMRSKKLFGPKVWDAMDEPKKIELNNAVLELDDDELLEKMINEYGFTEEQADRVLKISLPQRYMSFSRKAIKKLLPLMEEGKRTDEALDDVYTDRNKSTVDEEQEKLDLPDDLRNPIVNKALFEVRKVVNAIVREYGEPKEIKIEMARDIKGSARERKELHFKMLKNKKRNEEARERLMQYMNILNPSRGDIIKYKLWEECGKKCPYTGKSISQTALFGPNPSFQIEHILPYNRSLDDSFMNKTLCDVYENIHVKGNKTPYEAYSHNEKKYEQIKQCIKVLPWPKRRKFLQKEVNLDECISRELNDTRYICKEVIRYLKQLGVNVRGTKGKITAELRHQWGLNNILNLAGPDMKNRDDHRHHAIDAAVVAVTKNEHLRRLAESKYSKVGGSFPEPWPDFREELEEKVKHINVSHRVVRKVSGPLHKETSYGLTRLKDDKGQDVFVYRKKLEDLTIPMVAKIVDPVVRQIVKDRLLESGIDPEKGNKISREVWNEPLYMKNTKSNKQVPIKKVRVWGVFNKMILLKDKAGKPYRAVAPGSNHHVEIFEYTDGDKRGQRNCEVVTMFEAVRRNRDGEPVVQRNHGPGTRFVCSLAINDMVMMRNTNGEMDLYRVQKMDANKMVRFRHHVAAKIDKKETYIDKTAHLFVGYKVTVDPLGRIHRAND

SEQ ID NO: 10339 - protein, 1215 aa, unidentified
  REGION 1..1215: note = Description of Unknown: Cas Enzyme sequence
MKKILGLDLGTNSIGWAVTELDFENKEGIINGIGSRIIPMPQDILGKFEAGQSISQTADRTGYRGTRRLYQRDNLRRERLHRVLNILGFLPDHYKNAIDFEKRLGQFKKEVKLNYKSIKDSEGFASSETFTKPQFEFIFKDAFYEMIKEFQTYSSDELKIPYDWTIYYLRKKALKEKISKQELSWVILNFNQKRGYYQLRGEEEEISKDKVKTFEILKVDKIEDSGEKIKGKGDILYNVYFTNGWKYDKQITKTENWIGKTKEFIVTTSKTKDGKTKRTYKAVDSEKDWIAIKEKAQQDIDIYNEQNNTVGVANYIFDTLLKNPTQKIRGKLIKTIERKYYKEEFNAILETQIKYHKELQDRDLYKSCIEELYSKNEAHKNNIKDKDFRYLFADDIIFYQRPLKSKKSTISGCQYEKRTFYKTVLDKETGKEKKELVTEPIKAIPKSHPLFQEFRLWQFLKNLKIYQKEAKIEEKTKIDHDITSEIIQTEDDWVKIFDFLNDKKDITQKQLIDFLAKEKFIDKKDKNNYRWNYVEDKTYPANETRATFLLRLKKTKNEGFALSENFIINLWHIIYSVKDKVEYETALKTFARKNNLDIETFVENFKKYLPFKNDYGAYSEKAIKKMLPLMRRGKYWSENEISENVKERINQFIERLKEIDFDKKKIEEISDDDIQKQVLKSFSEFKDKNPYTALNTYQAGYAVYGRHSELSEITKWHKPEDIDKYLQNFKQHSLRNPIVEQVITETLRTVRDIWTEHGDFDEIHVELGRDMKNPANKRQSMSKQNTENENTNTRIKKVLKELMSDGVSKVKDYSPSHQEILKIYEDGIYKSKTEIPDDIEKIRKNSNPTQSDITRYKLWLEQGYISPYTGATISLSRLFTTDYQIEHIIPQSRYFDNSFSNKIICESEVNQLKDNQTAYEFIKNHHGEIVNLSQGKQVKVFELADYETHCNKYFKNNKSKLKKLLSEEIPEGFIKRQMNDSRYISKVVKGLLSNIVREEGEQAATSKNLIPVTGAITSKLKQDWGLNKVWNEIIRPRFERLNKMTNSNDFGYWDYQKDKNGNNTGKQFFRIQVPDEISKGFKKKRIDHRHHALDALVIACTSRKHIQYLNSLNNHKEKYDLQPSLMIKNKEGHYTKHFIMPWNNFVIDAKNKLEKTIISFKQNLRVINKTNNKYWKWIKQKNGTYKKMLIKKPLQVRFLFETKSKQLLINWLLRN

SEQ ID NO: 10340 - protein, 1099 aa, unidentified
  REGION 1..1099: note = Description of Unknown: Cas Enzyme sequence
MGTEKILGLDIGSNSIGFSLLKINEENTQITFEELISNSIIFSEPNTAEERREARSARRLHSRKSTRNKNSRKIFADYALASHEFIDNPTIYFQNFNFKDKDVYRIRQRAVEGEQLSKNEFLLATYSILTDRGYNNMFAIADNEEDGIINEAVTHNKQEYLAKNYLLPSIVLTTSRDKLKDEYQNIPIRNKKGDYSNSLDRDMHKEEFKKVVLSQATNKGLFGSEKISEEFVEVMLDETTTNRAFFQRPLKSFEGMVEYCSYYDEFNPKGSEKRMPLSNIANVELTLRQSIDNYDAIDKNGEIKKFSQDEKNKIVDFWLNSPNADKINNKNIYKNAGFKDIKINIKDDKELLILNIQSYRGMLEVLKKYKIDFQAKDSEFYNAMLLELYYYKNYSSRVEHIEKLIKKYELNIDNSFVDDVAKLQHMDGFGSFSLKFANEVLTMMKSGKIHSEALEKLGYNDKYLNMPSYDYLPPLSPTKADIEWLQKNISYFNTNHLFYQPMMSPKVKRVIAVLRKLINELIKKYGKIDEIRIETARELNSKKEEKSITKNQADYNRKNKEAEKLLKANGIHTSHKNTERAKLFKEQGCECLYCDKNLTIEEAFDETCTEIEHFIPRSVIWINSQKNKILVHKKCNQDKGSRNPMDYLKSIGEWENFKGRIKLHSKSPKYKWLTDESIINSVMQKEYWQDSYLNDTRSATRSIQKYLNHYLYPQTQRYNKGGETHIFSVTGKAISELKYIWGIHTVMPKTTEDKKDRNTNYHHTLDAFTIALCSPSAIQALHNHFKKNENKFKSKKMKENLATVMPTSTSGVHVVEHLRALVKKYETNSMYVCPYNKRKTNMKGFKDGNLKLYVSKDPKDESREILAEMDKVYIDTSLLFKKDGLNLKTRSDKEVLDEVKSIQSRLNPIKQQKIIEALEIYAHALLELRKESDGVNSEINALRKTKKTGAKYKESNQEIEESINPIQERLKLVTNRQESLKCSHATKNGKRQIVKKLNLHKIKISKTSADSILFSRREEHSLERLSLSNFQKALEDKEPFVVKENKSTLCVELYSHPQQNQVVCLKYFSSIANPHIKTKINENYGNMFDEVKPSLVLYK

SEQ ID NO: 10341 - protein, 480 aa, unidentified
  REGION 1..480: note = Description of Unknown: Cas Enzyme sequence
MKRILGLDLGTNSIGWAVTQLDFDNKEGKIEGIGSRIIPMSQDILGKFDSGVSISQTAERTGYRGTRRLYQRDNLRRERLHRVLNILGFLPEHYKNAIDFDKKLGQFKENQEPKLNYKPISQDNEKVKYEFIFMPSFLEMIKEFEKAGQNTKIPLDWTLYYLRKKALKEKITKEELAWIILNFNQKRGYYQLRGEEEKIQEGKEKTFEVLKVDRIDDTGEVIKKTGDKLYDIYFTNGWKYDKQIVKTEDWLDKIKEFIVTTSILANGKTKRTFKKVDSEKDWIAIKEKAQQNIDIYNEQNNTVGVANYIYDTLLQNTTQKIRGKLIKTIERKYYKQELQKILETQIPLHPELQDKELYKKCVDELYPRNEAHQNNIKDKNFNYLFVDDIIFYQRPLKSKKSTISGGKLLKDEDGNQITKPIQAISKSHPLYQEFRLWQFLKNLKILQKNATVDDKPKINHDVTNQILKTEKKIGLNCSIF

SEQ ID NO: 10342 - protein, 944 aa, unidentified
  REGION 1..944: note = Description of Unknown: Cas Enzyme sequence
MRRGKYWNEEEIPQNIKDRIFQYMKRANCITVDEKHKDFQKQLENVSDDDIPKQLIKSFLPFKNKNSLIALNTYQACYAVYERHSETSEITKWKTPADIDKYLKNFKQHSLRNPIVEQVVTETLRTVRDIWKKYGDFNEIHVELGREMKNPADKRKLMSARNTENENTNYRIKEVLKELANDPKIEGDVKPFSPSHQEILKIYEEGIIQNFENEDIEKIRKKENPTTSEINKYKLWLEQGYISPYTGKPISLSNLFTTDYQIEHIIPQSRYFDNSMNNKVICESEVNELKSNKTAYEFIKNNEKRIIDLSGGRNVELFNLDSYKAHCEKYFKKNTTKLKNLLSEDIPEGFINRQLNDSRYISKLIKGLLSNIVREEGEREATSKNIVTLSGSITSQLKQDWGLNEVWNKIVAPRFKRLNELKDTNDYGKWDYQKDEKGKNTGKQFFRLSVPPDIEKGFNKKRIDHRHHALDALVIACATKDHINYITSINTQRNNHSLVSKLREVEEIQVKDKKTGKLRDRKIAKSYHKPWATFTTDTKEDLEKIVVSFKQNLRAINRTNNKTWQWIKQSNGKYKKELVKQKGKNFAVRKSLHEATFNGKVFIREIKEKVTFNNVLIDKLKKEKLLDKYILVDKKLSKKIRNLTKEGLKNKEIFKYFKDREYKYDKKEIKKVNVYYYTEATASRTELSGIKNRKQLEKITDKSIQEILNNHLKKYIDEKGKEQFDLAFNQTGIDELNKNIVELNKWKKHQPIYKVRLYEASSKFNVGNSNDNNHKYVKAAQGTNLFFAIYENENKKGEKERVFETIPFNKVIEYQKQTVDLPKKEKLMHPIDNTKGRFLFSLSPNDLVYVPTDEELENPNSVDFEKLEKEQINRIYKMEKTSKQQCYFIQNNIANLIKQYDAKSKFGEFGSQNKLEISVDGKKITDFCWKLKVNRLGKIIEVQK

SEQ ID NO: 10343 - protein, 1355 aa, unidentified
  REGION 1..1355: note = Description of Unknown: Cas Enzyme sequence
MRNKKILGLDLGTTSIGWALINEKTQGKSEIIKLGVRVNPLTSDEQTDFEKGRPLSINADRTAKRGARRNLQRFKLRRNNLINILIGQKIITKDTPLTEIGKCTTHQTLEQRAKAAKQQITLAKFARVLLAINKKRGYKSSRKAKNEEEGSLIDGMSVAKEIYERKITPGQFVYELLSNNKKYIPDFYRSDLQHEFDTIWKFQQQFHPDILTEELYKKLQGKGKQKSSALFLAIHQIYTAENKGKRELVKKQHYKWRSEAINSKLSIQEVAYVLVEINNDLNKSSGYLGAISDRSKTLFFNNETVGENLFKQIVKNPHTSLKNQVFYRQDYLDEFETIWEEQAKHHPILTRELKQEIRDVVIFYQRKLKSQKHLISDCLFEQKHKTIPKSSPLFQEFKIWQNINNLIFINNETKEKQTLELDDKETLFEELNIKGNLKEKELLKFLGLNHKTWKTNFPEGIEGNRTNATLYNAYHKIIEDNGYGFDWDKKTGKEQKEEIKQVFEQLGINTSILDFDAEIKGNDFDKQASYQLWHLLYAAEDDNKISREDKEIYGDSNVNLKKILHHRYNIASKYTKLISNVSLQNDYGSLSSKAIKKILPKLSKGLDFASSCDAVGYNHSKSLTKEEQANRVLKEKLKLLPKNSLRNPVVEKILNQMVNLINQVIDTYGKPDEIRIELARELKKSAKQRQDMTKHINTATKANLAIKALIATEFGIPNPTKNDVVRYKLWQELKDNNYKTLFTNQYIPKENIFSKDIDIEHIIPKALLFDDSFSNKTLAYRDVNLKKSNRTALDFITEDYSSELENYMLRIENLYKKGAIKKSKYQKLLTTKEKLPEGFISRDLKNSQYIAKQAKAMLEEVFRTVISTTGSITDKLRSDWDLINVMKELNFSKYKALGLTTTEIRKNNKKVEVITDWTKRNDHRHHAMDALTVAFTTHNHIQYINNLSARFDTNSDKHKIIKNIEALITTRKEGKKVFIAPMPHFRTEAKNHLEAILISYKTKNKVVTRNKNKHKVKDDYKEIIQLTPRGQLHKETVYAKRKREMAKPTKLNAKFSLEKVALIINKDIKTLVLAHLAKYQNKPKEAFQAKVLKKEPLIYNKKEFKEVFCFEEIYTIRKEILPDLKIDKVVDEGIKAILQKRLIEYNNKPKEAFSDLDKNPIWLNKKAGISIKRVSITGVSTAIALHSKKDHLGKEILDDNKTQQATDYVSTGNNHHIAIYEDEKGDLQERVVSFFEAVTRANEGLSIIDKNYNQEKGWKFLFTMKQNELFVFKNEDFDLNKIDLLDKKNASKISPHLFRVQKIGSKDYWFRHHLETTVTNNLDFTYKRISSTKFLNEILKVRTNHLGEIVHVGEY

SEQ ID NO: 10344 - protein, 1067 aa, unidentified
  REGION 1..1067: note = Description of Unknown: Cas Enzyme sequence
MAKILGLDLGTNSIGWAVVDDEKKQILGTGIRIFPEGVVAKTIGTGDREVSKNAARRESRQSRRGFYRHRLRRIKLLETLIEFKMCPLAGEELRQWKQYDKKKGQAGKTFPSSEEFNKWLKLNPYKLRAKALNNDISPFELGRIFYHLIQRRGFLSNRKGNEEGKIFSGKDNMTGIDETNKQIKDKTLGAYLNSVIPKEYEPYKNIVDKNGKELRARGRYTLRDMYVDEFEKIWQRQSKQLGLTSIQKEVKKESIISGSIYNKRNKHRIEKLQEKKGKENIKIEGNKLTIIEHIPLKEYLAGTIYYDEEGNIKHKSQESVLFYQRPLRSQKGLLAKCSFEGRKFYDKKNERWRIVGPTPCPLSHPEFEEFRALQFINNIEYGAKKRLDEHQRQMLYDLFNKKDAGFDFKLIPKELKLTYETFNYADDFKATGNYTISKLSKLFKAEIWEKHKEEIWHCFYFFDDNDKLIEKLKTDFALNEKDEEKAAKIKLKDDYANVSLKAIRNITPFLKKGYKLSDAVLLGGVRNAFKTTDTEHKPYDRWENFKNEHEKIEKDIIRINKDKKNKEGDAIKKIKEYLHNNCGFEKDDKNFKKLYHHSQEIEQKKIQDKLDKIENLRNPIVQQGLNELRRVVNALIDEHKKFDKIKVELGRNLKMGKKQRQETEFKIRDNNKKNEEAREKLSEYGLAHSRENVQKYLMWKEIEDRSGTAKCPYTGKTINISDLLGRDNKFQIEHIFPRSTSLDDSFGNKTLCEAKFNGLKGNKTPYQFYKENNDAKLWGGAKSWDEIKQRAFKLLPYRKAKRFTAEKVDEKADGFIERQLNDTRYMSKKAKEILSQICPKDNIRVMPGSVTSELRHLWGLNNILQPVEILDFKEAKINIDKPEKHWVIFDEKGEVLSFYPIHNEKPNLKPNEITIAGYLNNKGEFSSKYVSGKSKHEEFIGDDFIGKYWKKLKLSSEALQIEKMFTDKPEVTNDEIVLRGKVAKKYFENDTIGKKIKTNFEDGYYWAKFKVKNVKFEKPIPKKQPKKKPGQILLYGTVEDAIFKSYIFECQTGEADGNYWAIIDLDF

SEQ ID NO: 10345 - protein, 1377 aa, unidentified
  REGION 1..1377: note = Description of Unknown: Cas Enzyme sequence
MKKILGLDLGTTSIGWAYVNEAENENEKSSIKRVGVRVIPLTTDEETDFQKGKAISINADRTLKRGARRNLDRYQLRRDALLETLNLNGFINSNSLLFEDGSNSTFSTYNKRAKAAVEKISKEDFARVLLMINKKRGYKSSRKAQSDDEGIAIDGMDVAKELYEKGITPGQYVYKTLTNGKKHIPSFYRSDLQVELDRVWDFQKQFYNEILTDNLKEEIREKNKRQTWAICQKPFDLIGIKRTTKGFEQKLENYRWRTEGLTNQLNLEQLAIVLQEINNLINQSSGYLGAISDRSKELYFNKQTIGEYLYNQLKNNPHSRLKSQVFYRQDYLDEFETIWEKQKEFYPELTDDLKREIRDVIIFYQRRLKSQKHLISNCEFEKHHKVVPKSSPLFQEFKIWQIINNLEIQHLQSKDVYNNDQINQELKEILFEELNIREKLSGTEVLKILVKKPKEFELNYKEVEGNRTNARLYNAYQEILKLEEEECNFKKLSAEKINDIVSSKFAELNINQEILLFDIAKEGNEFDKQPILQLWHLLYSFEGDNSRTGDEKLIKALADKFGFKSEYAKIIAKVKLQSDYGGLSSKAIRKILPYMKEGSRYDTACGFAGYNHSSSLTAEEQLTRKLKDKLELLPKNSLRNPIVEKILNQLVNVVNAIFEDEGLGKPDEIRVELARELKKSAKEREAMTKNINAATARHEKIRKLLQTEFGITKVTRNDIIRYKLWEELESNGYKTLYTNTYIPKGKIFSKDFDIEHIVPKALIFDDSFSNKTLTVRDVNLKKSNETAYDFLKTYLSDGDFEQYLARTEKLFKDGKISKAKYNKLLMKASKIPDGFIERDLRNSQYIAKKATQMLQEVVRTVSSTIGSVTDRLRSDWGLINIMKELNLPKYEKLGLVNIIEGKNGQAEKQIKDWTKRNDHRHHAMDALTVAFTKPAYIQYLNNLHARSDKSGSVYGIEQKHLERDKNNKLVFISPIPINEFRAESKKHLEGILISFKAKNKVVTRNKNKIKTKGRDSYKTKIELTPRGQLHKETVYGKIYRYETKYEKIGSKFDLVKIKRVANQKQREALLARLNEFEGNPKKAFAGKNAPSKNPILINDENSMLSDTLTDNMVPEKVKLVWKEPVYTIRKEISPDLKIEKVVDVKIKEILQKRIDKYGDAKIAFSNLEENPVWLNEEKGIPIKRVTITGVSNAEAIHYKKDNTGKFILDENENKQPVDFVSTGNNHHVAIYRDNKGNLQDKVVSFFEAVERARQGVPIVDKIYKADEGWEFLFTMKQNEYFVFPSDNFDPTEVDLLNPDNASVISPHLFRIQKFSKVEYGNSAVRDYVFRHHLETLLTDKKETKDITYKTLKSLAKLFGIVKVRINHLGKIVKVGEY

SEQ ID NO: 10346 - protein, 1207 aa, unidentified
  REGION 1..1207: note = Description of Unknown: Cas Enzyme sequence
MSKRILGLDLGTNSIGWAVVDEVGRGEFELIKRGVHIFQEGVKIEKGNESSKAAERTGYRSARRLKFRRKLRKIETLKVLSEAGYCPALSLEELKAWQSKKVYPTNSDFKEWCRTSDPKNPEVGTFKNPYYFRWLSATTDLDLTKEQDRFKVGRAFYHMAQRRGFKSNRLDGTQESDGVVKKDISELSEKMDGRTLGQYFWEECYQKGAKIRKVHTSRDEHYLAEFESICEKQKIPSELKEKLYRAIFYQRPLKSQKGLVANCPFESQKKRAPISHPLFEEFRMWQTLNSIKIKTMDDAELRPLSQEEKAVILPLFFRVSKAQFDFKDIAKALIKTLNPKKQTHAYVRSRDAESAQVLFNYRDNQSLSGCPFSAKLKNLFGEEYKQHIFENYAGAKQTREGVLKSLEDVLHEVWHVLFSFDDEEKTKEYAQNKLGLEKEKAEKFAKIIPRQGYGALSLKAIRKILPYLKQGLIYSHAVFFANLDQVIGISARENEKLKADISNLISDHNHYIAQSRCVNEFVRAYKDDPRAFEDSVDLRKLEEFAEKLPSHLADSAEELARLIRIQIRKNNGNGEYLPVKRLDERVGDYLREEFGVSDENLEKLYHPSAIETYKPAERHSDGKCYLGSPRISSIRNPVFMRAMHRLKAVVNELLKQGVITDQTQVHVEMARELNDANKRAAIKTWQRNAEKKRADFKLQIEKDLIAAGITREATADEILKYQLWEEQRRICPYTGNTIVPSEFIGENPKYDIEHTIPRSISCDNSQENKTLCERGYNREIKKNKIPYDCPNYEEILHCIEHWRKEVERLDDLINKKRKASRAATTKEQKDRAIQQRVVLEMDRDYLKGKYRRFTMKEVTSGFKNSQLVDTRIITKYARMYLQTVFSSVHTVNGKTTDDFRRCWGIEKSRDNHAHHTVDAIVVACITRNKYDQLARFYHEYESYESRDPSVPRKPHFSKPWETFTEDMKNLKNEILVSHYAPNHLLKQTKKWVKVRGKRVLQQGKTARGSLHQETFYGAIKRQEKNKKGEVEEVIKYVVRKPLADLSDTDLGKIVDKRIQEIAIEGRKKEKVLKKEIEKLEKKIPRVEDAEEKVLREQIASLRDQLNTLYVLPNKNGNPIPIKKVRIYTKLTNPIPLKKQRDVSEKRSVPYKEKYWVSNGDNSCILIYEGENKRKKLIRSKKVYSNFFATNPDKDVVPNPYSNRFDPI

SEQ ID NO: 10347 - protein, 1360 aa, unidentified
  REGION 1..1360: note = Description of Unknown: Cas Enzyme sequence
MVIQNQLKYNIWKRGCQGMNIKEDYYLGLDIGTNSIGWAVTDKNYNITKFNGKAMWGVRLFENGKTAEERRLHRASRRRTARKVARIKLLQELFSEEIYKVDPGFFMRLKESKFHIEDKKTRQPNCLFNDNKFDDKQYNKLYPTIYHLRKELINNDGKVDIRLIYLALHHIIKHRGHFLFEGDSIKNVNNFEPVFNKFITLFKGEFDIDINYSSIKEIESILKNKKMGINTKKKELEKQFDSEYKQVKMVAHILAGAKVKLSDLLVDGELEKSENNKIQFGSSNYEEIYSKLEDILSEKIIFIDLLKSIYDWGILQNILKGERYLSYAKVSIYEKHAKDLKLLKNIVKKHLQGSYMEIFGVKGKDNYSAYIGSAKSNNKKISIKICQKEEFYKFIKKVIDKIEKPNNSDIQYVLSEIDSGTFLPKQVSKDNSVIPNQVHKEELKVILEKAAKHYEFLNKIDSTKISTGEKIIKLFSFRIPYYVGPLNDYHKKENGKGFCWVTKKSKERITPWNFEKVVDIDKSSEDFINRMTNKCTYLIGEDVIPKKSILYSEYTVLNELNNVRINNERLPNNLKAKIFNQLFLKQKKITQKRLLNFLSSEGLEGELSGLDGDFKNSMASFIDFKNIIGNKANDIEMIEEIIKWIVLFGDAKKILRDRINAKYRKVLSEDEIKRIITLKYTGWGRFSKKFLSQIYHVDKSSGEMVSIIKIMRENSINLMELLSKKYDFLNAILKHNKNEETETNKISYKMVEDLYVSPAIKRSIWQTLLITEEIKKITKKEPKKIFIEMARGQEEKKRTKSRRDKLVELYKACKKEERDWVNELLNREESSYKSDRLYFYYTQMGKCMYTNEIINLDDLYNSNIYDIDHIYPQSKIKDDSLDNRVLVKKVINSKKTDIYPISSDIQKKNRDFWNYLFSKRFISKRKHERLTRVSPFTQDELASFIERQIVETRQSTKVVAQLLTDTYKESNIIYVKAGNISSFRNKRENNGEIIKELVKVREINDFHHADDAYLAIVVGNVYDTKFTWNPYNFIKSDDKYNMNRIFENDVVRNNYFAWKRGNKGTISIVKKNISKNNKQFTRRAYEQKGQLFNITPMKKGKGQLSLKSNDSRLKDINKYGGYNKIAGAYFTLVEHKQKENIIRTIEYVPIYLSEIIKNNHNKLIKYLTEELNLIECRVIIPRIKINTLFKIDGYYLHLSARTQSRLIFKNAIELMLQNEEKIYYKRLYKYNQKIKNSKKLIIPNEFDGITNIKNINLYNSLINKLSSTIYNKRLSTQADKFLQGKEIFEKLTINNQCEFLCEAIKLFSCNMVKANLSLIGGAKNAGTIVVTNKVINFEEIKIIYQSPTGLFEKEVNIKEI

SEQ ID NO: 10348 - protein, 1086 aa, unidentified
  REGION 1..1086: note = Description of Unknown: Cas Enzyme sequence
MKNILGLDLGTTSIGWALVKEAENKNEKSSIVKTGVRVIPLTTDESTDFEKGKAISINADRTLKRGARRNLQRYKQRRSNLLEILKKSNLITKETIISETGKNTTHSLWKLRARAAEEEITLEEFARVLLSINKKRGYKSNRKAKDEGDGQSIDIMEIAMELYDRKLTPGQFVYDLLKQDKKHIPDFYRSDLKPEFEKIWSFQKQFYPDILTNELQKQLKSKSKTQTWAICRDPFNIEGTNQKGSTKEKRLEKYEWRVSSLNERLDLERLAIVLQEINGEISNSSGYLGAISDRSKELHFNKQTVGQYLYKQLTDNPHTRLKNQVFYRQDYLDEFERIWEKQSKYNSNVLTDKLKNEIRDIVIFYQRRLKSQKGLIGICELEGKEKEFEVYGKKKRQIIGPKVIPKSSPLFQEFKIWQILNNLEIKNIKSKEKSLFDLETRNILFEELNIKGKLSEKEVIKLVMKNPKEWELNYNSVEGNRTNEVLYKAYHNIILLSGHEIDILKNSASTIKDTVYEVFDILGIKKEILNFDVDLEGKTFEQQLSYQLWHLLYSYEGDNSKTGNDKLFEKLKTKFGFDKVYARALVNIIYQDDYGSLSAKAIKKILPFMKQGYEYSDACEKAGYNHSHSVTKEENEKRQLKDRLDLLPKNSLRNPVVEKILNQMVNVINAIIEKYGKPDEIRIELARDLKKSAKERSEMTSRITKATKEHDRIRKEIAELPPFNTGIRITRNDIIKYKLYEELSFNGHKTLYTNTYVPKEKLFSKEFDIEHIIPQATLFDDSFSNKTLSVRQVNLDKGNKTAFDFLSEKYGEDSDAFKAYIQKVEKHLKDKKISKAKYNKLLTPGTKVPDGFIERDLRNSQYIAKKAMQMLLEVVRNATSTTGSITSKLRNDWQLVNVMQELNWEKYKKLDLIEYETNKDGNQVPKIIDWSKRNDHRHHAMDALTVAFTKHSHIQYFNYLNARRDETHKQHKNISTIEENETLINGKNKRIVRPPIPIEEFRAQAKRHLENTLVSFKAKNKVVTRNNNKTKKHGGFNNKIELTPRGQLHKETVYGKSKHYETKEEKVGPKFDEQTIARVAKDSYRV

SEQ ID NO: 10349 - protein, 1550 aa, unidentified
  REGION 1..1550: note = Description of Unknown: Cas Enzyme sequence
MAKILGLDLGTNSIGWAVVDDDKKQILGTGVRIFPEGVVAKTIGTGDREVSKNVARRESRQSRRGFYRHRLRRIKLLETLIEFKMCPLTVEELRKWKKYDKTKGQTGKTFPSSSEFNSWLKLNPYELRAKALNKDINLFELGRIFYHLIQRRGFLSNRKGNEDGKIYSGKDNMIGIDETNKQIKDKTLGAYLNSVIPKENEPYKNITDENGKELRARGRYTLRDMYVDEFEKIWQRQAEKLELTSILKEVKKESIISGSIYNKRNKHRIEKLQEKKGKENIKIEGNKLTIIEHIPLKKYLAGEIYYDEKGNIKHKSQESVLFYQRPLRSQKGLLAKCSFEGRKFYDKKNERWRTVGPTPCPVSHPEFEEFRALQFINNIEYGAKKRLDEHQRQMIYDLFNKKDAGFDFKLLPKELKLTYETFNFADDFKVTGNYTNSKLSKLFKTEIWEENKEQIWHCFYFFNDNDKLIEKLKKDFELSEKDEDKISKIKLKDGYANVSLKAIRNITPFLQKGYKLSDAVLLGGVRNAFKTTDAENKPYDRWGNFKNEHEKIEKDIISINKDKKNKEGDAIKRIKEYLHENCGFEKDDKNFKKLYHHSQEIEQKKIQDKLDKIENLRNPIVQQGLNELRRVVNALIDEHYKFDKIKVELGRNLKMGKKQRQETEFKIRDNNKKNEEAREKLSEYGLAHSRENIQKYLLWKEIEDRSGTAKCPYTGKTINISDLLGKENKFQIEHIFPRSTSLDDSFGNKTLCEAKFNGLKGNKTPYQFYKENNDANLWGGAKSWDEIKQRTFKLLPYRKAKRFTAEKVDEKADGFIERQLNDTRYMSKKAKEILSQICPKDNIRVMPGSVTSELRHLWGLNNILQPVEILDFKDAKITIDKAEKHWVVFDDKDELINLYPIYNEKPILKENEITISGYLNDKGEFSSKYIALKSVYEELIGDKFKGDYWKKLKLSPEPLQIAKMFTDKPEVADDEIVLRGKIVKKYFENDTIGKKIKAEFEDAYYWAKFKVKSIKFEKPVPKKQPKKKPGQILLYGTVEDAIFKSYIFECQTGEADGNYWAIIDLDFDNVEFSNTMNPKPETDDNTILIQGSINETGLFSSDIDNEHNFKTKLPQGKYWTIFEIEEEDAKLYPQINLEPELQDKQKIVEGTVWVDKYTGEIKFDPKKNRDDHRHHAIDAITIALTEQSYLQKLSTYNAQLDNKRRGKADKPTFETPWENFYNDAKKAASEMLISHKANNKVLTKINKVIHKNGRKFISKGYAAGGQLHKENVYGKRQAPSSEKPYYHIRKSVESLTTEKQINKIVDTKIRAIILHAKAQEKIIKKEIDELNKQFKKAKTDFEEADIQNQLEQKQQEIKMLYSLPNKNGEPVPIKKVRVKENLGNMMQLKDKKVFAEKKGSEIELNQYVNPRNNHHVAIYKDANGELFEKVVTFWEAVERKKEGLPVIDKEPADGSKFITSLETNDMFLLGINEDDINWKNPNHAYLSKHIFRVQKFSKSQVSFAFVFRHHLASTLDNSKQEINLQSFKAWKEANPIKVKIDILGRISKVD

SEQ ID NO: 10350 - protein, 1163 aa, unidentified
  REGION 1..1163: note = Description of Unknown: Cas Enzyme sequence
MKRILGLDLGTNSIGWSLIENDFDKKEGKIKGIGSRIIPMSQDVLGKFDGGVSISQTAERTGYRGVRRLYQRDNLRRERLHRVLNALGFLPEHYANEIDFKKHYGQFKKGKEPKLNYRKSADGKYEFIFMDSFKEMVKEFKAKEQSIKIPYDWTLYYLRKKALTQKISKEELAWVILNFNQKRGYYQLRGEELKDDKSKLEKFYSLIVKRVEETDDKNVKGTWYNVVLENGWIYRRQSKESLNSWVGKSKDFIITTPLEKDGTTKLDKEGKVKRSFRAPKEDDWNLIKKKTEQELESYINKDYKNKSVGSFIFKTLLQNPTQKIRGKLIKTIERKYYRKELEQILKTQIQLHDELQNRDLYQACVNELYPRNEAHQNNIKEKDFEYLFIQDIIFYQRPLKSKKSTIANCQFETRSFIDQKTKEKKTIGLKGISKSHPLFQEFRLSQWFKFLKIYKKEDEKGNFIDKEVTDELLPDMKSRENLLVFLRSKKEVEQKHVLEYFSKKGLIPKQKKNAFTHRWNYVEDKKYPCYETIASFESILKKVDTYSSDHFKSSDESTEFHLHLWHIIYSVKDKNEFKTALGTFALKHKLDKDSFVAAFEKYPPFDNNYGSFSEKALKKLVPLMRFGKSWKEKEISEKVKTKIDHLLTGEVDDTIQLRVRELLVKYNHTLNSIEDFNDLPLHLASYIVYDRHSESGDIQNWKTPIDIDKYLHEFKQHSLRNPIVEQVVTETLRTVRDIWKYYGNGKENFFNEIHIELGREMKNPANIRERISKKNTENENTNARIKAILQELMNDGVEARPYSPNHQEILKIYEEGVYQNPNADFLQMSEDDIEKIRKNSSPSPKDIQRYKLWLEQGYFSPYTGKPIPLSKLFSKSYQIEHIIPQSRYFDNSLSNKVICESEVNQLKDNQTGVEFVKNHGGQIEAGYKIYTLDEYESHCNKYFKKNKTKLKKLLSEEIPEGFIERQLNDSRYISKLIKGLLSNIVREKGEQEATSKNVVPVTGAITSKLKRDWGLNDKWNELVAPRFKRLNELTNSNDFGYWDKKINAFRTQVPDEIAKGFNKKRIDHRHHALDALVIACCTKDHTNYITSLNTNRNNYKLVNKLRETEEIELKGKKRNVAKAYHKPWRGFTIEAKEKLEKTIISFKKNTRVITKTNNKTWQW

SEQ ID NO: 10351 - protein, 1535 aa, unidentified
  REGION 1..1535: note = Description of Unknown: Cas Enzyme sequence
MKKILGLDLGTNSIGWALIERDFDNMIENTLGKGNIIGIGSRIIPMDQGTMDDFGKGITKSQTADRTEYRGVRRLRQRHLLRRERLHRVLNIIGALPEHYKNAIDFKDRKGQFNPETEIKLPYKQISNQFEFLFKSSFEEMVKEFKIAQPDLFQSKKNGHEIKIPYDWTIYYLRKKALSKKITKEELAWLLLNFNQKRGYYQLRGEEEVDKTKLIEFHALKVISVKAEEPNYKKEIWYSVNFENGWVYRRKSKVDLSDWIGRIKEFIVTTTLNEDGTIKTDKVGTEKRSFKAVNSEEDWIAIKKSTEEKIENSKQFVGEYIYDTLLSNPSQKVNGKLVKTIERHFYKDELSQILKTQIELNSELQDKKLLKQCIEELYPNNYAQQNILKDKSFSYLFINDIIFYQRPLKSKKSLIDGCNYERRTYFDKKENKYVTKPIKVISKSHPLFQEYRLWLFVEKIRIYEKEKTIDGKLYTDYDVTSEFLPNEDARIELFDFFNDKEKIKQKTFLAHYKLKENRYRWNNVEDKEYPLNETRALLLSKFNKHKDIFEAKKFLTQENEIKLWHLLYSISDKKELERALDINKQKKDKDIIFEIPKEIRQELKNIKPFKSDYGAFSEKAIKKLLPLMRLGKYWNYNDIDDKTKERIQKIINGEYDEKIQDRVREKAINLTTENDFKALPLWLASYIVYDRHSESGDISFWKEPLDIEKFLGDFKQHSLRNPIVEQVITETLRVVKDIWEYYGKGEKDFFNEIHVELGRDMKNPKSVREQITKSINKNQDTKQRIRTLLSEFKNQNIEGVIPHSPSQQDKLKIFEEDVLSSVNEIPDDIEKISKSSEPSTKEIEKYMLWMEQKYRSPYTGITIPLSKLFTTEYEIEHIIPQARYFDDSYGNKIICEAEVNRFKDRQTAFEMISKSPGQVIDLGKGRQAKLFSLEAYQDFVSSNFNSGSKKQKILLSEDVPEQFITRQLNDTRYISKVVKGLLSNIVREEGEQEVTAKNLISVTGSATTKLKQDWGLNDKWNEIIRPRFERMNKLITKEGETLSTDFGYFDEARNFYRIQVPRELKRNFNAKRIDHRHHAMDALAIACATRNHIGYLSNQHSKSDTKRYDLRNKLRRIEEIQIDGKIRNVAKEFFMPWKDFPIDARNSLEEIVVSFKQNLRVINKATNTYQVWRNVDGQQKKVLQKQKNGENWAIRKPLHKETVYAKVNLIQKIETVTVEKAINQDYNFIDKRLKFIVSNLKKKDIKKQDIIKYIIEKNYKEVKVFSKISAARPKNIIDESFNSKKIKAITDVSIQKILLNHLKNDKYNNKLDEKGKLIKPEILAFSTEGLDEMNKNIVELNGGKQHKPIYKARIYETLGNKFAVGYTGNKKDKYVEAAKGTNLFFAIYEGINIKGNKTRHYETIPLNVVIERLKQGEKPAPEKYFDKDKLEYNLLITISPNDLVYVPTDEELENINAIDFSNLREKQKKRIYKMVSSSGTQCFFIRNDIATTIKNKFEFSALNKTERDFNNEIMLKDRCIKLKVNRLGQIVKVGE

SEQ ID NO: 10352 - protein, 1137 aa, unidentified
  REGION 1..1137: note = Description of Unknown: Cas Enzyme sequence
MSKSLAFDIGHASIGWSVLESSASEKDPEILGTGAVIFPTDDCLASQRRDFRRTRRHIRSTRQRIERMKRWLEHRKVISREDLDKPGHPAPFLLAAAALQGHCTLDSWQLWTVLRWYAHNRGYDGNARWAADASEEEDDDTQKVSNARSLMEKHGAKTMAETVCACLALEPAKHKKRISSWLPYKTLNAAFPRDVVEKEVGELLGKHIGIVPGLDGETVRIILAGGNLERKDRESLQAAGIKLPLRYRGGLLFGQLVPRFDNRIISTCPVTYAEVHDRELEAGKSEEEACHTAKRESKVPAARCREFLEYRFARVLANIRAEGKPLDGETRRQLFETAKTEGYFTHAKLEKTLTGILGKVPTNLKNYFKLHPDSEKALVLDPAVKLLHSNRTLKPLLPHLPEKAKARALRKWRTNRPVRLGDLLEWSAEFGPTDDLEAALADLHVKNTAKGTRKGWAFVQYLTVPLRPDDLSGRAPYARPVLRRVVEEVLRGDEPTKPARSAEHPDGEDKPADGVLYSLLDPGSRVRQLQDARPLDQLTNNHLVCHRLLILERLLDDIVEEFCESDPSQVKRVVVEVARDLKEFSGMTAKEITAELKGRLKDFKAAVAYMEKNAPDMLLTGGLIRKCRIAMDMNWICPFTGDTYDALDLPRLQREHIIPYASRATNALHALVLTWPEVNDMKGKRTARQFIKDDQSKVVENRSNLSIRSLKSYDQFVEKLDTKGHPDDRRRKKARQALLQTTEFDEREQDFTPGQLTQSSHLMKLALRGISKRFPEAATDPIPGAVTALLRKSWNITGTLALACPDILEPEDESGHQRSRPKDEIRSLTHLHHALDASALALAAHYLPLRHHGRDIKGRLWEALLKRRPSPEDVQLLRSLRITRRTAKGGIEVLPPPDSVKEQLARRLAECRVMQHVPADRSGAKAELNTWGIVTQDGDRTILLQRLNRSGLELHESENFRRWKDKKPSKESLQLLEKFEEKLTPRQKNLVRRGLLKLTAERTEKLLGTQPKNGTGKLASINGALVISKNFGAIIEPSPEIVVFFSVPEKLAVLREKRNAPRILRPGALARVSGQGKRNGIWRITTVQASLKCDMIRPEVAGQPKKGVNVWREVRIARLIETGLEILPRRYTAYPKE

SEQ ID NO: 10353 - protein, 1176 aa, unidentified
  REGION 1..1176: note = Description of Unknown: Cas Enzyme sequence
MNTANNKIVLGLDIGSNSIGYALLRLNEKNSQITFEELISNSIIFSEPNTAEERREARSARRLHSRKSTRNKNSRKIFVDYALATKEFIDNPTAYFQNFDFKDKDVYRIRQRAVEGEQLSKNEFLLATYSILTDRGYNNMFAIADNEEDGIINEAVTHNKQEYLAKNYLLPSIVLTTSRDKLKDEYQNIPIRNKKDDYSNSLDRDMHKEEFKKVVLSQATNKGLFESEKLSEEFVEVMLDETTTNRAFFQRPLKSFENMVEYCSYYDEFNPKGSEKRMPLSNVANVELTLRQSIDNYDATNKNGEIKNFSQDEKNKIVDFWLNSPNADKINNKNIYKNAGFKDVKIHTKDDKELLILNIQAYRAMLEVLKKYKIDFQGKDSEFYNAMLLELYYYKNYSSRVEHIEKLIKKYELSIDNSFVDDVSKLQHMDGFGSFSLKFANEVLNEMKSGKLHSEALEKLGYNDKYLDMPSYDYLPPLSPTKADIEWLQKNISYFNSNHLFYQPMMSPKVKRVIAVLRKLINELIKKYGKIDEIRIETARELNSKKEEESITKNQADYNRKNKEAEKLLKANGIHTSHKNIERAKLFKEQECECLYCDKNLTIEEAFDETCTEIEHFIPRSVIWINSQKNKILVHKKCNQDKGSQNPMDYLKSIGEWENFKGRIKLHSKSPKYRWLTDESIINSVMQKEHWQDSYLNDTRSATRSIQKYLNHYLYPQTQRYNKGGKTHIFSVTGKAISELKYMWGIHTVMPKTTEDKKDRNTNYHHTLDAFTIALCSPSAIQALHNHFKKNENRFKSKKMKENLATIMPTSTNGVNVVEHLKSLVEKYETNSMYVCPYNKRKTNMKGFKDGNLKLYVAKDPKDESKKILAEMDKIYIDTSLLFKKDGLNMKPRSDKEVLDEVKSIQSRLNPIKQQKIIKALEVYAHALLELRKESDGVNSEINALRKTKKTGVKYKELNQNIEESIKSIQERLKLVTDRQELLKCSYVTKNGKRQIVKKLNLHKVKIAKTSADSILFSRKEERSLERLSLSNFQKALADKEPFVVKENKSTLCVELYSHPKQNQVVGLKYFSSIANPHIKTKINEKYGDIFDEVEPSLVLYKNDIIKVVNTKENTISYYIFNGGGNIAGGNNKLELKTINKISLKRLYKTLNKDLTIFLAKIDFFGNKIECKLNEN

SEQ ID NO: 10354 - protein, 1341 aa, unidentified
  REGION 1..1341: note = Description of Unknown: Cas Enzyme sequence
LSTDEETDFQKGKATSINADRTLKRGARRNLDRYQLRRDALIEILVKEGFISNDTILSEEGVATTFTTYKSRANATQEKISKEEFAKVLLMINKKRGYKSSRKAQSDDEGTAIDGMEAAKHLYDNDLTPGQYIYETLKNGEKHVPDFYRSDLQNELEKIWAFQKQFYPDILTDEFKEQIKGRGKKATSKIFLGKYKLFTAENKGKRDEVKLQAYKWRSEAIDKQLEKEELAYVIVEINNNINSSSGYLGAISDRSKELYFNKQTIGEYLYRQLKETPHARLKNQVFYRQDYLDEFEKIWEKQKEFRPELTKDLKIEIRDVIIFYQRRLKSQKHLISNCEFEKYHKAIPKSSPLFQEFKIWQTINNIEIRHIPSRTVYKNEDIEQEVKELLFAELNIREKLSANDILKALVDKPKEFELNFKDGLDGNRTNAELYKAYQGILKLEDEEYDFNKLKADKINDIIASKFAELGITQEIMLLDVNKEANDFDKQAIIQLWHLLYSFEGDNSRTGDEKLIKALGDKFGFKPEYAKLIAKIKLQADYGSLSSKAIRKILPYLQAGHPFSRKEDDKGLIGACEMAKYNHSHSLTSEELKSRELKDKLELLPKNSLRNPVVEKILNQLVNVVNAIIKDKNLGKPDEIRVELARELKKSAKERADMTSSINKATARHEKIRTILQSDFGITKVTRNDIIRYKLWEELEKNGYKTLYTNTYIAKEELFSKKFDIEHIIPQAKIFDDSFSNKTLSIRQVNLDKSNDTAYDFLKKFLNESDFIQYLGRVENMYKDKNISKAKYNKLMMKLSEIPDGFIERDLRNSQYIAKKATQMLQEVSRTISTTTGSVTGRLRSDWHLINTMKELNMPKYKKLGLVETIEGKHGQQEQRIKDWTKRNDHRHHAMDALTVAFTKPTYIQYLNNLHARRDENKKQHKIIFAIEQKNLHRNEKGKLLFKPPIPINEFRTEAKKHLESILISFKAKNKVVTRNKNKIKVKGTNNYNTKIELTPRGQLHKETVYGRIEQYKTKEEKIGTKFDLTKIKQVAKQSYREALLTRLAEFEENPKKAFGGKNAPSKRPIYIDEAQIVKLPEKVKLVWKEENYTIRKDISPDLKTDKVIDVGIKKVLQKRLQEFDGDPKKAFVNLDENPIWINKEKGITVKRVTISGVSNAEALHHKKDHNGNLILDKNGNKQAVDFVSTGNNHHVAIYQDEKGNLHDEVVSFYEAVHRVNAGLPIINKNKEGLEFLFTMKQNEYFVFPSDNFDPKEIDLLNPDNTSLISPNLFRIQTLSRVVYGNNIIRDYVFRHHLETTVNKNKVLKNTTYIPIKALSDLEEIIKVRINHLGQIVKVGEY

SEQ ID NO: 10355 - protein, 1380 aa, unidentified
  REGION 1..1380: note = Description of Unknown: Cas Enzyme sequence
MKKILGLDLGTASIGWAFVKEAENENEKSEILKLGVRVIPYDDNLKKVDSKTGKISDSMDPIKDFEGGKGLSPNAGRTLKRGARRNLDRFQLRRDALIEILIENNFITDKTILSEEGEKTTFSTYKLRAKAVNEKIIKEEFVKVLLMINKKRGYKSSRKAKSEDEGNAIDGMEVAKYLYENNLTPGQYVYELLRQNKKYIPDFYRSDLQNEFDKIWELQKQYYPKILTPELKENLKGKNKGQTWKICEQPFNIVGIKLQGKSKEQKLEKYNLRTKSLKGQIDLEHLAIVLQEINNQINNSSGYLGAISDRSKELYFNKITVGEYFYNQLKENPHTRLKNQVFYRQDYFDEFEKIWEKQKGFHSELTDELKKEIRDVIIFYQRRLKSQKHLISYCEFEDKHKVIPKSSLLFQEYRIWHNLNNITIFHKPSRTKYKSIDQEAKELLFEELNIKGDLKENDVLKILFDKPKEYEINYEKIEGNRTNAELYKVYQKILEFEGEEYDFKKIKADEINDIVSTKFLELGINTDILSFDAEIRGNDFDKQAIMQLWHLLYSSEDEQKLIERITEKFGFKKEYARLIANISLQADYGSLSSKAIRKILPHLKEGNTYDVACVHVAYNHSSSLTAEELKNRILKNNLDLLPKNSLRNPIVEKILNQMVNLINAVIEDEDLGKPDEIRIELARELKKNAKERAKMTTNINKATARHEKIRKILQTEFGITKVTRNDIIRYKLWEELEKNGYKTLYTNTYVPKEELFSKKIDIEHIIPKAKLFDDSFSNKTLSVRQVNIDKSNDTAYDFLKEKLNKDDFESYLARIKKLYNDKNISKAKYNKLLMKNSEIPDGFIDRDLRNSQYIAKKAKQMLEEVVRTVNTTTGKITDRLRRDWQLINIMKELNLPKYEKLGLTETIQGKNGQPEIRIKDWTKRNDHRHHAMDALTVAFTSYSHVQYLNNLSARQNEKHKKYHTVYGIEQKYLYRDKNKKLLFKPPMPIKEFRDEAKKYLENILVSFKAKNKVVTRNKNYIKGKDEPQKTLTPRGQLHKETVYGKIQRYETKLVKVGTKFDLNMIKQVAKQSYREALLARLAEFEGNPKKAFGGKNSLAKNPIVINELVSSPATVPEKVKIVWKENNYTIRKDITPDLKIDKVIDEGIKIILKKRLADFNNDTKIAFSNLEQNPIWLNKEKNISIKRVTISGVSNAEALHYKKDHNREFILDKNGERIETDFVSTGNNHHVAIYKDEDGNLHDEVVSFYEAVHRVNEELPIIMKTHPEHPDWDFQFTMKQNEYFIFPSDNFDPNENDLLNPDNANLISSHLYKVQKFSKVIYGNSAVRDYVFRHHLETQIIDKKETKDITYIVLKSLSKLNNIIKVRINHIGRIVHVGEY

SEQ ID NO: 10356 - protein, 1036 aa, unidentified
  REGION 1..1036: note = Description of Unknown: Cas Enzyme sequence
MKVGTPYVLGLDLGTNSVGWALVELRGNKPAAVVDCGVRVFEAGLDGDIESGKAEPRNAARRIARQVRRQTDRRRRRKRKVFHLLQGVGLLPSGRVEEVIPRLDHEFHEKFLSQIKDPNQQRISSHLLPYLLRSRALTVRLEPFELGRAFYHLAQRRGFLSNRKTDRKSSEDGVVIKGISELENAIKEAGAQTLGAFFASLDPEEARIRGRWTARSMYETEFEKIWEAQQQYLPGILTESFRNALHRSIFFQRPLKSTKDLIGNCNFEPRKRRAPWALLVAQEFRILQKIRDTRVLDQETGEIRSLSREEAHSLSVALDGVESLTLSKARKVLGLKNCTFNWEESGEKNFIGNRTAARIREVIGDRWEEFTQVQREALVDDLLSIQRHDTMIRRARAHWGCNRAEAESMAEIELEPGYCNLSRKALKKLVPLLREGEDYATAAKRLYPDSKVIPSRKEFLPRVVEQLPQLRNPVVSRVLTELRKVVNGIIREYGCPATVRIELARDIKSSRKEKRRRIEKNRTNTKLRETARRKILEEMGIKEPTRHDILKVQLAEECSWQCPYTGRQISMGTLVGPHSQFDVEHIIPYSRCFDNSFINKTLCFAEENRNRKNNRSPSEAYAGEPEKYNEILARVGRFQGPARMAKLRRFQAKTEDEVEGFRSSQLNDTRYASRLAIEYLGTLFGGAVDENHCRRVHATRGPISAVLRNAWNLNSILSKNGKKTREDHRHHAVDAIVIALTTPGVIQEISALAAGKIPGERLSFDRLPESWDGFVGEVREVIGRINVSHRPSRRVSGALHEETIYSPPRMHRDGHEYLHRRKAVHEIGKAVEQIVDPVVRQAVKDKIAELGGDPKKLQGNGNLPVLRTGDGRQIPIRRVRIRVPKVAIPIGKNTKLRYVLPGSNHHLEIFSSKDARGRERWIGRMVTLLEAADRLRKRLPVVDREHPDGHRFVFSLSRDDIVEIDPKADRGGLWRVQKMTTRATGSIEIVMQRISDARQVSKTKSKGRTWSPNTLCADGARKLNITPTGRLMRNRE

SEQ ID NO: 10357 - protein, 1517 aa, unidentified
  REGION 1..1517: note = Description of Unknown: Cas Enzyme sequence
MAKILGLDLGTNSIGWAVVDSEEKKIIDANVRIFPEGVVKESIGKGDGEQSKNSTRRDSRQSRRQFYRKRLRKIKLLEVLISQKMCPLDASDLKKWKNWDCELKSDGRVFPDTPSFMRWIRMNPYELRSKALTQEVSKEELGRIFYHLIQRRGFLSSRKGKEDTSIFTKGNSDENILSINYTKEQIENTTLGAYLYHISRKNNEEYKPVFDENGVEVRLRGRYTVREMYIAEFEKIWQKQAPLLGIENTTISVKKIREFRGSITGSRSQKRLENLKLKYGKSNVIVGEKSKKGITKVTTTSSMSLKKYLGGEISEIENEEGNKKLIFKSNESVLFWQRPLRSQKGLLANCRFENNLPVITANDEYRKNREGEIQYRSKKPAPLSHPEFEIFRAYQFINNIKYGKNQKLSSDQKQTVLKLINKKDANFDFIKIPQELKLTYEKFNYDDKLKAPSSPTIKQLQPLFDKSVWEENYEQIWHCFYFYDDTDKLFEKLVADFKYNKGIEKLNKVRLKDGYGNVSLKAIRNILPFLEKGYQFDRAVILGGVRNAFGKRWDYFKDYHLQLENEIISILNEDNKDGEAIEKIKEHLSSPVYSYGFSKNDPWFQHLYHHSQDVDNNDELRDYVPEIENLRNPIVQQGLYEVRRVVNSLISKYKKEFGEDFHFDRINVEMGRDLKNNKSQRQKIGKQIRDNEKKNDEARARLSEFGLQSSRANVQKYLMFKEIEERAGKAQCPYTGKIISLNDLLGDRNVIQIEHIIPFSISLDDAFGNKTLSESNFNREKGEKTPYQFYLTNPDSKLWGASSWAEIEARAFRILPYNKAKRFTSKKIFENSSFIERQLNDSRYIARKSVEILSNVCNDVRVMPGRLTAELRHLWGLNDVMESKITLDNVKFDVDEHKPTHYYVTTDENNNILSLQRKTNEKPEVEENSFLLAGLLKKEKFESKNYQLTIAETSLKDGKYWLKLDVGNNIKLVPKYSDKPIINQNEIVFKGRIDRNSFRNDTTGNIRVDMEDGQYWAKFNILDAKFEVPVKDKQPKSKRNQILLYGNVTNGEFSCFIYRCKTNLDDGKYWIILSLDYDNIDFIPTENPVPQTHSGELLITATINENGLLTADEDKDFTKQTDNQNGKYYAVLDISSTDSNNPELFRIENNPPIINKGEKLKEGSIWVDKYTGEIKFDAKKNREDHRHHTIDAIVIALTEQRFLQQLSTYNAQRKDKQRGKLDSTEKFPEPWLNFDNDVRKVVNGIIVSYTKSNKVLTKNKKGFSVRGQLHKENVFGKRCAPNEKDYGYHRKTKITALDTDKKVAKVVDVVIRGLIKKHLQENCNINTNEKYKIPKDAFYKEGKWQIFLPNKNGDKVPVKKVRIRETIGNAVKLKSGVNQHVNPRNNHHVLIYKNKNGDLCENVVAFWDVTKRLINGEKKYQLPKGGEEIITTLEINDMFLLGLSDSEFENNINNGQFLSNYLYRVQKLSSGDYSFRFHLASTILKQEEEWRISSFSAFEKANPIKIKITELGQIKKI

SEQ ID NO: 10358 - protein, 1414 aa, unidentified
  REGION 1..1414: note = Description of Unknown: Cas Enzyme sequence
MAKRILGLDLGTNSIGWGVVDDLGGGQFELIKRGVHIFPEGVKIEKGNEYSKASERTGYRSARRLKFRRKLRKIETLKVLSQAGFCPSLSEEELKAWQSKKIYPANQAFRDWCKTFDPKDKIVDSFENPYYFRWLVATETLDLDEEDDRFKLGRAFYHMAQRRGFKSNRLDAGSEDAIGALRDRGLAVLANGYAEQGELYAAVSSLFMDDEQDAKIRRFQKAVLRGLTSAKTLADALGFLEDFLNKRENLGKVKGEIVDLSAKMGDRTLGQYFWEECYQSGAKIRKVHTSRDEHYLAEFEYICNKQGLADKLKDDLFKAIFYQRPLKSQKGLVANCPFEPKKKRSPISHPMFEEFRMWQTLNNIKIKTQDDEQLRPLSEEEKRLVVPLFFRVSKAQFDFKDISKAIMKTLLPRKQTHAYAKGRDASEAHVLFNYRDNQSLSGCPFSAKLKNLFGEDYKLTITESYCGKKQTKDGLTKSIDDILHEVWHVLFSFDDEEKVKEYAKNKLGLDDERAEKFAKITPRQGYGALSLKAIRKILPYLERGLLYSHAVFFANLDQVVGISADENEKLKADISALIDEHNQYVAEARCVNEFVREYKDNPNAFEQKHDLRKVQEFGAELPEKLRGSTENICRKIRCQILKNNGNGEYLPVKRLDERIGDYLMKEFGVSSTALEKLYHPSAVETYKPAEKHSDGKYYLGDPRISSIKNPVFMRAMHRVKAVVNELLKQGVITDQTLVHVEMARELNDANKRAAIKTWQRNNEKKRADFKKRIEEDLVAAGIMREATEDEILKYQLWEEQNRICPYTGKPIAASEFIGENPKYDIEHTIPRSLSCDNSQENKTLCDRDYNRNVKKKRIPFDCPDYQEILARIEPWQNEVERLNGLIEKKRSASRAASTKEAKDRAIQERVRLELDRNYLREKYRRFTMEEVTSGFKNSQLVDTRIITKYARLYLQTVFSSVHTVNGKTTDDFRRCWGIEKSRDNHVHHTVDAIVVACVTRNQYDQLARFYHDYESYEQNDSSIPAKPHFSKPWKTFTEDMKNLKNEILVSHYAPNHLLKQTKKWIKVHGEKKKVLQQGKTARGSLHQETFYGAIKRIEKDKKGNVEEVIKYVVRKPLSDLSDADLKKIVDDRIREIAIAGRKEEMRLKKEVEVLKKRKQRSDDEEDSLIQHQIDTLEDQLSNIYVLPNKNGSPTPIKKVRIYSNLTNPIKLKAQRDVSGKRSAPYKEKYYVNNDGNYLMAIYEGKNAKGKLVRDSIIVENLSAVKSDARSLVPADKEGLPLKCVVRGGMLVLLLRESEVPADVWDMSDEERAGRMYIVRGLDDDGIKLYFHQEARQTTEVLKHMNAIITESNHRNNILDKNGNVKESKLTTPKGGDVVGLSGDFPYVKFKPSNFNALLEGVDFRVSVLGMINAL

SEQ ID NO: 10359 - protein, 1514 aa, unidentified
  REGION 1..1514: note = Description of Unknown: Cas Enzyme sequence
MGKRILGLDLGTNSIGWGVIDEVREKIVDAGVRIFPEGVVKDSIGKGDKEETKNAARRKHRQIRRQFYRKRLRKAKLLEVLIKQGMCPLSLEELNLWRRWDKSQKARGQKFPDSEEFMKWIRLNPYQLRVKAIDGEVTKQELGRIFYHLIQRRGFLSSRKGDEKESKTLFEKGKPDTNILPINQTRDEMKKKNQRLGEYLNSVLPEEGKPYAMKCDADGKEIRVRGRYATRQMYVEEFEAIWNAQASRLGLDHQTVVYRKVRRLQGDMDSVRNQKRAERLKKEYGGDRVCFEFKGSQTFLITTRDLPLKEFLGGKIWIEDDNLKFKSDESVLFWQRPLRSQKGTLGNCVFENELPVIKLDGTVRRDKNGKPVSSSKKPCPASHPAFELFRAYQFINNIKYGNGQRLTKNQREDVLELMNSKDRDFDFKEVVKKLELYSEQFNYEKDFKVPGNSTICKLSKLDKSKAWESALEQHLVEIWHCFYTYNDSDMLCEKIARTFGVRLDLKKVDKVRLKDDYSRVSLKAIGNILPFLEKGLYYSTAVVLGGVKNAFGTRWDNYLTDETKEKIQSDVLDILKGENREGEVVEKIKAYLSDPKNRYAFSEDAPAFRKLYHHSQDIKKGELQSRLSPIKDIRNPIVQRALREMRTVVNALMSKYREKDPNFSFESIHVEMGRDLKNGKKQRQKLSRIIFENKQKNDEAREWLAEYGLRPSRENLQKMLLFMELEKRAGRAQSPYTGKTMPLSCLLGADNTIQIEHIMPYSKSLNDSFGNKTLCEAEINGMKGDETPYEFYRRNSDPKLWGASSWDDVARRAFALLPYGKARRFVSKEPVDAEKFVTRQLNDTRYIAKKAVEMLLEICGDVHVMPGQLTSELRHLWGLNNILENSVGADRLLSELSEADTGDYYLVLGQDGQAVVLSKRQNKKPNAGKNEILLSGDVEKKKFAAKHLVLKLDAPNETDGKYWARLVLNPNLELSPKYVERPDTGEDYIVFKGMVRKGKFKHDSIPVVLVADQDDGLCWVRLLLKSNRVAKADSNPKTTKKEVKLYGQVKGGIFECYIYKCRTDAPDGKYWLILEPDFDAPQFVRAENPIPEHADNEVVMQGTVDESGMFVPDIDRDYIAKTGKAPGKYYAIVELSSNKPQFHLMENPAPEISKGQRIIEGTVWVDKFSAELKFDPKKNREDQRHHAIDAITIALTKRRYLNELSRYRSKEPPEEFKPVFPEPWNGFEHDVKAAADKILISYRKDDRVMNGGEKDVAVRGQLHKDNIFGEYTNPDNGRPLYHRRKSLAEIKKSAQVKKVVDKTIRKLILEHLRTECGVNIESPKFDIPAGAFFKDGNPRLFLPPNPKKNGNPVPIKKVRVCEEFGNARQLKTGLNQYVNPRNNHHVMIYQSQNGELKECIVSFWDVVIRKKKKLPGYQLPDDGKEIVAVLEQNDMYVIGVASEEIVQHKYDSAFLSKHLYRVQKLSSMDYWFRHHLASTIQNPDEGIRIRNLSRFVELNPIRASISELGAVTLC

SEQ ID NO: 10360 - protein, 1304 aa, unidentified
  REGION 1..1304: note = Description of Unknown: Cas Enzyme sequence
MSKRILGLDLGTNSIGWGVVDDLGDGQFDLVKRGVHIFPEGVKIEKGNESSKASERTGYRSARRLKFRRKLRKIETLKVLSEAGFCPSLSIDELKGWQSKKIYPDNLAFRDWCKTFDPKDKAIGVFENPYYYRWLAATETLDLDSEADRLKLGRAFYHMAQRRGFKSNRLDSTPEREDGVVKKDISELSAKMNGRTLGQYFWEECYQSGAKIRKVHTSRDEHYLAEFEFICNKQGLSDELNEQLHRAIFYQRPLKSQKGLVANCPFEPKKKRAPISHPLFEEFRMWQTLNNIKIKTQDDENLRPLSVEEKEVILPLFFRVSKAQFDFKDIAKALIKSMKPRGQSYAYVRGRDAASAHVLFNYRDNQSLSGCPFSAKLKNLFGEAYKQSIFDSYCGSKQTKDGTPKSADDILHEVWHVLFSFDDEEKTKEYAQSKLGFDDENAGKFAKIMPKQGYGALSLKAIRKILPCLKQGLLYSHAVFFANLDQVIGISADENEKLKADISALIDEHNHYTAEARCVNEFVREYKDSPRAFEENHDLRRVQAFSENIQSDLRESAESICRKIRVQTLGNNGNGEYLAVKRLDERVGDYLVAEFGIATELLENLYHPSAIETYKPAEKHSDGKYYLGDPRISSIKNPVFMRAMHRVKAVVNELLKQGIINDQTQVHVEMARELNDANKRTAIKNWQRQNETDRKKYKEAIEEDLVAAGILREATSDEILKYQLWMEQKETCIYTGKTIKVSDFIGENPHFDIEHTVPRSQSCDNSQENKTLCERTYNREMKKNRIPHDCSNYTEILSRIEPWQKEIERLGSLIEKKRGASRAASTKDAKDRAIQQRVVLEMDRNYLREKCRRFTMEEVTSGFKNSQLVDTRIITKYARLYLKTVFPMVHTVNGKTTDDFRRCWGIEKSRDNHAHHTVDAIVVACVTRGQYDQLARFYHDYESYEQNDPSVPSKPHFSKPWETFTEDMKALKNEILVSHYAPNHLLKQTKKKAKVRGEIVMQQGQTARGSLHQETFYGAIKRLQEDKKGKVEEVIKYVVRKPLADLLDIDLKKIVDDRVREIAITGRKEESRLKKEIEALRKKKPTSDEAGELVIKQQIQILEDQLSGLYALPNKNGNPIPIKKVRIYSKLTKPIELKAQRDTSTKRSAPHKETYYVNNDSNYLMEIFEGDRRREFELYRNIEAVNGKLPQSNNRLCLKKGQLVLLYENSPDEVWNCSPIEVAKRMYIVQGMSSMTLQKKYTYGVIILLHALESRAVSDLKVQDGDFSSDEPYVPQRKVLHTRFKALVAGYDFELTSLGDIRRL

SEQ ID NO: 10361 - protein, 1371 aa, unidentified
  REGION 1..1371: note = Description of Unknown: Cas Enzyme sequence
MKKILGLDLGTTSIGWAYVNEAETDDEKSSIVKLGVRVIPISTDEESDFMKGKAISINADRTLKRGARRNLDRFQLRRDALIEKLGEIGFIETYSSDDSKSSDEFNYLNEEGKDTTHSSYAIRAKAVNERITKQEFAKVLLMINKKRGYKSSRKAKSEEEGMAIDGMKIAKYLADNKLTPGQYVYKNLKDGKKYIPDFYRSDLKNELDKIWDFQTQFYPEILNDDLKEKLEGKNKGQTWKICEEPFSIVGVKQLGSATEKKFEKYLWRSDALVKKIELEQLAIILQEINSDINASSGYLGAISDRSKELYFKNQTVGEYLFEQLKQNPHTRLKNQVFYRQDYFDEFEKIWDKQKEFYPELSDDLKHNIRDNIIFYQRPLKSQKHLISNCEFEEHHKAIPKSSPLFQEFKIWLYLNNIEYINLKTRKKSPLRDGEKEFLFNELNIRSKLSSSDIFKLLDLKPKEHELNYKEIEGNRTNAEIYHVYQKILEYEGEDVDFSKMKSEDINYVVNTKFLEIGIDPNLLVFNTDLQGNEFDKQAIIQLWHLLYSSEDEGKLVEKLSNKFGFKKEYARLLANIPLQSDYGSLSSRAIRKIITGLKEGHTYDIACDMAGYNHSSSLTKEELANRELKNTLELLPKNSLRNPVVEKILNQMVNVINAIIKDKSLGKPDEIRIELARELKRNAKERGDMTKRINKVTTDHEKIRKILHNDFGITKVTRNDIIKYKLWVELESNGYKTLYTDTFIRKEELFSKKFDIEHIIPKAKLFDDSFSNKTLSVRQINIDKGNETAYDFLKESLNQADFNQFLSRIERLFKSKNISKAKYNKLKMKLSEIPDGFIDRDLRNSQYIAKKAKQMLEDVVRTVNTTTGSITNRLRSDWQLVNVMKELNMPKYEKLGLVKTIEGKSGRPEKQIIDWTKRNDHRHHAMDALTVAFTSYSHVQYLNNLHAREDKLSKVYGIETKYLHRDNNSKLIFNSPMPLSEFREESKKHLENILVSFKAKNKVVTRNKNRIRVNGKDKLNEKIELTPRGQLHKETVYGKIERYKTKEEKIGTKFNLAKIKQVAKQSFREALLIRLEEFNGDPKKAFGGKNSPSKNPILIKNNDSTLTDSDAITNKLPDKVKLVWKEVEYTIRKDISPELKLDKVIDVGIRNILAERLKKYGGDAKKAFVNLDENPIWLNKQKGISIKRVTISGVSNAEALHYKKDHYGKLILDEDGNKQAVDFVSTGNNHHVAIYRDEKGNLQEEVVSFYEAVHRVNEGLPIINKGNKKGWEFLFTMKQNEYFIFPSDTFDPEEIDLFDPKNAYLISNHLYRVQKISIKNYMFRHHLETNVESKEELKNVAFIHLRNTGAVQNLIKVRINHLGQIIHVGEY

SEQ ID NO: 10362 - protein, 1566 aa, unidentified
  REGION 1..1566: note = Description of Unknown: Cas Enzyme sequence
MFSQRNNPYCELLQFVEQIYKIIHNKSIMKKILGLDLGTNSIGWALIERDFTTKIDKTLGKGKILGIGSRIIPMEPEMFSRFGSGLPLSKANAGIAYTPSGKRTDYRGARRLRQRYLLRRERLHRILNILNALPKHYADKLDFKNKKGQFIDNVEVKLNYAKTEQNKYEFLFKDSYNEMVQEFKKKQPGIFYKKKNGEETKIPYDWTIYYLRAKALREKISLEELTWILLNFNQKRGYYQLRGEENEEDKTRLVEFHALEVVDVKAEEPNSKNEIWYNVKLKNGWNYKRKSKNPLDDWIGKTKEFIVTTSLDEQGNPKKDKEGDIYRSFRFPKEDDWTLVKTKTQNQIESFNSENNTVGVARYIFDTLLTNPKQKINGRLVKTIERHFYKDELTAILEKQKEFHKELKDTNILENCIKELYPNNYAQQNILRQKDFTNLFVNDIIFYQRPLKSKKSLIDGCKFESRTYKNKDGIIESKPIKVIHKSHPLYQEFRLWQFVENLRIYKREGFVDGKLTTDIDVTDEFIFDTKAKVSVFKVFNDREKITQKQFLGLKVLLGKKLSEKEYRWNYVEDKEYPLNETRALFISKMKKHKDFDWEKYLTQNNEIRLWHLLYSISDKEELERALDNENSKLGLPVEIRQEFKKVKPFTNDYGAFSEKAIKKLLPLMRMGEYWDYNNINSQTKERIANIITGEYDESIRNRVREKTINLQDESNFAALPLWLASYIVYDRHSEDANNLQWKTPKQLKNYLTEFKQHSLRNPIVEQVVTETLRVVEDIWQYYGKGEEKFFDEIHVELGRDMKNPADKRKRLTEHVTKNQNTNQRIRFLLREFKSQGVEGVIPESPNQQEKLRIFEGDILSQFTDRDLEKEKQDGVQISKIIKSTELTSREIEKYKLWLEQRYRSPYTGQVIPLSKLFTTDYEIEHIIPQSRYFDNSLGNKVICESEVNRFKDRMTAYEMISKHPNRLIDLGSNKSVKLLSLEGYQDFISRNFKTGSKKQNILLSEDVPEKFISRQLNDTRYISKLIKGLLSNIVREDDEQEPTSKNVIAVTGAVTSILKNDWGLNDKWNELIEDRFKRMNEITGTNDFGYFDNEKGFFRTDVPLEQKKDFNKKRIDHRHHALDALVVALATRNHVSYLSNEHAKSDNKRYDLRNKLRRVEDKKIKDRTIKISKEYFKPWNNFTIEAKNSLDNIVVSFKQNLRVINKASNKYQVWKEDKGQLKRSIETQKGINWAIRKPMHKETVYAKVNLRNTKDIAINAAIDGYFQGDFVFVNKILKNKIKSLVNENYNSVRIKKYFKENRFNDEKLKKVSVYYQDEQFSAVRKKIDESFKSSRWIKESVTDTGVQKILVNHLKKYNNIDENGKLKERPDLAFSEEGLIEMNKNIIELNGGKNHQPIYKARIYETLGNKFAVGIKGNKTDKYVEAAKGTNLFFAVYIGMNKKGERVRQYITVPLNIVIERQKQGEGSVPDKYYDNNNIEYSLLFNLSPNDLVYVPTDEELENINSINFSSLSVGQKKRIYKMEKASGKECYFIQHNISSLIKQYDAKSKIGEFGSQNKLQTTTEG

SEQ ID NO: 10363 - protein, 1475 aa, unidentified
  REGION 1..1475: note = Description of Unknown: Cas Enzyme sequence
LVERDFEEKKDNALGEGDILGMGSRIIPMDQGVMDDFGKGITKSQTADRTEYRGVRRLRQRHLLRRERLHRVLNIIGALPKHYADKIDFENKKGQFINDVEVKLNYKKTELNRFEFLFKDSFNEMVEEFKAKGQETKMPYDWTIYYLRKKALEEQISLQELSWLLLNFNQKRGYYQLRGEEEEIDKTKLVEFYALKVVKVTAEEANSKNEIWYNVFLENGWIYRRKSKDSLSGWVGKMKEFIVTTTLEEDGSVKKDKDGAEKRSFKAVNSEEDWIAIKKSTEEKIENTKQFVGTYIYNTLLKNPKQKINGKLVRTIERHFYKDELIAILEKQLEFHMELNRELLEKCIVELYPNNYAQQNILKQKDFVNLFVNDIIFYQRPLKSKKSLIDGCKYESRVFRNKEGDFETKAIKVIHKSHPLYQEFRLWQFVSDIRIYEREKTVNGILKTDIDVTSEFITDENARVELFDFFNNKAKIKQKTFLANYKDEYGKKLSEAKYRWNYVEDKEYPLNETRALFISKLSKDKDFEWERYLTKENEIKLWHLLYSISDKKEIERALKIEEKYKNDIVFGLPFEIRKEFARIKPFANDYGAFSEKAIKKLLPLIRMGKYWSVNDIDDNTKDRIEKIINGEFDEKIRNRVREKAINLNSIEVFKALPLWLASYIVYDRHSESSDNAKWETPKQLDLFLKEFKQHSLRNPIVEQVITETLRVVRDIWAYYGNGKEDFFDEIHVELGRDMKNPKNVREQIAKNVTGNQNTNERVRALLREFKNENIEGVIPHSPSQQEKLKIFEEDILNQYSEKELEREVYDGVNISKVAKASEPTAKEIQKYRLWMEQKYRSPYTGQVISLSKLFTTEYEIEHIIPQARYFDNSLGNKVICETEVNKFKGNQTAFEMISKNPGRKIDLGQGSSATLFSLEVYQNFVSESFRKGSKKFKILLSEDVPEQFISRQLNDTRYISKVVKGLLSNIVREEDEQEATSKNIVAVTGGVTTILKKDWGLNDKWNEIVQPRFERMNRLITKEGEELSTVFGKFDKKANFYRTDVPKELKKNFNKKRIDHRHHAMDALVVACATRNHVGYLNNEHAKSDNKRYDLRNKLRRVEEIERNGTKIKVSKEFYKPWGNFPIDAKDGLENIVVSFKQNLRVINKATNWYQTYYDENGDLRKDKAGNPKKEFIRQTKGDNWAIRKPLHKETVSGKVGFPAPKGKIAAATRVSLSDIKTEKHLEKITDVSIRKILEKHVTNYIDDEGKANFELAFNQEGIDELNKNIKTLNNGKNHQPIYKVRLYEVGSKFNVGYVGNKKDKYVEAAKGTNLFFAVYENEETKKREYETVPLNVVIEHQKQDALLPKNERTPIPINKEKGKFLFVLSPNDLVYVPSDDEIENPNSVDYTDLSKEQKERVYVVNDFSSAIYFTPNQLAKHIAPKEVDLSYDAKKEKLTGSFDTKTASMNGVQIKERCWKLKADRLGNVVKVGE

SEQ ID NO: 10364 - protein, 1056 aa, unidentified
  REGION 1..1056: note = Description of Unknown: Cas Enzyme sequence
MLNEELILGLDLGVNSLGWALLKCDSKSKDIVGLIDAGSRVFEAGMKGDISTGKASTKCAERRDARSIRKNIARHRQRMNKLKNLLQNFELLPKGKNIEQIILKVDIQARDFFNTIPTNIKPEQEILAHTSVYYLRALASEMELPPFLLGRAIYHLAQRRGFWSNRKSQTEEKELGTVKEGISELNELMKANKAETLGQYFAFVNPMQTKIRGLWTSRKMYKNEFGLIVKKNSALLNDKQVKLLEKAIFFQRKLKSQKSLIGMCTLETNKRRCSKYRREFQEFKYLQSINNLSLITYDGEQRFLSSDERNTLQQILSGVTEQLDKNCNLSLAKTKKLLGLHKKTKFSIESGGEKTLKGDKTSGRIIRIIGVKKWLNLSNSEQEKLIHDLHSFEKVEPLAKRLAKTYNISDENAELLTLVTLDSDYANLSLKAIKKILPKLREGVVYSEVVKEVYPNAFLSDGVIKDFLPQLSHYTENLRNPIVQRCLSEVRQVTNAIIQKYGKPGTIRVELARDVKNSKKVKERITQRNRDIEKERKKVLNKIQEEFPGLSVSRNDETKVLLAEECGYKCPYTNKPISLSSLLGPNPSFDIEHIIPRSRSLDNSFLNKTLCYHEENRNVKKNKTPYETYHGTEKYDKILDRVSKFNGNLKYRKLELFKMTPEEVQAKYEDFSNRQLNDTRYASKEAAAYLGLLYGGVIGTDGKRRVNVLSGGLTAMVRSFYGLNGILNDGNIKSRNDHRHHSVDAIAIGVTSAGMVKRLADSVRIQEEQGTATNYHPGKFKEMKSWPNLLEDSRQIISDILVSHHVSKKIRGALHEETFYPKNHEHLVKNKPQNYRHMPVELPNLQEKQIDMIVDDGIKRLIQERLNLLQIKDPKKAFRNFENIPELISKDGEVRIPIRKVRIKRKQNTVSIGDSNSTRNVVTGNNHHMLIYAILDKDGNDVKWEGEVVSLLEASDRLRNREPVVNRNVGRGKRFVMSVKCGDIFEMDIKGQRELVITRTVPKTKQLNFARVNDARLKKDMLKTSSWFSKIPNSLRTSNPIKFSITPLGELRRAND

SEQ ID NO: 10365 - protein, 1034 aa, unidentified
  REGION 1..1034: note = Description of Unknown: Cas Enzyme sequence
MKPVTILGLDLGTSSLGWALIQQRKVDGHPYIRVDGIGSHIFEAGMDGDIHAGREESRNATRRTKRLIRRQYDRRRRRMIKIRNLLQQAGLLPKEKDFATVILKLDAQALILLGKTQGINKQTLAHVAPYALRAQALDKKLDTFFLGRVFYHLAQRRGFLSNRKEKLKKGEEDEAGVVKQGIEDLAAAMKQAKARTLGEYFAGIDPETSRIRERYTHRAMFMSEFDAIWKKQKKFHPALLTDELYRDLHKAFFFQRKLKSVRRLVGDCTYEKGSKRCPWYRPEAQRFRILQAVNNLRILPADGQFRPLTEEERLILCRELEENESRTFTQAKKALGLKPRAVRFDLEEGGEKRFLGNTTQAKMVKLFGGQWLEWDEAQQEKVLQDLMSVEKDEVLRKRGAIYGLKGPLLDDFCELILEPDYCSLSRKALKKLLPLMEKGMPYMTAVATIYPERNTQEKANGVLPSVDQVMPGLRNPVVHRCLTEVRQTVNAIVRKYGIPNRIHIELARDIKSTKKERTRRTKTMRENEGRRLDAKEKLLQHLGIQDPSRDDVLRVLLADECKWVCPYTGKSFGFNDLPNMDIEHIIPYSKSLDDSYINKTLCDPTYNRTVKRNKSPYESAFGTPRYDAMIENVKRWAFHDSATREKLRRFELDDLSEFEDFTARHLNDTRYASREAAAYLGRLYGGRVDAKGRQRIFTISGRITAKIRNAFQLNGLLGGDRKNRDDHRHHAVDALVIALTKADAVEALSRAASRTYDTRIHFNLDEVAGEGFLDHVREKIDGITVTHHVNKKARGGLHKDTLYGHRGDGLCSHRVGLGDLSQKDLVPERIPDPGVLAGIQAKLKELGESNPAKAFKEGGNLPRVLDADGKPGKVIRRVRLWINSTAFPVGSGEQIRYVQTDSIHHVEIVANLNKKGEETGWKGIVVPMLEAYQRKRRKEPVVKRDHGPGTRFKFTMAGGDVFEMEYEEGCRECFIIRSTASSGQFWFVRLEEARKISDLKKAHQWFSKTYSTFQDMKPRKVWFTRLGEMRTAHD

SEQ ID NO: 10366 - protein, 1144 aa, unidentified
  REGION 1..1144: note = Description of Unknown: Cas Enzyme sequence
SHNPNHIIMSKILAFDIGHASIGWSVLESPSPTKAPEILGTGAVLFPTDDCLASQRRSFRRTRRHIRATRQRIERLKRWLEHRGVLNRPDLDKPGHPAPFLLAASALRGHRTLNAWELWTVLRWYAHNRGYDGNARWSSHPEDIDDEDTEKVGNARELMKTHETRTMAETVCACLKLDPSKPKKRISSWLPYKTLNAAFPRETVEREVAELLNQHIGKIPGLDGKTVRLILKNNELSKDDRAALAQAGVKLPLRHQGGLLFGQLVPRFDNRIISTCPVTYAEVFDRELSAGKSEAEARRTARKESKVPAARCREFLEYRFARILANIRADGKPLDAATRRRLFESAKRQGYLTAHELKKEINRILGEVPTNLENYFKLHPDSEKALVMDPAAKLLSTNRTLKPLLEHLPETVRAKALRKWRKNRPVLLGQLLEWSQTCGPTDALEDELRKLHAKNTKKGKRKGWSFEQYLMEAIRPEDVSGRAPYARPVLRRVVEEVLRGEDPTKPARSPKHPEGETKPADGVLYALLDPRSRVRQLQNDRPLEELTNNHLVRHRLLILERLLDDIVEEYCGGRPEQVGRVVVEVGRELKELSGKTAKEIAAELKGRLKDFKAAVTHLEKFAPDLTPTGGLIRKCRIAMDLGWQCPFTGDRYEAQDLPNLQREHIIPYASRATNALHALVLTWPEVNAMKGKRTARQFIKDDQSKPVPGRENLSIRSLRSYDEFVDKLDTKGHPDDQRRKKARKALLQTTEFDERDQDFTPGQLTESSHLMKLALRGVAKRFPAAACDPIPGIVTSLLRKSWDLAGTLTLACPEIETEDESGRKRTLPKGEIRDITHLHHALDASVLALAAHYLPLQHRGRDVKGLLWQGLLKRNPSPEEARLLETLPITRRTAKGGFEVVPPPASVKENLARRLAECRVMQHVPADRSGAKAELNTWGVVTEEGDRTIIIQRLNRTQLELDDSHPQRRWKDKKPSKECLLLLEKFGDHLTPRQRNLVRRGLLKLTSERTEKLIGPHPTSSPAKLIAIKGAIIIANNFGTTLAEPPATIVFHSVSNQLSELRKTNPQTRILRPGMLVQLRNQGERDGIWKIYTVMASLKIDLTRPEIVGRPKKGTTVWREVRIEKLLEAGLEILPRRYTGHPRQ

SEQ ID NO: 10367 - protein, 1454 aa, unidentified
  REGION 1..1454: note = Description of Unknown: Cas Enzyme sequence
MTKKIGIDLGSSSLGWFIREDDKIINNGVVTFKTGMVKGQGGYSSPTKDRREARSKRRLIQVRKYRKWALLKILVGLDYVPLKQEELENWSKYKKGEKRKFPESGVFKKWLACDFTYLENGIKYKNPYELRVKAIDSKLSKHEFGRALYHLIQRRGYKDIGESDKETEKQIERREGEGFGKALEENKFISKALKVEFLDKGKRARNEYPYRAEYEDELIAICKAQGFDIFKDDKKEYNDEFVKQLCKAIIWQRPLRSQRGNIGKCTLEPTKQRCPASHPIFEIFRTWSYINTIKYIDAEEKKEIPIRFREKLFKEVFLKKDNNFKFDVVQKHLDKLFEEKKEYNYLNRSTKKYDSTVSGMPVCKGLIKLFGGKIEEEIGQLYSYNIGTKEHNVYKNYSVYDLWHIIYDFEDDYLEKFAINQLDKPNEVSTNKKGETTEYNSVVKFKKSNFSTSYSDLSLKAMCKIIPFLQEGFLYNEAVLLAKIPEVYKGWKENKDLIYKLIKNANEKYSYNKTIVGISNNLINKYKALTDGDKSARKDYSYMLDDSDLNEVEKTCISTFGNNTWDENQNKEEIISEVSKYYQGFFSDTKRTYIELPTLASLIEDEFKNKGIEIDGEELYHHSDRKSLYSEPIFSKKYAKYLLDIPLIDSIKNPMFNKSMSVLRKLINELIVQEYVDNDGVIQGYIDEDTEVIVEVARELNDNNKRIAIERYQNERENNRTKYREFINEFKENNIKYKNLDVDDNISVFEMWIEQVFEKTYDEQGNEMSNESASEIRKEKDAIKRYELWIEQKGQCMYTGKMIGISQLFSREIDIEHTIPRSLLPDNTMANLTVCYSKYNSDIKNNKIPTACPNYGIDTDEGTAIEPRLKNWIKIRDNYKKLYKDRTKPFGNEDEEKKNKRIQEKHYFRMHFEYWKDKVNRFTTDEIKDSWVRRQLVDTQIVSKYAREFLKTYFKKVVVQKGSITADFRKIFGFQQEDEIKNRNKHTHHSIDAAVLTLIPTNSSKRINMLNEMYKAQEKKQKIKRKDPDGFSDFNAQALIEEIDNNTLIVNYQKDKIMEQTYRNVRKRGKFQYLKDKNGKDILDENDEKILLKAKGSSVRGDLFQDTFIGKIRDVERDENDKPIRNDDNSFVFKKGKEEFEFTKRVPIEKAKVEDIIDIDIKNRIKKQKEGGVDIRKMKDQQGNIIRRVRVKTKAGKKVKERLSYKSKYDYKNAYYSASGEIPYAIFLTKSDADGKSVERKMIPVAIHEVAQVFKDIHKFDIEYYLNKFHPDLEKYQDVKWLKVGQKVFVLKKDDEFGNRKEIEFQMNRMYVITQFKYDGSKILLKYHLEAQSKSDIDMRVKEIKSNILCEIEKKLEIEPIIENKNIENGSDRKKDYDKRKIDFNARLKIIEVKTNKGTARKYKEIIENYKTESSQIIEEGGTSILGFSKNNWNFLFENYDFEIDITGKLSWAK

SEQ ID NO: 10368 - protein, 1336 aa, unidentified
  REGION 1..1336: note = Description of Unknown: Cas Enzyme sequence
MSKRILGLDLGTNSIGWAVVDEIAGDQFELIKRGVHIFQEGVKIEKKGNESSKASERTGYRSARRLKFRRKLRKIETLKVLSQAEFCPSLSEEELKAWQSKKIYPVNQAFRDWCKTFDPKDKIAGSFKNPYYFRWLVATEILDLDKEEDRFKLGRAFYHMAQRRGFKSNRLDTTQESDGIVKKDITELSEKMGDRTLGQYFWEECYQSGAKIRKVHTSRDEHYLAEFEYICNKQGLSDKLKDDLFKAIFYQRPLKSQKGLVANCPFEPKKKRAPISHPLFEEFRMWQTLNNIKIKTQDDVELRSLSEEEKNSIAPLFFRVSKAQFDFKDIAKKLTPRGQTFGYVKSRDRDAHILFNYKGNQSLSGCPFSSALQRIFGDDFKASIYKMYQGERINKIGEEKTPDDVLHELWHVLFSFDDAGKVKEFGCSKFGLDDELAEKLAKISPKQGYGALSLKAIRKILPYLKQGLRYSHAVFFANLNEVIGTKVEDHEDVKNAISRLIDNHNQYRDEARCVNEFVREYKNSPQSFEQNYDLRKVHEFQKNLPQVLQNKADEICTKIRQQISLNNGNGEYLSIHRLEDRVGDYLIEQFNIKPDLLEKLYHPSKEETYKPAEKHSDGKYYLGDPRISSIRNPVFMRAMYRLKAVVNELLKQGVITEQTQVHVEMARELNDANKRAAIKTWQRINEKKRADFKAKIEEILEGQGIEREASDDEILKYQLWEEQNHICPYTGSMIEPSEFVGENPKYDIEHTIPRSLSCDNSQANKTLCDRTYNREIKKNKIPCNCANYNEILPRIEHWKKMVEELDKKIENKRRASRGATTKEAKDAAIQQRVVLEMDRNYLREKYHRFMMEEVTGGFKNSQLVDTRIITKYARLYLKTVFPTVHSVNGKITDDFRRWWGIKKTRDNHAHHTVDAIVVSCITRKQYEKLAQFYHDYKSYEQGDPSVPRKPHFSKPWEFFTEDMKNLKNEILVSHYAPNHLLKQTKKWIWIKVHGKKKKVLQQGKTARGSLHQDTFYGAIKRQQKNKKGEMEEVIKYVVRKPLADLSEADRKKIVDERIREIALNGLKKEISLKKNLENLKKQIPKVDDIEEAIIREQMKEIEKQLVSLYMLPNKNGNPIPIKKVRICSNLTNPISLKKQRDVSEKRFALHKEKYYVNNDGNYLMAIYEGVDKRGKIIRDYKLINNLSAAKGALPEGKYRGLQCLKIIKNGQVVLLFKDDPAELMKMSQNELSQRLYIVRGIDDDGIKLYFNQEARMTTEVISFMNKIITEENRINGVFDKNGDVKKSKLTTPKGGDVIDRQNEFSYVKFKPSRFNALLHGIDFKMNVLGEVEFMEK

SEQ ID NO: 10369 - protein, 1318 aa, unidentified
  REGION 1..1318: note = Description of Unknown: Cas Enzyme sequence
MAKRILGLDLGTNSIGWGVVDDLGGGAFELIKRGVHIFQEGVKLEKGNESSKASERTGYRSARRIKFRRKLRKVETLKVLSAAGFCPLLSVDELKAWQSRKVYPENPAFRDWCQTSDPKDKELGSFENPYYYRWVAATQKLDLDDEADRFKLGRAFYHMAQRRGFKSNRLDSTPEKEDGVVKKDISELSKKMDGRTLGQYFWEECYQTGEKIRKVHTSRDEHYLAEFEFICEKQGVSDELKKALHRAIFFQRPLKSQKGLVASCPFEPKKKRAPISHPLFEEFRMWQTLNNIKIKTQDDEKLRPLTPEEKSCVLPRFFLARNHFDFKDIAKVLVKTLNPRNQKHAYAKGRDAAEAHVLFNYRDNQSLAGCPFSARLRGLFGDDYQQGIYDSYCGEKKEQKSPKDILHEVWHVLFSFDDEEKVKEYAKGKLGLDDDAAKTFAKINPPQGYGALSLKAIRKILPYLKQGLLYSHAVFFANLDQVIGVSADENESLKADVSRLIDEHNRYVAEARCVNEFVREYKNSPQAFEQKYDLRNIQEFEEKIPNDLRCFSESICQKIRFQILENNGNGEYAPIKRLDERVGDYLIDHFDVSSDALEKLYHPSAIETYKLAEKHSDGKYYLGDPRISSIRNPVFMRAMHRVKAVVNELLKQGVITDQTQIHIEMARELNDANKRAAIKWWQRNNEKKRKDYKAAIEEVLSGQGIHREASDDEVLKYQLWEEQKHVCLYTGQTIKPSDFIGENPRFDVEHTIPRSQSCDNSQENKTLCDRDYNRNIKKNRIPFDCPEYEVILQRIEPWQDQIDELTKLIEKQRPKSKYAATKEAKDTAIQKRLLWEFERNYLRGKVRRFKMEEVTNEFKNSQLVDTRIITKYARMYLKTVFGAVHTVNGRTTDDFRRCWGIEKSRDNHAHHTVDAIVVACVTRDQYDKLAHYYHDYESYGLNDPSVPSKPHFSKPWKTFTEDMKELKNQILVSHYAPNHLLKQTKKRAKVRGKIVMQQGKTARGSLHKETFYGAIKRPEKNKKTGEVKEVIKYVVRKALADLSDSDLKKIVDDRVRSIAVAGREKEGWLKRQIEVLRKKKSTSEDAENIIIVKQIKELEDQVVGLYALPNKNGESIPIKKVRVYSNMTNPIPLKAQKEVSQKTPKLHKQQYWVNNGENFCIVIYEGIGRTGNRVRAFRAFSNYAVTNQAKEVGDVAFSKRFDSLDKNGVSLEYKYEMQPGTPVLFCDGCELADLKQLSASDISGRLYFMYGIKGDDGRSKFRFHQEARLDKEQESPVSIVDVNNPASKVWISASKLDVLVGGVDFKMNVLGEIEFVEG

SEQ ID NO: 10370 - protein, 1360 aa, unidentified
  REGION 1..1360: note = Description of Unknown: Cas Enzyme sequence
MKKILGLDLGTTSIGWAFVNEAETNSEKSSIIKLGVRVIPLTTDEEGDFLKGKAISINADRTLKRGARRNLDRYQLRRNALISILIDHNFITKDTILSEEGKNTTFSTYEYRAKATKEKISKNSFAKVLLMINKKRGYKSSRKAKPEDEGVAIDGMKIAKYLYDNNLTPGQFVFKSLNDGNKYIPDFYRSDLQNELNLIWNAQKEYYPEILITELKEAIKDKNKGQTWKILEKPFSITGIKQVGKIKDKKKEQFLWRNNGLSERLDLEQLAIVLQEINSYINTSSGYLGAISDRSKELYFNNQTVGEYLYNQLKNNHHTKLKNQVFYRQDYLDEFNTIWEKQKTYYPELTDILKSEIRDIIIFYQRRLKSQKHLISNCEFEKYHKTIPKSSPLFQEFKIWQILNNIEITNNSTGKRLFLNHEKKEILFEELNIKTKLTDKEVLKLIVNAPKEYKLNYKEVEGNRTNAELYKVYHQILESEGEEYNFSKMKSNDINEVVSSKFLELNIPTEILFLELNKSGNIFDKQAIIQLWHLLYSFEGDNSKTGTEKLIQQLIAKFGFKSEYAKLISNIPLQADYGSLSAKAIRKILPHLKDDNTYDLACGNAGYNHSYSLTKEEREKRMLKNNLDLLPKTSLRNPVVEKILNQLVNVINHIINDDKLGKPDEIRIELARELKKSAKERSDMTMSINRASIEHSRIRNLLQADFGISKVTRNDIIKYKLWKELESNGFKTLYTNTYIPKQELFSKKIDIEHIIPKARLFDDSFSNKTLSARQINIDKGNNTAYDFLREKLSTDEFEQYLARIENMYKAKNISKSKYNKLKMKLSEIPDGFIDRDLRNSQYIAKKAKQMLEEVIRTVNTTTGIITDRLRSDWQLINVMKELNLPKYKKLNLVETIEGKNGQLETRIKDWTKRNDHRHHAMDALTVAFTSYSHVQYLNNLNARKNETHKEYHNIYGIEQKYLYRDNNNKLLFIPPIPLNEFRSEAKKHLENILISFKAKNKVVTRNKNRIKIKGKDEYKEKVELTPRGQLHKETIYGSLKKYKTKEEKVNSKFDINKINLVANQSYRDALLSRLLEFEGDPKKAFGGKNSLAKNPMYINDTKTIEVPEKVKLVWKETSYTIRKDINPEIKLEKIIDVGIRNTLKDRLDAFNGDAKIAFSNLDKNPIWLNKEKGISIKRVTISGVNNVKALHFKKDHNGEYILDKNGRMQVVDFVSTGNNHHVAIYRDNKGNLQEEVVSFYEAVHRVNARMPIINKNHENDWEFLFTMKQNEYFIFPSEDFDPSEIDILNPKNTGIISPHLFRVQKFTSRDYFFRHHLETNVEDKKELKGYAFKRLGLSGIENITKVRINHLGQIVKIGEY

SEQ ID NO: 10371 - protein, 1119 aa, unidentified
  REGION 1..1119: note = Description of Unknown: Cas Enzyme sequence
KIRKNYTAREEHYEKEFYKICKVQNLSQEITDELHKAIFFQRPLRSQKGLIGKCSLEKNKARCLCSHPLYEEYRMYCFINNIKIKTPNDEKLRSLTKDEKDKVIPKFFRVSKKHFNFDDLAKSLIGNQDYAFYKSQEANDSDYVFNFKSHTTVTGCPVSAAFKNLSGDDWKEKTFTYETTNAKKEKVIRTVNYHDIWNILSSFDSDKKIRYFAEKKLKLDKKGVKKFCSLTLKKDYASLSLKAIKKILPYLKQGLIYSHAVFMANLEKIIDKCIWKNETNRKKIENGIKQIIEEHNDNTKMINAVNSAIKSCKEKNNYYTIDNNNSYKDILEENLKNIFGEKSWDILENKDNISVNSFKMFVKYFKENKYVSAKRIDEEVIDFILGKNDTGELFCSDERRIEKLYHPSDIEIFKKPKKAEDGKYYLGSPMIPSIKNPMAMRALHQLRKLINQLIKENRIDENTKIHIELARELNDANKRKAIKKYQEDREKKRNEYVQKIIDLYKNECKDVKVSPTEEDILKYQLWEEQNHICLYTGRNIGICDFIGQNPSFDIEHTIPRSKCNDNSQLNKTLCENQFNREIKKNKIPSELANHDEILQRIQHWKEKCEHYEMLYEIRRRPKGLEDKEHKDKRIQEKHYFKMCIDYWKGKYKRFIMEEVPDGFKNSQLVDTGIITKYSKVFLKSIFDKVYSIKGSIVADFRKAWGIQDEYKKKERSNHVHHCIDAIVIACLTKNKYDKLAHYYREEEKWERNTLASRPHFQKPWKTFSEDMKIIENGILVSHYTPDNLKKRAKKKSRKRGKIVYNSKDKPIYLRGDSIRGSLHQDTFYGAIKQPIKDENGKIEFDKNGKMKLKKDNDENDVIKYVIRKELVKLKKTDIKNIVDLNIQMIIEDAIKNKILVISENNSKVNGIVWQNKEKQIPIKKVRCFAIGIKNPIALKKQSNVSKKPNMEHKKSYYVNNDENYCMAIYEGKNKQGKIIRSFKLISNIEVAKGYKKQDNKEIIPSIIEIGKKSKTILSKKGVLKKGTMVIFYKTSITEIWNLDKKEVRNRLYKITAFESDGRIQFLFHQEARPVSKLEKFSVIDFDTPKEKLRLSLSKCNILIENIDFKLTSLGKIEKC

SEQ ID NO: 10372 - protein, 1297 aa, unidentified
  REGION 1..1297: note = Description of Unknown: Cas Enzyme sequence
MAQILGLDLGTNSIGWAIVENNKVENKENFKLKDKGVVIFSEGVKLEKGNEISRASERTAFRGARRLKFRRKLRKFETLLVLSKRGMCPLTEEEVIAWKKSGFKDYPNNEDFLNWLQTDDEKQKHPYFFRDKASKETVNKLDLGRAFYHLAQRRGFLSNRLDQSDKGIIEIHKPILLDILEECETITELTLTIKEYFENIEIANKKKKDLDAGGQKLHSLYFSFQKILKEKEDIESIKNKIRDRLNKKENLGKVKQGIDNLNQKIKNGNFKTLGQYFHSIYGKSNQRIRNQYTAREEHYLEEFEQICKVQGLGEVNESENEPNKKYNGLTLDLYKAIFYQRPLKSQKGLVGKCTLEPTKYRCPISRPEFEEYRMYQYLNNFKIKTPVNEKLRELTDEEKEIIKPLFYRKSKTSFDFEEIVKKLIPKNEKAVYYKSKEASTSKYVVNYKLNTSISNCPTIAHFKTVFGGDWKTLNYSYTTTDKKGLEKVRTINYQDIWHVWTTFTTNPKLYDFALTKLGLTPKDALKFSKVTLKKDYASLSLKAINSILPYLKDGLIYSHAVFMANMKNVVVKERWDNEDDRKLIKSEIKKIIDSHQIENKLLFVINGYIKTNFKNAYSKEADAIYRKELEQSFEFEFGKKKWQTLNTNGLFEENYLLFVEQFKNKTFLKIKRIDEKVIDFLSDHDLLRNKSKLYHPSDIEKFKLEKIKNKDGVEFTVLGSPLSNSIKNPMAMKSLHKVRKLINTLILEEKIDENTKIHIELARELNDANKRKAIQKWQTKKEDLKKEYSKKIKELYKEDYVPAEVDLLKYQLWEEQRHICLYTGNTISVEEFLGENPKYDIEHTIPRSVSIDDSQMNKTLCENKFNRNKKKNQIPFQLVNHSEIMNRISHWKDRFEKLETEIKGLVRASKTAADKEAKDRIIQKRHYLKMEYNYWKGKYNRFELEEIKAGFKNSQITDIGIITKYAQQYLKSYFKRVYSVKGTMVDQFKQAWGIKKTIKDEDGIERKDRSNHIHHCEDAITIACMTKNKYDVLAHAWGLEEKEKFNKAKKELEYSKPWKTFSEDVKNIYNEVLIVHSHKDKVPIQSKRKLRKRGKIQFKVTYKKDELGRYIKDENKKIIENYHYLKDIHNNKIPILGKKDKDNPDFILHKFLDDNSGAIKYEIFKPNSEIVKTNSTKFIEYRKYVINKKTNEIIYKRQPIFLQGDTVRGSLHNDTFYGAILEQNSKNNKTFAQNKEGNGIVKYVVRKPLNGLKEKDVKEIVDPIVRGIIENGIAKKNIKLKTVQSSKVISLEKDQTV

SEQ ID NO: 10373 - protein, 1373 aa, unidentified
  REGION 1..1373: note = Description of Unknown: Cas Enzyme sequence
MKKVLGLDLGTTSIGWAYVHEAENQNEKSSITDLGVRVIPITTDEETDFQKGKSISINANRTLKRGARRNLDRYQLRRTNLIEILTKTGFITQQSVLTETGKGATFTTYNIRAKAVTEKISKEEFARILLAINKKRGYKSSRKVQSEDEGTAIDGMDVAKKLYEEDLTPGQYVLQLLQDGKKIIPDFYRSDLENEFYRIWNFQKQFYSEILTDELKEELNNKNKKQTWAILQDPLKLTGIKREGKALEKKIENYKWRNDGLNKKLEPEYLAIVLQEINGQLKNSSGFLGAISDRSKELYFNKLTVGQYLYNQLKENPHTRLKNQVFYRQDYLDEFEAIWQQQAKHYPELTNELKTEIRDVIIFYQRRLKSQKHLISKCEFEKYHKVIPKSSPLFQEYKIWQILNNIELFDKKTRTRIKNDELDIETKQMLFDELNIRNNLKANRVLSLLVNNPKDYELNYTEIEGNRTNAALYGAYKKIAELSNGEEYNFDKMKSDEINEIVSSVFLDVGIDTSILFFDSALEGEQFDKQPHYQLWHLLYSYEGDNSKTGNKSLIEKLQDKFGFNEEFAKIVAGVVFQNDYGSLSTKAIRKILPHLKEGNTYDVACSYAGYNHSHSITKEEKENRKLKDNLDLLKKNSLRNPVVEKILNQMINVVNTIIADPQLGKPDEVRIELARELKKSAKERQEMTDSINKATRKHEEIRKILQVEFGIQKVTRNDIIKYKLYEELKGNGYKTLYTNTYIPKQKLFSKEFDIEHIIPQARLFDDSFSNKTLAVRSINIEKGNKTAYDYLKESLNEEEFNQYLARIERLYKNGDIKKTKYNKLLMQETDIPDGFIDRDLRDSQYIAKKAKQILEEVIRNVYTTTGKITDRLRQDWQLVNVLKELNLPKYKVLGLVDVIEGKNGQPEERIRDWTKRNDHRHHAMDALTIAFTKPAYVQYLNNMNARNNESHKKYHEVYGIEQKYLYRDKNNKLLFKPPIPIHEFRNEAKKHLQNILVSFKAKNKVVTRNRNKIKLKGKDNFKEQIVPTPRGQLHKETVYGKKQYYTTKEEKINTSFDAEKIVHVASKKYREALSKRLNEFNGDPKKAFGGKNSPAKNPVYADTEKTLPIPEKVKLVYLKNIYTIRKDISPDLKIEKVVDEGIKRILQNRLQEYNGDAKKAFSDLDKNPIWLNKEEGISIRRVTISGVANAEPLHYKKDHFGQYILDEKGNKQAVDYVSTGNNHHVAIYEDNKGKLHEKVVPFFEAVERARQGLPVIDKTFNADLGWKFLFTLKQNEYFIFPDDDFQPNEIDLMNPDNYHLISPHLFRVQKLSTKNYVFNHHLETKAVDGDLLKNRKELSGITYYFIQTPLKLKKIIKVRLNHLGKIVQSGEY

SEQ ID NO: 10374 - protein, 1400 aa, unidentified
  REGION 1..1400: note = Description of Unknown: Cas Enzyme sequence
KGRKFPDSDEFMKWIHLNPYELRERAITGIVTDLELGRIFYHLVQRRGFLSSRKGDVKESETLFNKGKPETNILPINKTIQEMGKNDQTLGQYLKTVVPEEGKPYVMKCDDDGNEIRARGRYATRQMYLEEFETIWNAQAQRLGLDKRTVVYKKIRRLQGGVDSTRNQKRFDVLKKEYGEGRVCFETRGKHAFLITTRDLPLRAFLAGDDEARLKSSESVLFWQRPLRSQKGSIGYCSFENGLPVIRMDGSVRRDKEGKPVTSSKRPCPISHPAFELFRAHQFINNIRFGNGQRLSEKQREDVLGLINKKSADFKFKEIVKKLELFSETFNYENDFKVSGNYTISKLSKLLGKVWEESPINIWHCFYTYDDTEKLCEKLEQSFGVTVDFKKVDAVRLKEGYSRVSLKAINNILPFLEKGLFYSTAVILGGVKNTFGSRWEYLEDETIDKLQSDILAILKGDNRSGEAVERVKQYLSDPQNRYAFSEDAPAFGKLYHHSQPLEKREQKSKLQAIENIRNPIVQQALYEMRNVVNSLLLKYREDDPDFEFDSIHVEMGRDLKNGKQQRQKLAQIIKDNNQKNDEARKRLSEYGLRASRDNVHKYLLFREMETKSGRAQSPYTGQTIPLSSLLGTGNTVQIEHIMPYSKSLNDSFANKTLCEAEVNGQKGDETPFEFYQRNPDSKLWNASSWDEVKRRAFELLPYPKAKRFTSEKAVDAGEFVSRQLNDSRYIAKKAAEVLSEICADVQVMPGQLTAELRHLWGLNNILEKSIGADNLLEKLTPEETGEYYLVLDKDGRAVSLASKKNPRPSTEANEMIFAGEVNDQAFKSKHLILKLDASKEQNGKYWEKLAFKSGHRLSPKYVERPNADEDRIIFKGRVKNQRFNSDSIPVKPIAEHDDGLYWACFGVKSKRVERSSVAPKTTRKEIKLWGQVKSGVFESYIYKCLTNADDGKYWLILEPDFETPEFVQATNSEPPHSGNEIVVQGTVDEAGLFVSDLDPEYSVATDEDAGKYHAVVEVVTNQPEFHLMENPAPEIPKEHRLVEGTVWLDKFSSELKFDPKKNREDQRHHAIDAITIALTKQRYLNELSRYRSKEHPEEFKPVFPEPWEGFEHDVKSASEKILISYRKDDRVVGKGKKGTSVRGQLHKENVFGEYVNSDTGGVSYHRRKSLAELKTHKHVGKIVDPTIKQLVLSHLRDNCGVNTASEKGFKIPVDAFFKDGKPRLFLSPNPKRKVAAQPVPIKKVRVREELGNARQLKGGVNQHVNPRNNHHVMIYRDSAGELKESIVSFWDVVNREKNGLSAHQLPEDGDSVEVVFEQNAMFLLGVSDDELMGRERDQRFLSEHLYRVQKLSSMYYTFRHHLASTVTNPDEEMRIQSFDCLVSRNPKKVSVSALGEVTIC

SEQ ID NO: 10375 - protein, 1341 aa, unidentified
  REGION 1..1341: note = Description of Unknown: Cas Enzyme sequence
LLNFNQKRGYYQLRGEETEEDKTKLVEFHALKVVSVKGEEPNFKNEIWYNVNLENGWVYRRKSKNPLNDWIGKIKEFIVTTTLNEDGTVKKDKEGTPKRSFKAVNSEEDWIAIKKSTEERIENSKQFVGSYIYNTLLNNPTQKINGKFVKTIERYFYKDELSAILEKQKEFHSELKDEKLLFDCINELYPNNYAQQNILKQKGKGFTYLFVNDIVFYQRPLKSKKSLIDGCKFESRTYKNKEGEFVTSAIKVIPKSHPLFQEFRLWQFVENIRIYEKSKLIGNRLCSDYDITPEYLPTNNAKVELFDFFNNKERITQKQFLALYKDNFGKKLTEDKYRWNYVEDKEYPLNETRALFISKMKKHKFFDWQTYLTQENEIKLWHLLYSISDKKEIERALDNENSKLGLPLEIRQKFKSVKPFANDYGAYSEKSIKKLLPLMKMGKYSQEITKEQKSRIDDIFYRLETVNHNKEKLAEVADDDITKGILKSFYNYEKKYEGLKLHQAEYVVYGKHAEAKDTSIWKTTKQLEEYIKEFKQHSLRNPIVEQVITETLRVVKDIWQNFGKGEEKFFDEIHVELGRDMKNPKNIRERITRNIVNNQNTNQRIRILLREFKNQNVEGVIPESPNQQEKLRIFEDDILSQFSEKELESQEQDGIKIARIVKAIEPTNREIEKYKLWLDQKYRSPYTGQVIPLSKLFTTDYEIEHILPQARYFDNSLGNKIICETEVNRFKDRQTALEMISKNPGRIVELGQGKKVALFALESYQKFVAENFNTGSKKQKILLSEDIPENFISRQLNDTRYISKVVKGLLSNILRGDDEQEATSKNLISVTGNVTTVLKNDWGLNNKWNKIVEPRFKRMNEMTNSNDFGHFDKEKGFFRTDVPIELKKSFNKKRIDHRHHAMDALVVAVATRNHVNYLSNKHAKSDNLRYDLRNKLRRIESHSENGKSYKRAKEFIMPWMGFPTEAEKSLKNIVVSFKQNLRVINKASNKYKVWKNEDGELKRGTETQKGLNWAIRKPIHKETVYAKVNLRHKKLVSINAGIDGFLKGEFIFVDKVLGRKIKRLIAQGYDSKMLKKFFKDNKFKEEKITKVDIYFHDDGYSAVRKSIDESFKSKRWIEESVTDTGIQKILINHLEKYNEINNNGEPKERPDLAFAEEGLEEMNKNIIELNGGKKHQPIFKARVYETLGNKFAVGQTGNKKGEIIRQYDTVPLNIVIERQKQGENSVPEKFYDKNELEYRLVFTLSPNDLVYVPTEEEQDNINSLDFENLNIEQKGRIYKMVSCTGNEGYFVPNIYAKDIKKNEMGTNNKSQNTTNNKYQIKKECIKLRVNRLGQIAKVGEY

SEQ ID NO: 10376 - protein, 1336 aa, unidentified
  REGION 1..1336: note = Description of Unknown: Cas Enzyme sequence
MSKRILGLDLGTNSIGWAVVDEIGGTQFKLIKRGSHVFPEAVADASQGGARKSKAAERREKRGARKLNYRRKIRKINTLKVLVEHGMCQGITTEDLDAWRYERKYPENEAFRKWQNTNDLSENNEDKEKRNPYLFRFEAIDRKFDEKEKQKLGRAFYHIAQRRGFKSNSLDGGSDDAYDAFHATLLKEFDQEHDSVDEIIEIITGLTEGESDQKSRKLKNRLLKILKKATSLVDAVSKCVGVLEKPEFLGKVKRGIHDLDLKIQDSRSRTLGEYYYQCYEYQVYEAEFNEICRVQEIDDERKKELYGEKIRGHYTDRENHCEKEFNEICRVQGIHKESDLYKDLHNAIFYQRPLRSQKGLVANCSLEFRLPVFKNGEPLYLADKLVTYSKRCVSVSHPIFEEFRMHSFINQIKWKKAGDSQMSFLSEDQKDEIKHLFYRKSKPYFKFSEIVKKLFGKNSLVERVRDEGKVQADYFVNYALDTSVSGCPVVGVFRMLFGEEYQQTLEESYLGNRENKNGNKKAGDDILTEAWGILFSREDSLERKRKLMKNWKVSVETAEAFSEIKLPPGYASLSLAAVRKIVPLLKGGMIYSHAVLFANLSAVLRTSELDPEEVKDELSGRLDIYSNYRKQVAIANELIADSETDESLMNELKWPSEFEKKVGKRFVKKFGSSVWKKMTEDEQEDFYLKVVELLKTQNAAQNDEGRWVKLVPLKDMLKDILVNTFKVSKERAMLLYHPSDILKHNPYRKSETGLLESPIVSSIKNPVFMRTMHRLKAVVNALIQEGTISASTEIHVEMARELNTANMRAVIEAENKKREERRKKYAKIVKNLMGVDASETDLLKFKLWEELTPEDSEKDWIELNEKIEEKSLKYELWEEQKRICPYTGKTIGLVDFLSDDPAFEIEHIVPRSRSYDNSEENLTLCCKRYNREKKQSRIPSECENYKEILPRIEHWKKRAKELDWEIKKTISAARNADPERKAKIIQKRHRLKFERDHYAKKHERFTMEEVPNAFANRQLNDTRIITKYACFYLKSVFKKVMTVNGLTVAELRKQWGLQHSEKKSREKHTHHCIDAIVIACMTKYQYDQLAKFYKSKENEKFKHGSPAKHIRQPWDNFIPSIKQLEQEVLVAHYAPNHLLKKSGVLPPKLQKKVKQGTISNELKKKATARGRLHKDTFYGRILHDGEMVSVVRVPLVSSKEALKGFKNLDDIRKRVVAKNICLRIEAIIQERMASGMTFSEALKAPIYQNEDKKIPIKRVRCKAEMVKNPIKIKRQRDKSKKYDHPCKQFLYTENASVSAIALYESDGQIKHDAYDALTAVKQQLVFPEEKEDEKGN

SEQ ID NO: 10377 - protein, 1312 aa, unidentified
  REGION 1..1312: note = Description of Unknown: Cas Enzyme sequence
ILGLDLGTNSIGWAVVDEVREKIVDTGVRIFPEGVVKKTIGSGDKEETKNAARRKHRQVRRQFYRKRLRKAKLLEVLIEQGMCPLSLEELNLWRRWDKSQKARGRKFPDSEEFMKWIRWNPYQLRAKAIEEKVTKQELGRIFYHLIQRRGFLSSRKGDEKESKTLFEKGKPDKNILPINQTRDEMKKGNQYLGEYLNSVLPEESKPYAMKCDAEGKEIRVRGRYATRQMYVEEFEAIWNAQASRLGLDNETIVYKKVRRLQGGIDSVRNQKRAERLKKEYGEDRVYFESKGPHTFLITTRDLPLKEFLGGNIWVEDDNLKFKSDESVLFWQRPLRSQKGTLGNCTFENELPVIKLDGTVRRDKNGKPVSSSKKPCPTSHPAFELFRAHQFINNIKYGNGRRLSKTQREDVLELINSKDRDFDFKEVVKKLELYSEQFNYEKDFKVPGNSTICKLSKLDKSKTWKNVLELHLVEIWHCFYTYTDSDMLCDKIAKTFGVRLDLKKVDKVRLKDDYSRVSLKAIGNILPFLEKGLYYSTAVVLGGVKNAFGTRWDNYLTDETKEKILSDVLDILKGENREGEVIEKIKAYLSDPTNRYAFSENAPAFGKLYHHSQDVEKGELQSRLSPIKDIRNPIVQRALHEMRTVVNALISKYREKDPNFSFESIHVEMGRDLKNGKKQRQKLSRIIFENKQKNDEAREWLAEYGLRPSRENLQKMLLFMELERRAGRASSPYTGKTIPLSCLLGADNTIQIEHIIPYSKSLNDSFSNKTLCEAEINGMKGDETPHEFYQRNSDPKLWGASSWDDVARRAFALLPYEKARRFVSTEPVDAEKFLTRQLNDTRYIAKKAVEMLLEICGDVHVMPGQLTSELRHLWGLNNVLENSVGADRLLSELSEADTGDYYLVLDQDGQAVTLSKRQNRKPSVDENKILVSGNVEKKKFEAKHLILKLDAPNEDDGKYWARLVLKPNLELSPKYVERPESGEEYIVFKGMVRKGKFNHDSIPIVLVADQDDGSCWVRLLLKNSRVAKADSNPKTTKKEVKLYGQVKDGIFECYIYKCKTDAPDGKYWLILEPDFDAPQFVRAENPMPEHADNEIVIQGTVDESGMFVPDIDRDYIAKTDKAPGKYYAIVELSSNNPQFHLMENPAPKISKDQRIVEGTVWVDKYSSELKFDPKKNREDQRHHAIDAITIALTKRRYLNELSRYRSKEHPEEFKPVFPEPWNGFEHDVKVAADEILVSYRKNDRVVSKGRKGTAVRGQLHDRTYYGEYGISKRNEFGKKLFDGCNAPIFERGKDGEVKQVYHRRKKIDQIDFG

SEQ ID NO: 10378 - protein, 953 aa, unidentified
  REGION 1..953: note = Description of Unknown: Cas Enzyme sequence
MCNILSLDLGITSIGYSVLEKKEDNRYSLIDYGVSMFDTPFDKDGKSKKLLHSTNTSMSNLYEKRKQRKKALARLFEEFGLEKAQKLLQQEKKNIYKNKWQLRCDDVFKRELSVDEFFTIFYFIAKHRGYKSLDTNELLEELCEELELDCEIKSSKKDDEKGKIKQALKRVEELKQSSNKTVAQIIYELELEKQTPTFRNHDNYNYMIRREYIEDELKKLVDAQQHFFKDNKDDFFQKLKEIIVKQDESSNDLNLFANCQYYKEYKVANQYSVVADIFKMYESVANIIFNKEKISKEQIKLIADDFFTKIKKGKNIPDIKYKDIRKILNLGNDVKIFNKDDSYIRKGKTIHHTITKFHFLSNLSKFDNSFIVDNSLEKLAEIFEVLNKEKSPKTIFEKLNGSVDEKTIIELIRYKSGKSLSISHYAMLKFIPYFQEGLTTDEIKQKLDLNRCEDYLEYKKGIKYLHINQFEKDDNLEINNHPVKYVVSAVMRVIKHLHTLYGAFDEIKVESTRELSLNDESKKNIEKANKEFEKKLDDIKQNGEYQQIAQNYGKNLSKYAKKILMWQEQERLDIYSGKVIGLDDIFSNVVDIDHIVPQSVGGLSVKHNLVLVHRDTNLQKSNQLPMNFVADKEGFKNRVEKLFSEHKINFKKMKNLLATNLDEIYKDSFESKSLRATSYIEALTAQILKRYYPFENEQKQKDGSAVRHIQGRATSNIRKLLHVKTKVRDTNIHHAIDALLIGVTNHSWLQKISNTFRENFGLIDDRAREKVKKELPLIEGVSVAEIVAKIEEDYNIYGENSVFYKDVFGNVKVVPFWVSKKSMVSKIHKDTIYAKKQNGIFTVREKILDKFISLKITPKTSSDEFMKKFKKEILEKMYLYKTNPKDKICAIVEQRAFDIVELLNSFKTLDIEDKEMLSEAKNTLDLLIHKELIDYNSNIIRKVQFYQTNLYRV

SEQ ID NO: 10379 - protein, 1219 aa, unidentified
  REGION 1..1219: note = Description of Unknown: Cas Enzyme sequence
MKRILGLDIGVSSVGLAIITDNNGRKEIQNMAVRVVPEDPNFHGKFYSGNTASKNEDRTIKRGIRRNNQRFKLRRDRLYNKLKEVDLFPGDVLFKLDALKLYELRAKAVEEKITLEEFGRVLILLNQRRGFLSNRKASTKEENTTEYKERIKELESELKGRTIGQQLYSELQASESIFDILIRERTYQRASYIEEFDRIWDKQHSFYPDVLTGTSNDEDIKDTLYDTIRNRIIYYQRSLKSQKGLVSECPFEKYHKATAKSSPYFELFRIWQKVNDLSWKTPEGVENTPTQEQKQKLYKSLFYGENLNKSYKLTVSKIKEILGYSLRERIYLNFTELDGSRTFSIIKNAIEESGIENVEQFLSFNPEQNDEKGGLFELWHITYSLPTEKEVVNTLQKRFNFTQEQSEIISKKVSYISDYGSLSTRAIKRLLPYMAKGIGYSDACDKVGYDHSGYKTKIKIGEKLKAIHKNSLRNPVVEQILNQVVNMVNLAIDEYGDFDEIRVELARELRNSAKTRNSITASNSKNKKKNEKTRKILKQEFGFNIVNGRDIKRYNLWEETGLKCLYCNKFIKEDDFISGQAEIEHILPKSRSFNNSMSNYIMAHRKCNANKDQQTAYDFMVSKGNDALHQYVSKVNALYNDGNGKITRAKFDNLLTKGEDIPSDFVERMKKDSQYIAKESVKMLKTVCKNVYTTTGQVTDLLREEWQLKHALQEVNIDKYRALKQTENKEIKDSQGNPKTIEIIKDWSKRDDHRHHAIDALICALTDQKIIFKLNNLNKIYQFAKNSLSVEELAKMEEINEHRYDLKEFVAQGAYEFKEPIKNLRCEVKKHLAEIFISIKKENSKVLTPNINKPKNGKEQMTWVPRARLHGETVMGSVKRIAKKKIKLDKKFDVNILENIISPNHKKILISYLSQYDNDPLKAFDSRLLKKEPLMCKNKPLKDVAVYEYVNTKRVEIEGYFTDSQRKDPAKKKLIENVLEIDREAGSKLQERLNEFNGNFKEAFRNLNKTPIILKNGKKLKSVTIYDESKTIEVSVKKDLFGKEVLDNKGLKIPSSYVNTGGNHHALIYRNEKGEYKDKVISFFDAVEIGLLNIEQTGKPYPIINRNNDVELGAFQFSMQINDLFVFDLKHSENPQEENEINFIENKNRALISEKLFRVQKLSKKSNGVFDIEFRHHLEATINRKIKEITWVNFQSNKHLDRLTKVRVNHLGQMIKVGE

SEQ ID NO: 10380 - protein, 1197 aa, unidentified
  REGION 1..1197: note = Description of Unknown: Cas Enzyme sequence
MLMINTKKVLGLDIGSNSIGFSLLNLSEKDSQIVFEEIASNSIIFSSSVSAEDRRVARGARRLHRRKSRRNKIAREIFVKYSLATDDFIKDTTTYLGSFSIKDKDVYGIRERAVLGGKLDKDEFTLATYSILTDRGYNNMFATIQNDDSDDEDGAINEAVNHNKKLYNKKDYLLPSMVLTAQRKALQDNHQNIAIRNKKGDYSNSLDRGMHKEEFKVFVLSQANNTDLFDTTETCQAFMDEILDETITNRPFFQRPLKSFEGMVEYCSFYDEFNPKGAEKRMPLANIVNVELTLRQSIDNYEAVDKNGEVKQFTKDEKDQVVDFWLNSPNADKINNKNIYKNAGFKNIKIYIKDDKELLLLNIQAYRAMLEVLTQHNIDLKNTQNKFYNEVLLELYYYKNHSSRVEHINKIIQKYNVAVDDSFVEDVARLTHMDGFGRFSLKFANEVLEIMNKKGKIHSEALDSLCYNSKYLAMPSYDYLPPLEPSKADIEWLQKNISYFKTEHLFYQPMMSPKVKRVVGILRKLINTLIEKYGKIDEIRIETARELNSKKEEEKITKNQTEYNRKNKEAEKYLKANDINNSHKNIERAKLFKEQGCECLYCDKNLTKDEAFNETITEIEHFIPRSVIWINSQKNKILVHKKCNQNKGSQSPITYLKSIGEWENFKGRIKLHVKSSKYKWLTDEATIENAMAKENWQDSYLNDTRSATRSIAKYLNHYLYPNTTAYNKGGEEHIFSVSGKAINELKYMWGIHTVMPKNEEDKKDRNTNYHHTLDAFTIALCSPSATQSLHNHFKKNENRFKTKALKEKLSNTIPISSSEVNVVEHLKELVHKYETNALHVCPYNKRKTNMKGFKDGNLKLYVTKDPKDEKREILAEMEKVAIDTSLLIKSIGGFPKPRSDKEVFDEIKSIQSRLNPIKQKKIIEAIEVYANKLLEIRSKIDTTTKEIEKYKNKIKTAKQHKELNDSIREEMKPMQEESKSLSTQLQALKCSFTVKNGKKQIVKSLRLHKVKISKTSADSILFSQRDERSIERLSVENFKQAINYKEPFVIKENESTFCVELYSHPKQSQVVGLKYFSSIANPHIKTKINEKYNDIFDDIVPSLTLYKNDIIKVKNTKENSEKYFIFNGGGKISTSKKSANNKLSIKNINHNSFRKINKNGEIKESKDGAVTPNKTTIISKVKIDFFGNITEDKQNEK

SEQ ID NO: 10381 - protein, 994 aa, unidentified
  REGION 1..994: note = Description of Unknown: Cas Enzyme sequence
RNAFRKTVDKKQVDRWIDFEKIHKNIEDDIIKIIREKGNKEGEAIEKIKSYLSDPKNNLGFEKNDKSFKKLYHHSQEIEHNEIKEKLSEIENLRNPIVQQGINELRRLVNSLLAHYRKENPEFEFDQIKVELARDLRSGKKARQDMTFRINENNKKNDEARQKLTEFGLQHSRENIHRFLLFKEIEEKNGSVLCPYTGKTIGLNDLLGNENKFQIEHIIPKSISLNDSFSNKTLCDAKFNGQKGNQTPYQFFLNNDNAALWGTNSWDEIEERTFKLLPYHKAKRFTSKTEELDAGGFIERQLNDTRYISKKAKEILSEICENVRVMPGSLTSELRHLWGLNNVLQPVKICDFQNADIDENKAKPHYLIVDKNEEPINIIPVFNKKPQLESDETTVVGKIKNNEFSSGSLNGKFETFDLIDGEYWAKINLSDSPIKIGKVFSDKPAINENEIVLRGKIEKNSFKHDSFKNIAVNQKDGSYWAKFNITNVRFELPKKDDKPKKNGKQILLFGKITSGIFKSYIYECSTEREDGKYWAIIDVDFDSISCLNVKNEIPQIIGNQILINGSVNDNSIFSSDIDADHTFQTDLLPGKYYALFNVVEKPKKFTLIKNKEPKLENEQKLIEGNTWIDKQTGEIKFDPKKNRDDHRHHAIDAIAIALTKQSYLQKLSTYNANKEEKKRGNKYEKPNFEPPWENLFYDVKKAAAAIIVSHKQNNQALTKINKKIFKNGKKIDSKGFAARGQLHKESVFGKRQAPKSEKAYHIRKSLDLLENNKHIEKIVDNNIKKIIKNHLKDNFNIDISVKYKIPKNAFFSNGKPLLFLPNKNGEPVPIKKVRIKEFIGNAVKLKSENQFVNPRNNHHTIIYKDENGDLNEHIVTLWETVERAAKKLPIYSLPEPQIGQPKPVEIVATLEKNNMFVLGLSDDDFENNKEDNDFLNKYLYRVQKISKMYYNFRHHLASTISNNKEEIIIASLKAFKKNNPIKIKINLLGKIEKC

SEQ ID NO: 10382 - protein, 1071 aa, unidentified
  REGION 1..1071: note = Description of Unknown: Cas Enzyme sequence
IVLQEINNQINQSSGYLGAISDRSKELYFNKITVGEYLYNQLKVNHHSRLKNQVFYRQDYLDEFEKIWEKQKEFYSELTDELKYEIRDVIIFYQRRLKSQKHLISECEFEKYHKVIPKSSPLFQEFKVWQMINNLEIRHIPTRTIYKNDQIDQDVKDLLFNELNIREKLNAKEILNILVENPKEYELNYKDGLEGNKTNAELYKAYQEILIFEGEEYDFKKLSADKINDIVVSKFAELGINQELMSFNVEKEKNEFDKQALLQLWHLLYSFEGDNSPTGDKKLVDGIAKKFGFKSEYARIIANINLQADYGSLSSKAIRKILPNLKEGNRYDTACTYAGYNHSSSLTTEEQEKRELKDFMELLPKNSLRNPVVEKILNQLVNVVNAIIKDENLGKPDEIRVELARELKKSAKERDAMTRSINKATIQHEKIRKTLQTDFGITKVTRNDIIRYKLWEELESNGYKTIYTNTYIPKKKLFSKEFDIEHIVPKALIFDDSFSNKTLTVREVNLKKSNETAFDFLQNYLNDNEFNQFKARVEKLYKDSKITKAKYNKLLMKASEIPEGFIERDLRNSQYIAKKATQMLQEVVRTVSATTGSITDRLRSDWQLINTMKDINFPKYEKLGLTETIEGKNGRPEKRIKDWTKRNDHRHHAMDALTVAFTKPAYIQYLNNLHARSDKSSSIYGIEQKNLHRDKNGKLLFNSPMPINKFRTEAKKHLESILVSFKAKNKVVTRNKNNIKGQDKPQIVLTPRGQLHKETIYGKIERYVTKEEKINAKFDLEKIKQVAKQSYREALLARLAEFEGDAKKAFTGKNAPSKNPILLNCVGVTLSDTDTKKCVPEKVKLVYKEDVYTIRKDISPDLKIEKVIDIGVKKVLQNRLDEFNGDAKKAFVNLDENPIWLNKEKGISIKRVTITGVNNVEALHSKKNHNGNIILDEKGNKQAVDFVSTGNNHHVAIYRDAKDNLQEEVVSFYEAVHRVNAGLPIINKEKDGLEFLFTMKQNEYFVFPSDDFNPEGYDLLNPNNANLISPHLFRVQKIANVNYMFRHHLETNVDTIKELRNTAFIHIRSAN

SEQ ID NO: 10383 - protein, 1031 aa, unidentified
  REGION 1..1031: note = Description of Unknown: Cas Enzyme sequence
KKLTISIDMGAKNNGIFIVKSEGKAIESKKASCIVVDNINFSKVSRTLNRHKDRNYKRRDMAKKLLAELFDMESFNNEQKESIRGLLNNRGYTFLSTATEFEKITDETREFLIEYIEPLLKQKTKAEFEEFLTNEFDDEETLLVFLKTSITAITAKSNELENFTKKKIILSDIDALESKNITKFKAFSYIKNILLNSGYRNLGKNQDEITKALKKESTDLSEIDFNKEKKLIESLAFDVKSAENKKQIMDDLKLLKAFLQNVEKEINTGSKPRKKYLSEIKDEIKKLEFIENKKEFYNIVGNISNLQLRVLRKFYNNNSKHRDKYKILKNYFLTHHYKSEKEKTQRKALFSELNKHSNIKDFFGSTEPTLTIPPYEDMNNRDTYKCNSMLINPKLIDDTVKESIDYLLKQSEFDRLNISQDGEFIKEKLVKRKVVSDNKLIKTDFTYSKYIQRIFDATEDVTTKELNPRNVFKYKKTFERGQISSVEMFKRVFGERVYKALEPIAERYYREESKIMSGIYEASTFMFVKCNTNTPYKDNVKEVLLKPIYSYAFTKEEAEKFLLSIEQSRGLKASMQRVAEEAKRHQNAFYHVVQACYENEKCINDKDIKSIVNNIESNFQLLKGIIENELGIENSYFKNIPTVTSENLSRILNILKQTYEILFKDLKGFSKTCKHCSQENALRSDENYVIGKRLLSDVAKPIDGMLDMMLDRIAYEITEEIGEADISDVVDLEILLEQNRFEFEENLNAIKRSNNSQIKKYKREYKDVLNINVCPYSGKKFDKGDYDHILPQNRGVFNSKANMIYVSTEGNQKIKGARVYTLEMIAPEHLKTVFKTAELPKIREIIKIGIESIKKEEFKNFENLKLHQQIAMRYALFMRDTEEFNKAFELLKLDKLKTITNGTQKRLARFVYEKLVEKFPSYFENEKIDVSSKTVNSQLVSTTRNILAESQAELEKPEIQDSHSHCIDAMIVFYLANSKIKGHKHRQRENLGTLEPMFCFDEVYLSESKINRLSKKRTFITSSKKEQGSYP

SEQ ID NO: 10384 - protein, 1044 aa, unidentified
  REGION 1..1044: note = Description of Unknown: Cas Enzyme sequence
MAKTAKNGKQAVLGLDIGSNSIGWALLSEDRGEKSLVDVGVRVFEAGVDDDIESGRDVSRAVHRREARLHRRQLRRRNRRLKKLAATLQQYSLFPQGDVSTAENLKNLIDSLDAGLAGDAPDPAMLPYFLRARALDEKLRPQETGRAIYHLAHRRGYRSNRKVQQKESEEESKVVLGAISELEKKMREAGARTLGEYLSKIDPAEDRIRNRYISRQMVRDEFDAIWEAQAKHHPDIMTDEAREDIRHAIFFQLPLKSNRGTIGRCELTGRRRAPAALLVSQRFRMLQKINDLRVILPDGTSRPVTGKDRMAIIDSLETTGSRKFTAIRKELRIKGKFNFEESEKEIIGNRTAARIARAIGKEKYDSLSTEERDGIVGLMRSTRKEGALKKALVNKFGLDEGSASKLAGSALEEGYMSLSQSAMKKLLPLMEKGVQYATAVKKVYGDLKPAETFDELPPLAFSPMPPVNSPAVRRALNELRKVVNAVIRRHGAPDVIRVELARDMKRSRKQRQETWKRNNANRKRRDRAKGRLVEESLQYWAPGWEPKGSDVEKWLLAEECDFICPYTGRQMGFKSLFVEPEFDVEHIIPFSRCLNNSFLNKTLCCAKENRSVKHRRTPWEAYGGTEKWDKIIARVKKFKGDARDAKLRRFQVKDLADINEFADNQLNDTRYASRLAVRYLGLLYGAGATGVAPGGEHGKRVIQASRGEVTFYIRDVLGLNSILGDGGLKTRDDHRHHAVDALCVALTDHRTMQMLNTAAALAEEKRRRWFDSFEISEPWPGFIDDVREAVGGIAVSHRPSRKANTGLHEETNYSKIHIDPEGRECVHVRKKLEALSAGMVKNIVDPVVREKVEEKLGGGAPATVFKDAASLPHMTAAGGRKIPIRSVRIRVYDNIRKVGSGIRERNVITGSNHHVEIFEIKDAKGRPKWTGRVVSSLEAMDRVRCRVPIVDRNHPDGGAFVLSLSGGDIVELDTDDGRGLFRIRTISESKGSVNVEYAGNNDARMKKEIQAGKQWYKRSINKLRQLGCKKVDVTPAGDITYHND

SEQ ID NO: 10385 - protein, 1196 aa, unidentified
  REGION 1..1196: note = Description of Unknown: Cas Enzyme sequence
MATLLGLDIGSNSVGSAWIDTKKKLIKLGISVFPAGVEEYEDKRGAPKNQSRRSQRQQRRSIERRAKLKRRLRQYLIKKRWIPTEKAKLQKWENLNPWLLRRDTVHKELKADDSFSADEKFGRILLHFAQRRGAWWFDEEPEEKENGKKKKKDPAEIPGTVAYTKRIMKEKNAETFGELIAIEYENRKTITGNKDKKRNERVRNRNNAFGEKVSEFVADRHMILAEFQKIWEVQKSFDGILAKQLTDDCKKEIYNPQKTNTWRCQGVLFSQRKAYWDTGTLGRCDLEPTDEKCPKADMFAQEFLVLTSINNIRITPPAEHTRKLNDEERSKVIKAVRKQQTASEGTIRKALGIDKGANKTLYTLNTGGDKFTINGDWFYSQVACGIFGEEVWAEFDNKMKDSVNGAILKFDPNEEEGKKKLIIGCNKWWNLDDEQTKNFIDAWGKMPKKDSRVNLSRKAIRNLLPYLRDGWSVTEARNLYAEDASNGADDLTRKRYSTRDVVVNKRIKQFYKKHPNLLPPVSDGISNPVVRKSIHEVRKHLIEHIRRFGIPNRVTIELARKARQSEKVIAKRIQKNKAIEELRKEIIDTHNLDSPDITSTQKKAAIKRVRLCRQQREMCAYSGVTITDKIAAEGNGLEIDHIVARSKGGDNGMSNLVLCYSTSNQGKGQRTPVDWLNEESFRQLEKRFQHLHPQKGEKGQRFITKDNVDMVDKAKWENLHRRTPKEGFTEEQLSSAAYAATQTTGWINKVLYGDKDRSKRYVFASNGNYTNLLRRDWGLFFDEDGERSEKGRKNRGDHRHHAVDAAIIATTPQSLLKIKESFVDLEKQKENKRVKPDWKTIEQPWDGFREQVAREYKKLKVSHRAYNRQIAGYLHKDTIYGPALIYERHKKDDEKKGVKKGNIKIDKDGNPVIKEGVYVKSIPAIGIKQNHLRMPDGWDKLKKEYKKATTKKQRKEKRKEMLSLEDVPPAKSGIVRDIELRDKIREWLSEHNFEDMGRAKAYIKENGLIINGTPVRKVRVLWKLNEVVEIKRKKLGYKSSTPERQRKSLRVYQTQNNHHIEIRENKKGKWVGEVITNFEAARRVRVYKKPIINKSDEKNGSFVMSLSKGEVVHMKLPEKQKDNYYVVFKIDPSKTIHFTPHTDANPASSKKKGVKLREDIPLVPDDLRKNIIFNENGFPEKVKISPLGEVKVLVND

SEQ ID NO: 10386 - protein, 1181 aa, unidentified
  REGION 1..1181: note = Description of Unknown: Cas Enzyme sequence
MKKILGLDLGPNSIGWALINLDEGNKAGEIIRTGSRIIPMSQDIINDFGRGNKVSKTAERTRFRSVRRLNERRKLRRDRLIKVLKRLGWIPEDFDPVKDKLTYPYPDEGFAFEESYQDMLQEFRQLHGKNFSSPRDWTIYYLRKKALKEKISKQELSWVILQFNKKRGYYELRSEEADNDARDDKEFMSELVVKITDTGEKRRANKVYEVTLENGVVGLITNKTKPEWEGQTKEFIVTYRTMKDGTRTCNLSIPDAEDWTLRKKKTEQIINRRNETVGEYIYNLLLRDPTLKIRGKAVHTIERTFYREELKTILEMQKNFHDELKSEELYSTCIQILYRNNDAHRNMLRHKDFKWLFVNDIIFYQRPLKSQKSLISECKYERRHYLKEGSFESVGVKSAARSNPWFQEYRLWSFIHNLRVIKREEEVNGVLQQDLDKTSHFMTEEAKANIFETLNQQKEVTPSKIVRLLNLSDKEYRMNYSDEIKIRGNETRALFLNVFKKCDCFQAGMDFLQSRSNEYRLWHIIYSLNKRDDVVSALLNQELKFPENAIEEFSLLPKFKKEYGSLSEKSLKKLVPLMRCGKYWDEGSLDKDVKKRIRKIIDGEKDEAISIKVRELFAGKDQLNQFKAFPEFMAAYAVYGKHSESKDRLIYLKPDDMQRIRQHALRNPIVEQVTNETIMVVRDLWLKYGRPDEIHIEMARELKNPAGRRKEISRQRAENERANNRARLMLAELKKEVPSINPYSLGQADLFRIYEEGAMSNVKEVEDDIKGIMTSNSPNHSELIRYRLWLDQKYISPYTGQPISLTDVFSPRCEVEHIIPRARYFDNSFNNKVICESEVNKEKGKMTAYEFICEREGMQIKLSSGRTVSIIEKENYEKLIKRLYRFGTPKYKNLMSYDIPDSFIERQLNDTRYITRIIRELLAPVVRKEDEEETIPRGIITMPGQITAKMKKDWGLNKVWQDIVAPRFIRLNEITKSQDYFERNQDCRSYVLKNHGGLKRIDHRHHSLDALIVACITRSHIIYLNSLNNENKNYAFASKLLENNKDRTFCKPWHGFTMDAFEAIQKTIVTFKSANRVITKGNNYSFKWIEENGVKKKKHLKQKKDKDLWSVRQPLHKDTVNGKIYLRQYKMQAISTALKQPEYIADPGIRKHIRDLLMQYNSDLQRVRRHLMENPVIKDGK

SEQ ID NO: 10387 - protein, 1041 aa, unidentified
  REGION 1..1041: note = Description of Unknown: Cas Enzyme sequence
MDKHGRQDYVLGLDIGTTSVGWAAVAMHGTQADGLLGTGVRIFEAGMEGDIGSGRGESRNAKRRQARLQRRQIDRRARRMKKLFHILQGSGLLPAGKQRDVLPVLDQQILSRYSANLPDSKKARDRLSHILPYWLRARALDHRLEPYELGRALYHLAQRRGFLSNRRAPERDDKEKSVVKGDISELQNLIDRAGARTLGEYFATLDPREERIRARYTSRAMYLDEFEQIWTAQQRYHAAVLTDGLKRGMHRAIFYQRPLSNQKDLIGYCQLEPSQRRAPWALLITQHFRILQRVNDTVLTLPDGQKRALTPEERAALLGELETTGSLSFGKVRKLLKLPRGTTLNWEEGGEKRFLGNSTNARLAKVFGDAWDGLTPEMQSQVVEDVRSFEKEDALVRRAVRVYALTEDAARELAALSLEEGHCRHSRKAIERLLPYLEKGVSYGSAIGKAYPERLLPSVPLDRLPAIQRSDMDIRNPVVNRVLGELHKVVNALVARYGRPSQVRIELARDLRRSKKSRQEATRRNRQNERGRQAAAQKITAELGIQNPRRADIEKVLLAQECDWTCPYTGKCISMASLFGSSPQFDIEHIVPFSRCLNNSYMNKTLCEVAENRNVKRNQTPFEAYGQDDARWNEIIERVKRFSGSAARAKLARFQTRDVADLDEMASNQLNDTRYASRLAIEYVGQLYGGPVDIDGVRRVQAAKGGTTAYLRDMWGLNMILGDGDLKTRDDHRHHAVDAVAIALTTPKAVKQISQAAADERRSGRIKFGAVKLPWARFLEDVREHVDAIKVSHAPSRKVRGPLHEETLYGAGPERDEDGKPVWFHVRKRLEALSPNEVRAIVDPHVRERVERRLAELGGTPAQAFGKPENHPFFVARDGRQTPIHKVRIRKKASAILVGGDHRRRHVLPGSNHHMEIIETTDRRGQPKWEGRLVSMIQATERLRRRQPVVDRCVKDGERFLFSLSPGDLIQIDGDDGERRLCVVRSVSRDLVEFVGATDARIKKDIRAAKDWGMKRVNGLRRLNPCKVQVTALGEVRSAND

SEQ ID NO: 10388 - protein, 923 aa, unidentified
  REGION 1..923: note = Description of Unknown: Cas Enzyme sequence
MASYLGLDIGSNSIGSAWVDTEKGMVAAGVSVFPAGVEESDAKRGAPKNQKRREKRSQRRNIRRRAQRKQRLRQILTDSGLLPDDTERLVALMGQDPWSLRRDALDRPLKPHEFGRVLVHLGQRRGALGIESDGEKDEGKMKEAIERAKQALRKRGARTFGEFMVMLREEREQTTPKGRRRYDAIRNRRDSFEFHADRALIRDEFIRLWNKQIEFAGELAPLLTEELRLKLDNPMENDVWRHRGALFGQRRTYWDTGTLGRCNLEPTDRPCPVADRWAQAFRVLETVNNVRVQKRGEPERPLTHEERAKVIEALRKQKKGTTKTIRRALGLDKENMKQFYSLNVERDPDREINTDSFYREVVHGVFGEKQWQQFDEGRKESVNRALLKFDPHDAKDEKKLRDGAQTWWGVDAEAADKLIEAWQKRANPDKRVKLSRRAILNLLPYMQKGLTLTEARQSFAEDPESKATPEQRARYAFFINNKVREAIANNVGLERADEILRQRDTSRAERRFLEKHPDSLPPPPILANPVVRKAVYEVRRHVNAYLRRFGRKPDRVVIEMARETRQSAKVRNEALSRNRKRKNIRKNIIKKFKLDSLSEHQRQTAINRVLLCRQQKGACPYSGCHFTEKQAAEGKGCELDHIVPRSRGGESGLSNLVLVERTANRDKGNRTSREWLSPQEFQAMLRRMRHLEKAANSEYFRKRDYKRKWDNLNRVISKEDEKKWRESQLTDTAYASRQVGSYLRNALYAADPPGKRRIFFTKGRYTAMLRRDWRLYETGILHMDDTDEEPVDARARLSEKDRTDHRHHAIDAAVIALTGPKIIRQVAAALAEQEMSKARIGYWPKRKPVPAPPPWSSVEELRREIVGRIFGDRDNEGLVVAHRPVKRRLVGALHEETLYGVVDREEKLFTTRIPIEKLTPKML

SEQ ID NO: 10389 - protein, 1259 aa, unidentified
  REGION 1..1259: note = Description of Unknown: Cas Enzyme sequence
MSKYTLGLDIGSNSVGSAAIDTKAHIVKLGDSVFPAGVEESEEKRGSPKNQARRGYRGSRKVGRRHSKLKHHLRTFLFDNGLMPTEAQKIREWEKLNPWELRKKGIYNKLEPFEFGRILLHLAQRRGAAGVDVEQESKEVVSSAKGFIKAVFIEVDQSIENKRPLFLLSKENITLSDEQIQTARSGKTPRGAKIIRASGLRKKKGKVAHIEVLPGDYIEPEQLLCEITIEKDDSDEGRIKGAINKSYAEMKRLEAKTFGEMMFNLYEQRCFQANSKKRGEIRNPIRNRKNASGEAVYEFCADRKMMQDEFVLLWSTQKEFDSELSKLLTSDLLKQLFDPRGDKTWKQKGLIFGQRNFYWNIGTLGRCDLEPTDQQCPKPDMYAQEFLVLETLNNIRITPPGEVSRPLDDQERQKVLELFQTQKSIKAGAVRRVLGINRGENKTLYSLSLDADPNRSLNANWFVREIIIKAIGQSQWETYDEKTTESINSALLKYDPENLKHEEKLFQGSQEWWNLTEEQAQKLVNAWKHRPRKDERVNLSRKAIKNLLPYMREGYSVTEARQLFAEDGESGASDEQRQRYALISKRSNKKMRHYLDKHPDRLPPAPMLANPVVRKSIHEVRNHIQAYLNIFGSKPDRIVVELVRQAKQTAKDRSEQLTRNRKREEERKKIIKKYELNRLTKNQREKAIKRVLLCREQKFISAYSDRPISEKNAAEGVGLEIDHIIPKSKRGPDALVNRLLCYEEENRGKTSKTLKEWLTEEEFGRLEQRLRHLKDDNPVKWDYLHKDVKDIAGFTDSQKIDTAYATLQVTSWLRDTLYGGEVDGKRRVFATKGSYTNEIRRDLGLFPDTKAGTAGEKKNRLDHRHHALDAVVIALSGPEQLARLAKKYEKVEEEKSNGYSTAKPEPLAPPWGTLESFRADVMKEYDKLVVSHRPAGRKLTGQLHNDTQLGPVMKDGEVDTKHCKKRIFAIELTPNHLRVPDEWDRLRKQLEKAVSKSEKKAIRSRMLNLEDVKPAKSGVVRDRWFREELREYLRGHGLNVDDCREQNKKEFKKQIKELIKAKGIFLKSGVPVRRITLLRSPTMTPPIKRKYWNVETGKMEDNTNPKSVRLYEPQSNHHIEIREDTKGKWKGEVITNFGAAQRVKPSKASGRKPQPMVNRKDNPDGKFVMSLSIGEMVYMKHPDTKEPDYFVVFKIDGTGRIHFTPHYDAGRSKATETCAARQDIPLSARQLQELGVEEGKGSYKVWVGPLGDIKKLNRD

SEQ ID NO: 10390 - protein, 1198 aa, unidentified
  REGION 1..1198: note = Description of Unknown: Cas Enzyme sequence
MAACILGLDIGSNSVGSAWIDTEKEAVYLGCSVFPAGVEDSEDKRGAPKNQARRTCRGQRRQVARRAALKRRLRKILLEHGLCPKTPMELREWESNNPWQLRKRGLDYELTPHEFGRVLLHMAQRRGAAGIIVENAIKEVVAPKSGFIKAVFVEIEQCIENKQPLFVIAKEDVSFNEEQIVRAQEGKTPRGGSIIKASGLGKRKGNVAHIEVLPGDYVEPGQLLCEIHIEKADSDEGKIKQAINATTAKMHEYGVRTYGELMYMLYEKGEREVGEKEEGGKKKKVLARNPIRNRQNALGESVYEYCADREMLASEFNLLWNKQKEYGGALSKLLTPELRKKLYYPKSDKTWRCKGAIFGQRNTYWKMGSLGRCDLEPTDQRCPKGDMYAQEFLVLETLNNIRITEQGNSSQPLKDEDRERVLELLRTSKSVSVAGVRKVLGINRGHEKSLYTLSLDSDPKRKLNTNWFYREIISGAIGVDKWNSLPDKVKESINAALLKFDPQREGDADKLGAGCTAWWGLTGEQGKRVVAAWRKRPKKEDRVNLSRKAIKNLLPYLREKYSVTEARQLFAEDPTNGASDEQRSRYSLGSKRGNKKMRQFMEKHPGLLPPVPGMLSNPVVRKAIFEVRRHVQAYVTKFGKKPDRVIVELARAARQTAKVRNEQLRRNREREELRREIREKYGLDAMSSTQREKAIKRVLLCREQKFQSAYSDRCISEKLAAEDTGKQLEIDHIIPKSKGGPNGLNNRLLCYTKENRGKGSKTLKEWLSNEEYGALEQRLGHLKKDNPIKWENLHKDVKDMDGFVESQLIDTAYASKQVITWLESALYGDEKEKGLRCVFATKGHYTAQMRRDLGLFPDREDGTRQDKKNRADHRHHALDAVAIALSGPENLTKLAKAYETWEQAKSDGYDEVKREPIAPPWGTVESFRRKVMEKYRALVVCHRPVNRKITGELHKANPLGTVVVDGELQKKLCTKRIFVGELTSNHLRVPPDWKKLAAELRECKTKGQAKAIRRRMLKEVEDCKPGKSGIIRDRWFRQEIRECLQANGLNPDALPKNAIKQLIKNGGMKLKSGVPIRRITLLMADTTVPIKRRRWNYETQQMEYDPDPSTTRLYQPQSNHHIEIREDKNGKWNGEVIRTYDAIRRVNPSKASGMKPQAAVDRNNTDKGKFVMSLAIGEMVYMKHTPVQGRRNVLLCSR

SEQ ID NO: 10391 - protein, 904 aa, unidentified
  REGION 1..904: note = Description of Unknown: Cas Enzyme sequence
SRALAERLEPFERGRALYHLGQRRGFESNRKIVDPDEKQRGQVKESIARLRRDMQAAGARTLGEFFSRLDPRQARIRGRWTARDMLKSEFERIWESQTARHPGLLSNDLKQQIRDAIFFQRPLKVRHDLIGPCELEPNRKRAPWALLEAQRFRFLQKVNDLTVLDKRTYTQRRLTCEERAKLIQHLERTEELSFGGIRKLLRLRKCEFNLERGGEKRLLGNRTAVRLRRIFGERWDRMSEHERKDVVEDWRSIEAPGTLFRRGVRHWGLTEDQARQLSRLELEPGYCNLSRQALAKLLPLLEAGHQYSCAVEQIYGTRLTGGAAHDTLPPVTQSLGPVRNPVVERALTELRKVVNAIVREFGKPERIVIELARDASRSKKQRQAIWKSNRLRQQHRSAAADAIKQFTGRQQASARDIEKHLLAQECDWHCPYTGEGISMESLFGPEPQFDVEHIIPRSRSLDDSFLNKTLCAIHENRQRKGSRTPREAYADEPERYEEILNRVRNFKGDRWVVHEKLRRFQMTEEAVASLLDDFTSSQLNDTRYASKLAARYLGLLYGGRDAEGKRKIYATAGVLTAMLRNAWGLNAVLNDGGEKRRDDHRHHAVDAITCALTTPALVKTLSEAAGLAERHQRRGLRLPGPWPDFVDTVCSAIDRIVVSHRVNHRLAGNLHEETLYSEPLGEEMVVHFRKKLQDLSRSEVERIVDPSVREKVKEKLAALDGNPKQLQSDPPFLETADGRQIPIRKVRLSKKAHVETLGTGARRRRVILGNNHHIEIVATVAAPGSPERWNAGKVVSLLEAYRRRRLGEPIVQRHVGPGKRFVFSLMKGDSLRLETDAGPRLYIVSKFSQTAAGRQEIALCPAETVARAARESKQILRLPPSHLQGYRAQKIVVDPLGRIYPAHD

SEQ ID NO: 10392 - protein, 1012 aa, unidentified
  REGION 1..1012: note = Description of Unknown: Cas Enzyme sequence
MARYTLGLDLGSNSVGWAIIAKDGTRFDNRTPILAGVRIFPAGVADLERGKEKARGQERREKRSQRRVHYRRRQRRRLLARVLMGAGLCPKDGHARLAWIAQNPYFLRARGLDKRLEPYEFGRALYHLCERRGFKSNRKSQSKEDNKVTKDASILQQEIESADCRTLGEYRAQCLAKSDEIQRGTRIRGRYTLRTMYEHEFNMLWESQHRFHADILTEDLKNKCYDAIFFQRPLRFDPEVIGDCELEPGEKRCPVANWLAQRFRMLQEINNLRVMDAAGDRPLTRDERRRLADALGAKKELPFDKIRKHLGFSESQTFNLETEGKRKKLKGNVVEAALQNKVLRKWYKELPEEQHQAVYDALAEIEDPSELRQKATADWECTEAQADALLAMALPDGYLRLSAKAIRKIIPYLEPDHVCDQRCREAFPEKDPEAGHVFSEAKQLAGYPPEPEIPTFESVPPIPRRGDKKAWAAAHPTIRHMGTALTNPLVRRALAETRKVVNAIIANFGKPEEIIIELARDMKHSKVQRQQIHWDNVHRNEENEEIKRRLQQEFGISSPSRDDIIKYRLWEECGGICVYTGKTISKTALFSPEIQIEHIYPLDRSLDDSYLNKTLCFGHETNALKGNRTPYEAFAETPDFDAILKRAERLPWKKRRRFTVQEVAFDNFAQRQLNDTRFASRFATRYLQTLGVPVRPVKGQTTSKLAHYWGLYGVLGTNYSKARDDHRYHAIDAITVALTTRSHLQRLSTVLGRSARRTPLDPPWEGFWNHVRDAVASINVSYRPARKLAGPLHNDTALGPTQKQDTYVYRIPVERLTPAMVADIRDPVIRRIVRERLAQHGVEEKGSAPLGKILTEPPLTMPSGVPIKRVRIQTVEKTAIPIRKVKGQPVKFVLPGGNHHLEIFQKPDGSWTGRCVSRFEACERLRKGLPVVDRVDQFSKPDIPDESKFLFSLCINDMVQLTDPDTGEVKLYRVQKISSGSHMLVLRLHTAAQIDDKETAGPTDSVNQLRRW

SEQ ID NO: 10393 - protein, 1099 aa, unidentified
  REGION 1..1099: note = Description of Unknown: Cas Enzyme sequence
LAGRTFGEMIAQELEARIRPDQADKRYDPVRNRRDSFTFHADRELVREEFNRIWDKQKELGGELAALLTDELRGSLDDPSRDEVWRHRGVVFGQRRTYWSASALLRCDLEPTDERCPKADMVAQEFLIVETVNNIRLRRQGELGQPLTPEQRHRVIERLCREKTSSIAQVRRALGIDKRTLAKQNLPEDAYELNLGADPDRKPNTNWFYREMVLGVFGDAKWQAMSREQHEAVNRAILKFDPAEPNHAERLRRVAVEAWQLDDPQVGSLLEAWRSRPKRENRLNLSRRAIRNLLPYMNEFDREKNRWPTQIEARQQFAEDAHNGATPEQRVRYAVQTTDVLRNLLRSSLRRDPVQVERLVGAALKRRGTGASAPHDEEHRLTLAIGELLARRGLNRARRRFLEKHPDLLPPAPEMANPVVRKAIHEVRRHLNEYLRRFGRAPDRVVVELAREARQSKKVRDAQLARNRKRAAIKDGIREQFGLSRRTKRQQEQAIDRVLLCRQQREVCPYSGKTITEQMAADGDQVESDHIVPKSRSNEKGPSNQVLCFRDANRGKGNKTPKEWLGADSEDFAAIEQRLRHLKEGESPEQYFSPKDCKRKWALLHADAPSTQEFLNSQLTDTAYAARQVVAYVRDALYGGETEGERHVFTTKGQYTAMLRRDWGLLESELDRQWNRAAENVPEDAEHGQRGVARREKDRRDHLHHAVDAAVIAFCWGETIQKIAHDARLQEEMKGKLGQWPSREPIPPPRPWKGNTGFRNAVLEALERVVVSHRPVKRKLVGALHKESLYGPVLGSPHRFTRRIWIWRKAQEHLKPAHLRVPDGWDELSAQLDAQNLSKSAKRRIRRRLAALQDPPPGKTGIVRDRELRDQLRRCLRRNGLDPDDFTPQEIKYLAAEGRVRQSNGVPVKSAVLLWTISDPVRVPRRIWDLTIKKPDERMDRVYDSQNNHHVEIRENLRTGKWQGKVIRAIDAARRVRPAKSPDGTRPEPLPPVDRSDGPATRFVMSLAEAETIHACRKDRAREQPGAVDYYVVAKIDKLRNGARIHFVPHWDARKARGEGKRDEWEVTPADLKGCGPEEGSPPYKVRVSPLGEVRRIDD

SEQ ID NO: 10394 - protein, 1005 aa, unidentified
  REGION 1..1005: note = Description of Unknown: Cas Enzyme sequence
MTDYVLGLDLGSSSVGWAMIAKPGQTFEDGKVILAGVRAFPAGVDNLDSAREQARGQARREARSQRRVHQRRVRRKRRLRGILRAAGLGPADGSSWQSLLAVNPYPLRKRGLDEKLKLHEFGRVLYHLCQRRGFKSNRKQEKTKEEGQIAKQTAELQEQIDRSGARTLGEYLSTLVPEDGDKKAHRNAELERARNRYTLRKMYEREFEALWSQQRFYHAEVLTDELKRKVYDAIFDQRPMDWDREKIGLCELEPTEKRAPRGHWLAQQFRMLQEINALRLIDPETREERALTDEERRKLRDSLGAAKKLPFDRIREKLGLYETVRFNLEDRADRKYLLGNEVEAALQKKPLKRWYNAAPPELKERVHDALAQIEDDEQLCAMARDEWGLDEDQIAKLLKIPSPTGRLRVSLKAIRKMMPFLEAGHVYSEAKELAGYSQTSGTQTRNTLPPVDEAVAHLTNPLVHRALAETRKVVNAVVRTYGRPSEIVVELAREMKHSRQRRQQIFKENVRNREENERVRSVLAKEFNIQQPSRDDVIKYKLWQECQKTCVYTGRPIPESKLFTGEVQIEHILPYSRTLDDSYMNKTLCYADENRARKGNRTPYEAYHDTPELYEQIQQRIRCLPYPKRRKFTVKEIDLDDFVQRQLNDTRYMSRLAVQYLRILGCDVRCVKGGTTSELRHHWGLNSVLYPLAEDQKVRDDHRHHAIDAAVIAMTTRSALQKLSTVKYAPTQVVLDPPWKDFRKDLSEAVNQINVSFRTNRKLAGRLHEDTAYGPGSKPGYAVDRKPVADLTPTMVEQIRDPVIRRIVQTAVADACREKGVQLGGSEKISKVLGETVLKMPSGVPIRKVRIERPESTLVPLRTDDTGRVIKLVKPGGNHHVEIYEKPDGTWWGRTVSRFEAYQRLRNKQPVVERNPGEGSSLKVWFCNDDMVRLTDPKTGVRQLYRVQKMSVVGEKPDITFRLHTAAKIDEHSTMVRIRSWKTLKASNLEKVTVDPLGRVFPCND

SEQ ID NO: 10395 - protein, 1009 aa, unidentified
  REGION 1..1009: note = Description of Unknown: Cas Enzyme sequence
MNRSYTLGLDIGSKSIGWALITRTYKPTIIDIGVRVFPEGVDRDTKGLEKSKNATRREARSARRTHQRLNQRKEQLKRTLQSVSLLPNDESALRTLFHTNPYQLRKKGLDEKLEPYEFGRVIYHLNQRRGFKSNRKSRKEKEDGVIIKSANALQMEIDNKECRTIGEFLSYLNPEEQRIRGKYTFRSMYEKEFDLLWARQTEFYPDILTEDLKKKIRDEIIFYQRPMSWDPERIGDCELEKDETGKPLKRCPRGDWYARRFRLLQDVNNLKILNPDGTEKKLSDDQRKIILDELGKKNKLTFDKIRKKLRLMETQKFNAEYEISKSGKTIEFMKGDIFVYKMRSKNIFGPKKWDAMDEQEKIRLNRWVVELEDDQLREKLQNEYNFDSKQIEAVMKIPLPRGYTNFSQKAIIKLLEFMEKGAITSDAIAVAYPKKQEYGHKNESLKELPRAEDLRNPIVNKALSEVRKVVNAIIREYGKPSRIKIEMAKDMQVNSRQRKELHWKQRENEERNKEARKRLIEDIGISNPTRDDIIKYKLWDECGQVCPYTGKHISQQALFGPNPEFQIEHILPYDRSLDDSFMNKTLCEVHENIHVKRNQTPFEAYSHNPERYEQIKQNIKILPWPKRQKFLQKEIELDQHISRELNDTRYICKRVVKYLQQLGVHVTGTRGKITNELRHQWGLDGIFDELNTKRNDDHRRHAVDAIVVAVTENEHLRKLARCKYSITGESFDPPWAKFRKEVKEIVSCTNVSHRVQRKISGKLHEETNYGRTRRRDEKGQEYYVYRKALTDLTLPMVEKIVDPVVREIVKERLRQKGVELNDTNRKIKKEVWNKPLYMRQTKSDKKVRIKKVRIQDVKNPENMFLLRDKEGNPYCAVDPSNNHHIEIYEYTDTKGRTKQDGVVVTMLEAVKRSQLSKPVIQKDHGPNKKFVCSLSTNEMFMLKLEDGTEVLHRVQKIDQNKRIILRPHTYAGKLSDSDSPPLIQRKSASTLRGHKVTVDPLGHIWPAND

SEQ ID NO: 10396 - protein, 1003 aa, unidentified
  REGION 1..1003: note = Description of Unknown: Cas Enzyme sequence
MSDFTLGIDLGPSSAGWAMIAREGKTLENGRRILAGVRIFPEGVDRYQQKREKPRGQQRREARSARRVHQRRGQRKQKLVAILRNAGILPGDPGELSAVLATNPYPLRARGLDEPLTLQEFGRVMFHLNQRRGFKSNRKQGKTKEDGAVAKGTAALKEEMEKAGCRTLGEYLASLDREFRHTDAQSTRLRNRYTVRSMYEDEFEKLWTAQAPHHPEVLTDPLKAKVHDAIFYQRPLRFDPDVIGDCELEAGQKRCPRAHWKGQQFRMLQEINLLQLFDPTIPRERPLTNDERTALAEALATKRRMSFDEIRRLLGLLDSQTFNLEERSKRSYLTGNLVETALRKKPLAAWYESASPQQREEVYSALAEVEDEEDLAAMAADRWGMSEKQIEKLLAIQLPTGYFRVSLAAITKLMPFLEAGHIYSEAKEKAGYALTPTRDVKAHLPPVDEGIPNLTNPLVRRALSEARKVVNAIIREYGKPAEIVVELARDMKLGAAKRRQVFFENNERRKENEAIRDRLIREFNLPNPSRDDVIKFRLWVECNGLCPYTGRVIPAGKLFGPEVQVEHIIPYSRSLDDSYMNKTLCYEDENRHKHNRTPWEAYGDTPERLDAILQRVRPLPYAKRRRFPLKEVDLDKFIERQLNDTRYLSRAAVGYFRLLFEDDQRVRCVKGGTTAELRHQWGLNGILDAEGGNRKTRDDHRHHAVDAAVIAMTTRSALQRLSTVKYAAAPKELAPPWESFRDDLADAVRSVKVSHRPARRIAGPLHEETGLGWTGEAGTYVRRVAVGALTPAMVEKIRDPAIRDIVKQRCQERGIELRGSKAMGKAMTDPPLTMPSGVPIRRVRILTNESKAVPLRAIGGTIVRAALTGGNHHVAIYEEEGEGRSRWTGEVVTRFEASRRLREGIPVVRRDCGDSKRFRMSLCINDMVTITDPAAGTEDLYRVQKTSSDAGGNRPDIVFRLHCAAQLDDRSSEVRIRSWDKLREYKVRKVVVGPLGRIKPAND

SEQ ID NO: 10397 - protein, 1074 aa, unidentified
  REGION 1..1074: note = Description of Unknown: Cas Enzyme sequence
MGQEKMEQFILGIDLGANSIGWALIKCLVSENEERIKSFGIERAGVRIFEAGVEGELEQGREESRAKTRREKRSIRRQIDRRARRITRLFNILVNAGLLPVPQNPSTQLNLAYRQKSAFIRHKTINDLDKELIEKWKKKLEEENAAKLEIYLLPKRFPYLLRARALDEKLTPYELGRAIYHLGHRRGFLSNRKSEDEKELGKVKSEILQLEGEIENINARTLGEYFSKINPEEKRIRGRYTSRQSYEDEFEKIWEAQKKYYPELLTDELKKEIYHCIFYQRPLKIQSNKIGECEYEKGRKRAPWAILSAQRFRLLQRVNDLKIYTPEGEELDLTPEQREKLIQALEMEGDLTFARIRKILGLSKAHKFNLERGGENRLPGNRTQAKLIKIFGKERWEKFTEQEKNQIVEDLLTIQNYKALKRRAVEVWGLDPESAEKFCETILEDGYCHLSRRAISKLLPYLEQGKPYMSAVKEVYPERTPEEKYEYLPPVKEVMPNITNPAVMRALTELRKVVNAIIREYGKPDMIRIELLRELKINRKARENIWKENRQQEKERKKAVEEILKKTNIKSPSGQDIEKYLLAEECGWRCPYTGRSFSWAELFGDPPQLDIEHIIPFSRCLDNSFANKTLCYAEENRNVKHNRTPWEAYGHNPERWQEIIKRVKTFKGKFAQEKLRRFQLKDEELEKFLDNFTHSQFNDTAYASRTAKQYLGLLYGADANKKVQASKGRITSYLRGLWGLNRILGEDGEKTRTDHRHHAIDAIVIALTEPSMVKKLSNASKKALPGKSWIFAGVNFPPPWENFYQEVKQAIQTIVVSFRVNKKVRGAPHEDTYYSPSREAPDGKFYHYVRKPLDEFASAKDLNQFEKKIQQIVDPAVREAVRKKVFEDLEGDFKKLNDRENHPYLEGKDGRKIPVHKVRIKVPIDKKSLAIIQSPIQNRYVITGSNHHIEIFEYKDKKGNLRWDGEVVSTFEAMRRKRMGEPIIKRDYGEGKRFVFSLAINESVLMKDENGKEQLYRVQKISQNKQIFFIKNTDARPAKDIPPKGRSRTPESLRKSLAKKVLITPLGDVRWAND

SEQ ID NO: 10398 - protein, 1066 aa, unidentified
  REGION 1..1066: note = Description of Unknown: Cas Enzyme sequence
MPRCTLGLDLGPNSIGWALIAEEDHKIVALGVRVFPEGVENFDTAKEVSRNEQRRRRRAMRRGTKRRQRRRRQLREALIEAGLFPSVPEDQETLLARDPYELRARALQEKLHPHELGRIFYHLAQRRGFRSNRKKDRGDKEVSDILKEINELDDEMRKTGSPTLGSLLYEKARRLKHAGRRQGDHIRQRHTRRDMYEREFEAICDAQRRLGNAQLLTDRLKYGHFGKQRYPARPRLRPKHLSPLQAFGLHGLIFFQRSMYWPRSAVGACELEPKQKRCPRAHRRAQRFRLLQEVNNLRYLDPAAREDQQPLDRQQRVLLLGKLGRCEKMTFKQIRKALGFLESVKFNLEKGKRSFLQGLVVDARMAKAVGKSWHARDEEEKDQIVELLIHNELDDDAVVQCLVERFGMTPKQAEAAIKVDLPSGYVHLSLKAIDKLLPHLERGLVYQSLSDPQHSALHAAGYLRRDELQRRLFDRLPDPRRVRDCPVGDLPNPVVKRTLVELRKLVNAILREHGKPAAIHVEMGRDVKTRPKDKRTPTYRRYQEQIDEMRRREQRRDGAAKKLRENNITVNRDNITRYLIWEDQKHRCMYSDRPIAFSQLFSGEVHLDHVLPYSRCLDSSQNNLVVCFRDANVDKGDRTPYEWLVHSRPQQYEELCQRAAGLLHEGRIPYAKYRRFVLKELKLDDFIQRQLNDTRYIARVTAEYLRCLFDADHHVLGVKGQLTAVLRHQWGLENLLAELPDSPAWQAHNNLRPGEKNRADHRHHAIDAVVIALTDRRRLQQLARQRHARGMGTDAGPLPVPWPGFRRDLKNAVRKVNVSHRAKRKVSARLHVDTFYGPTAEKDVWVSRKPVEELSPNEIDHIRDPGIRRIIIARLREHGIEFGRGTKVDGRVWKQVLANLAMPSGVPIKRVRVKKRDQTIRPIRQGTPNRAFVKPGATHHLCIFEFEDNGKTTYEAVFVTMLEAVARLKRGEPVIQRTHPQRPHARFLMSLSRGEMVLVDWDGQQKLLVFRYGVSTENRLHFVEHTDARKSSDCRDYQATANSLIARRKAQKVTVDRLGRIRRAND

SEQ ID NO: 10399 - protein, 1078 aa, unidentified
  REGION 1..1078: note = Description of Unknown: Cas Enzyme sequence
MSSVLGLDIGTNSVGSAWVDTDGHEITLGVTVFPAGVDDKRRPRAQKRREKRSLRRSIARRAARKRRLAKVLAQSGLLPSSDPDDPAFKELIASDPWQLRRAALTTALTPYEFGRVLVHLNQRRGWKAGIEDDQDEAKAQEKGKIKAAIAALRAQMHESKAETYGEFIADLRDERRHTGKGAYRDPVRNRRNSFEFHAERQLVRDEFRILWQRQASFDSQLAPLLTAELRDTIERVIFFQRRTYWRLGTLGRCDLEPTDRLCPKPDRHAQRFLMLETVNRIRIDGRPLSDDQRDLVIAVLSKYKTMTVPRLRKALGIADTGASLNIERERKPEINTDWFAAAIVRGVFGEQRWQSMPERTRESVNRAIQKFGDADEAKLRSGARDWWGLEDAAIDRLVTAWQRRPKGTVRLSRRAILRLLPHMEAGADVTTAKQKCGYPPHGYRLNKATRRFLAKHPDRLPPAPDLPNPIVRKAIHEVRRHVEAHLRKHGRKPDRIVVELARETKQTAKVRQARLKANREREAERQRIIDTILVPMGIEESQWPRAIDRVLLWQRQGFICPYTDLDSAQAATITTQEAALGEGVEVDHIVPWSRSFDNSLDNKILCRRAANRNKGDRTPKEWLTEAQFRQLEARLRHYQERFPRAWGNLHRDPPDLDGFVASQLTDTGYITRQVLAYLRETLYPEEPHKVLCTRGMYTAILRRDWGLVQGPKARWDHRHHALDAVVIALTDHSRLQALARAAQHQERELRRTGHWPTRGPVPPPAGWDHFREQVLAEVADLVVAHRPMRGITGALHEDSLYGEVSADDKLFTIRVPAASLTPAMLRPARQITDSSGRVSWRVGKGGVVRDPALRQHIRDCLASHGVDPDDFSRKQIADLAKAGKLAMPSGVPIRRVRLLRKILDPVAIPTDPRHPRFYIGGSNHHMEILADEATGEWTGRCVTTFEAARRLHPPRGRPKLPLFLGPHVQRLRAKGTLPQQQQDFYEGKRFVMALCKGETLYMADPETGQPAYFVVIKINPDSVEMVEHADARPSNAEVAHQARRVVKKSAGELHKLSLPDGSPPWKVRVTCLGDVEDA

SEQ ID NO: 10400 - protein, 1017 aa, unidentified
  REGION 1..1017: note = Description of Unknown: Cas Enzyme sequence
MAELTLGLDLGPNSIGWAVVDEDQQKIVGTGVRVFPEGVDNFDSSKEVSRNEARRTARGMRRQAQRRSRRKRHLRDALVEAGLLPADSNEQLAVLATNPYELRTRALTEKLAPHELGRVFLHLGTRRGFLSNRKKDRGDKEVKGMLAEINELAAQMDTGDEAKTLGQLLGEKLVALDHRSRYGHDNVRNRHTARAMYEDEFERIWEAQREFGHDELLNDKLKYGVHGRQVYPCRPRTRPARISRLEAFGIHGIIFFQRKMYWPKSAIGLCELEPKQPRCPRADRRAQRFRVIQEVNNLRYTDLGSRAREECRLSEQQRTLLLAKLAEKEKMTFDQIRNALGFLESVKFNLEKGKRPYLLGMVVDARMAKAEGKGWHDRPEEQKDQIVRTLIDNEREDDAIAERAQKQWGMTPQAAQAALNVDFPPGHLHLSLKAINRLLPPMEEKGLVYQSLSDPEHSALHAAGYLRRDELQRRIFDRLPDPQRARDCPIGDIPNPVVKRTLVELRKVVNAILRQYGRPAAIHVEMGRDVKARPKRGTQAYARYHEQISEMRDREQRRENAKQKIREHGVKPTRDAVTRYLLWEDQNQTCVYSGRTISVEQLFGGEIDVDHILPYSRCLDDSQNNKVVCFRRENHDKGDNTPYEWLAESCPQRYEQVCQRSSNWMKQGRFTYPKYRRFLQKELKLDDFIQRQLNDTRYIARATGEYLRCLFGADHQVVGLKGQLTAELRWQWGLETVLSELPDSPAWQQQSALRPGEKNRADHRHHAVDALVLAMTNRRRLQELSRIRREGGTEKTGEILLEPWPTFREDVQQAIRQVNVSHRAERKVSGRLHEDTLYGPTEKDEYWVARKPIESLSPNEIEHIRDPAIQRIIVNRLREHGVDYGRGVKVDTKVWKQALTDLKMPSGVPIKKVRVVKKDETIMPIRADGADEAHVKPGSTHHLCIFEYQENGETKREPVFVTMLQAVNRLKKHQPVIQREHPTRTGAKFVMSLSRGEMVLADWKGQQKLLVFRTAAS

SEQ ID NO: 10401 - protein, 911 aa, unidentified
  REGION 1..911: note = Description of Unknown: Cas Enzyme sequence
MGSYTLGLDIGSNSIGWALLTDGKRKSIAGIGVRVFPEGVDRDTQGAEKSKNATRREARGARRIKRRHHLRRDKLVKRLQEKKLLPEDKEELKQLLATEPYSLRAKGLDEALKPYEFGRVLFHINQRRGFKSNRKTGKANENSKIAKEAGELQRKIKEANCRTLGEYFAKTNPEENRIRGQYTFRKMYEDEFDLLWKEQLKYYPDVLTENLRKKVRDETIFYQRPLKPTDELIGDCDLEEGEKRCPRGDWYARRFRLLQDVNNLKILQPDGSEERLTPNQREILLKELEQKKELSWDKVRKLLGLIETQTFNLEEGKMKKLKGDIFNASMRSKKIFGPKVWDGMDEADKIRLNEWLVDLDDDELIERLAGEYGFNEEQIDRVLKISLPQKYMSFSRKAIIKLLEFMEQGALTSEAIAVAYPDRGKNQEDNILERLPLPEDLRNPIVNKALFELRKVVNSIIREYGKPKSIAIEMARDVRGNKRERDELHWKILENEKRNEEVRQKLVQDLNILSPSRDDIIKYKLWEECGKQCPYTGKHIGQHQLFGDNPEFQVEHILPYSRSLDDSYMNKTLCCVIENRLKGDQTPYEFYHGDAEKFEKLLQRVNRTAMPHWKKRKFSQQEINLDKCIERELNDTRYICREVVKYLKQLGIYVHGTKGKITAELRHQWGLNNILDLTGSGMKNRDDHRHHAIDAAVVAVTKNEHLRRLAKSKYSTVDSSFAEPWEGFRTELEEKINKINVSHRVCRKVSGALHEETNYGPTGLKDEKGQDVFVYRKKLEDLTIPMVGKIVDPVVRNIVKERLLQHNIDLKQNKKIPKEVWNEPLYMKNTKSDKKVQIKKVRIRDVFNNMIFLKDREGNPYRAVAPGSNHHIEIFEYTEGKKRGKRDGEVVTMFEAVRRKCSGEPVIKREH

SEQ ID NO: 10402 - protein, 1039 aa, unidentified
  REGION 1..1039: note = Description of Unknown: Cas Enzyme sequence
MSSDDSQLVLGLDLGSNSIGWALVALESGKPSRLADMGVRCFEAGVEGDIEKGMDESRAAARRGARLQRRQIWRRTRRKGHVARVLQHNGMLPKGKLDTDEQRLEFFTEMDKRLAAKMLAPLDKDDPERRRVAHVGLYMLRARALDEKLELYELGRALFHLSQRRGFKSNRRAVPKKDEDQGVVDTGIGELREKMAEAGARTLGEYFSKLDPEQERIRSRWTSRKMYETEFDLIWQAQAKHYPKLLTDELKKIIHTAIFFQRPLKSQKGLVGRCEYERGARRAPKACIEFQQYRIWQKINDLEIISLETGEARRLDASERDKLAARLERHKEVTFAGIRKELGLKKKLHQFNLERGGEKNLKGNDTVFKMLKVFGERWFEFSTDEQERIIDDLRSIRKDEHLKERAIRVWGLDAEQAETFAKVSLEEGYGTLSRKALRKILPEMKKGRQYMEVVKEIYEDRAEVALVDFLPALKDSHLVVLNPAVIRALTELRKVVNGIIRRHGTPDIVRIELARDLKRSRQERKKVSARMRKNEDERRAVLQRIEDETGMTEPSGGDRLKVRLANECNWRCPYTGRSINMHDLIGPESQFDIEHIIPYSKCLDDSMANKTLCWHEENRNVKGNRTPFEAYGSTEQYSEILQRVADFKGPMRETKMWRFRIEDADELEDFSARQLNDTRYISTLAAKYLSMLYGGLWDADGKRRIQTNKGGVTARLRDCWDLNSVLGDGGAKERTDHRHHAVDAVAIALTDARTAKLLGKAADTAWEKGQPRRLRRYMPQPWDGFLDDVRAAVDNIVVSHRVSRKVNGPLHQETLYSHRDGREYLHYRKLIKNLSKPEVSKIVDDRVREIVTAALDGDDPKKVFAEKGRRPYLETRDGRRIPINKVRLAKKTKAMEVGQNARARHVLPGSNHHVEIFETADGRWKGKVVSRFEAMQRVRSKQPVVQRDHGEGNTFKFSLAINDTVSMKDNQGNRDLYRVQKLSVDRKGQILLFFIGVNDARQATKIPASGRSRTPGTLGTSECEKVSVTPLGDVRLAND

SEQ ID NO: 10403 - protein, 1058 aa, unidentified
  REGION 1..1058: note = Description of Unknown: Cas Enzyme sequence
MSQQQDHPPYLLGLDLGVQSIGWAVIDLDEQGRPCQIRKTGVRCFDSGVGSETQIEMGKDESANAERRDARQQRRQLWRRARRRAAIFHILQRAHLLPEGSAHTPEQRHSLLEQLDRKLLAEGNLLGNRLDAHLLPYLLRKKALDSPLSPHELGKAFYHLAQRRGFLSNRKAKKSTEDEGVVKAAIGELEEAMHAAGARTLGEYLAGLDPEEERIRRRWTSREMYWREFDKIWSAQEPHHPNLTQSLRKQLWEALFYQRPLKSQKGLIGQCDLEPKQRRAPIACLEAQRFRFFQKLNDLQVTTPDGTPRPLHDTERAKLVEASETTGELPFRGRRGIRKLLGLTKPRGSEYGYDFNLERGGEKKIFGNRTAAKMAKTLGPRWGELPDSEQGRLVDEILSFQNEDALARRLVKAWGFDEATAAALAGLEFESGYAALSREAIRNLLPRLQQGQRFATARKEVYGEQLSATSVYQALPPVLDAVPALRNPVVTRALTELRKVINALVRQYGKPDVVRIELARDMKRGRRMREEASKRMRQNEKLREAAKKKIFEEMHVEHPRPGDVLKVLLAEECNWQCPYTGRSIEMTALIGPNPQFDVEHILPFSRSLDNSYMNKTLCYHEENRSVKQNRTPYEAYAGNPEKWHEILARVRRFRSTAAGSKLRKFHMTELPGDFAQRQLNDTRYISRLAADYVALLYGGRSDASGRLRVQVSTGGVTAHLRNLWGLNAILGDGPTKVRTDHRHHAVDAVVIALADPPTVRLLSQASQRASQLGHRLFAPVDRPWEGFGDQVAESVAAICVSYRVDRHVRGALHKDKLYSEPMKTINETGETIECRHIREPLKDMSLEKVNAIVDPRIRRAVQQKLEQLGGPPKTAFADAANHPYFRTRDGRIIPIHKARIRKAQATISLGEGARRRYAAPGKNHHMEIVARLDAQGNEKSWEPHVVTLFEAQRRLAHSRVEPSEPVVRRDHGAGKRFKFSLAGGEYVEMEHEAAKRQLFRVTVISGNEVEFRLHTDARPDKVLRKIGGRVRRTAASLFKAKARKVALDPLGNVLPAND

SEQ ID NO: 10404 - protein, 1033 aa, unidentified
  REGION 1..1033: note = Description of Unknown: Cas Enzyme sequence
MKAKNNAAILGIDLGPNSIGWALLKKNKAKPGLIGTGVRVFEAGLASLEQDGKGKSRNVERRMARQTRRLLERRSRRMLNLAHALQRAKLLPPGEIDDPAEKYDYFLKLDQGCESPYVLRARALDEELKPYEFGRALYHLGQRKGFLSSRKSPPKKEEDEGKIKADIKALQSQISETGARTLGELLAKLQSEQVRVRERYTSRAMYENEFELIWNTQAKFQPGLLTENLKQEIHHIIFYQRPLKSQKHLIGKCELETGKRRAPWALLPVQRFRYLQRINDLRAIDESTGELMEIGDEGRATLIKYADTQGDLTFPRMRKILGLKRTVKFNLELGGEKRIPGNRTAAKLIAIFGLNRWQSLSDNERDAIIVDIRSIVKDDPLKRRAMHVWGLDEEAANLLLKLHLEDGYCNFSRQAIEKLLPLLEKGIPLQTAIKECYPEKWDRSDQPHDLLPPVNSGELPELRNPIVERTLTELRRVVNSIVTRYGLPQEIHIELGRELRSSAKQRATAWKRMRANERARKNAAQKILDEVGIENPKRADILKILLAEECNWQCPYTGKQITPPALFGDHPQFDIEHIIPFDRCLDNSYMNKTLCLSEENRSVKHSRTPYEAYHNSDKWDEIKRRVSQFKDDARREKLRRFRMDKQGLREFIDGFTSRQLNDTRWASRWAKRYVGLLYGGVTADGIDATGKRRVQATTGPITAYLRNEWGLNAILGDGPGKSRDDHRHHAVDAIVTALTSPSMVKRLNDAAGRANKTGRRQFDSIEPPWPKFLTDVSELTRTLVVSHRLDKRVRGPLHAETFFGKPRKDKKGRQYVHQRMFVSDLKAKDIPMIVDPVIRQAIQGKVEQAGDDPTKVFPNRQVYKLETTDGRRMPVRRVRIRRRLETAFNVGEGLRARFVQSSANHHMEIVSVLDDEGNEMKWEGHVVSLFDAYRRIRNGEPIVARDFGPNRRFKFSLANGEVIGLKVAQNQRSLYVVRSVMADKRIRFVPINDARKLEKIGRKGLTAGPEILRRRGCAKALVTPLGEVRDAHD

SEQ ID NO: 10405 - protein, 1037 aa, unidentified
  REGION 1..1037: note = Description of Unknown: Cas Enzyme sequence
MEYRLGLDIGTNSIGWCVMELDGEKRPITVHDAGVRIFSDGRDPQDGSSLAVTRRVARQMRRRRDRYLRRRERLMEALVKHGFMPGERKERKALEALDPYEIRARGLDERLEPYQMGRALFHLNQRRGFRSNRKVDQGDEKESGKIKSAVGKLALEMERDGARTLGEYLHRRRKRSEENHRNEEKTMLPVRARLIGEGAKAEYELYPSRDMIEHEFDTLWAAQEKHDPALYTQEAREELRDIILFQRPLRPVQSGKCTLDPTDKRAPMALPLAQRFRIYQELNHLRLIEPDHTDHPLTLAQRDLLADRLLTRGKVTFDAMRKALKLEQNVHFSHETEKRKHFDGDQTAMALAKADRFGKHWRALAPSEQAAVVERLLDEESSDAEVAKWLIESYLLAPENAEHVAAARLPQGHSRLGRRALERIVPILEREVITYDKAVQEAGYAHHSDFPPGELLDELPYYGESLERHVAFGTGEPEDPEEKRLGKIANPTVHIGLNQTRKLVNALIEKHGQPAQIIVELARELKSSFEERERLRKEQAENQRKNDVRREKLASLGLADTGENRLRLRLWEELNHDAMDRRCVYTGEQISLTRLFSEEVEIEHILPFARTLDNGYANKTVSLRRANRVKGNLTPYEAFGHSPAGFNWDEIRARSQALPRNKRWRFGAGAMERFEGEEAGFLDRQLNETRYLSRVVREYLMHVCDPNQVWVSPGRLTAMLRGKWGLNTILSGNPAKNRDDHRHHAVDAAVVGVTDRSLLQRVSTAAGRAREGDAQRLLGDMPLPWEGFRGDLDRAVSGIVVSHRPDHGAGGKLHEETAYGIVDDHTLVFRKPLASLTRSEVANIRDPKIREEALAAVEGASGKRELAEALRSFAAEKGMRRVRILKTEAGFIPIRDREGKPYKALIPGENHHVDIIERDGRWEGEAVSVFHANQKGYQPAWMRENPRPKLIMRVHKGDLIKLLDKNGEEQVMRVVQLWKGLFCLAEHNEGGNLQQRHKDLEDSFRWDFASFSKLKDRKARKVHVDVLGRVHDPGAPR

SEQ ID NO: 10406 - protein, 992 aa, unidentified
  REGION 1..992: note = Description of Unknown: Cas Enzyme sequence
MAGYKLGLDIGAKSVGWALIEDGKRPSIVDIGVRVFPEGVDRDTKGLEQSKNATRREARGARRMRQRRTRRREKLVELLQSSGLLPKDKDELDELLKKEEPYALRAQGLDEKLELVDFGRALYHLNQRRGFKSNRKGGDAKEDGKVKKEAGELGRKIEEAGCRTLGEYFSKLDPEEERLRGRYTFRSMYKDEFDLLWEKQAEYYPDVLTEELGKKVGEETILFQRPLKPTDDLIGDCELEDGEKRCARGDWYARRFRILQDVNNLKIHNGDGSVVELRQGQRELILEEMSNAKEVRFSKLRKALGLLESQEFNAEYETNEKGKKREKIKGDEFNSVMGKKVFGAKVWVGMEEAEKVRLNELVVDLDDDELIEKLSNEYGLDEKQIEAVLKISLPGRYMSFSRKAIQKLLPLMEEGKRTDEALAEIYPDRNKREDEGQKERLGFPEDLRNPIVNRGLFEVRKVVNAIIREYGKPEGVAIEMAREVKGSARERKEQHFKMLDNEKRNEEVRETLMRDMNILNPSRNDVIKYKLWEECGKVCPYTGKSISQNALFGPNPEFQIEHILPYNRSLDDSYMNKTLCEVHENISVKGNKTPYEAYSGDEEKYEAIKQRIKVLPWPKRRKFLQEQIDLDECIKRELNDTRYICREVVKYVRDVCKKVSGTRGRITSELRHQWGLNNILDLSGSGLKNRDDHRHHAIDAAVVAVTRNKHLRDLAGSKYSVGESSFEQPWEDFREELAEKVKHINVSHRVTRKVSGQLHEETSYGVTKEEDVYVYRKKLEDLTGPMVGKIVDPVVKNIVKERLEGKGIDPEAVKKIPKEVWSEPLYMRNTKSDKRVKIKKVRIRDIFKNMVKLKNRNGEEYRAVAPGSNHHIEIFEYEDEKGNLRRDGVVVSMFDAVGRKRRCEPVVNCDHGENRRFVCSLCINELVMMKDKSGEMDLFRVQKMSQNKQIYFRHHTAASIDNEVTLLRKQVSQFDGYKVTVDPLGRVHKAND

SEQ ID NO: 10407 - protein, 1006 aa, unidentified
  REGION 1..1006: note = Description of Unknown: Cas Enzyme sequence
KGKKMSTYRLGLDLGSNSVGWILVGLGSDKKPCNIMDIGVRVFPEGINRDTKGAEIGKNEQRRLARGSRRQRARKVMRREALLHILRKNDLLPDNEIDLDTRFKECPYQLRKKGLDTKLTQHQFGRVLFHLNQRRGFKSNRKTGKANENSVVLKACNELQQQIEAANCRTLGEYFAGLDPEQDRYRNHYTFRAMYEKEFDLLWQSQKKFHPDILTDDLHEKIRNGIMFFQRPLKPSDELIGDCSLEENEKRCPKGHFHARRYTMLQDINNLEIISRDGSSRKLSESERSKILELLEQHKDRTYDQLRKALVPFGIIEGDSFNLEEHQSDNKKLKGDAFATAMRNKNIFGKKRWGTLSQAEQIAINDAVLDLDDDELIEKMVQDYSFNEKQIEAILKVPLPQKYMSYSLKAIRKLLPFMEQGLLLHEAKEKAGYEQDTPTDNLCDKLPLPDDLRNPIVNQTLFQVRKIINAIIREYGKPDKILIEMARDLKNSKRQREEISKKQRDNQKANDRARDMLISDIGILNPSRDDIIKYKLWEECNKHCPFTGKFISQNQLFGSTPEFQIEHILPYSKTLDDSYMNKTLCHADVNREKGDRTPFEAFGHDSDRYEEMLQRVESLPYPKRKRFTQKEVFLDKCIERKLNDTRYISKEVIRYLGQLGVHVQGTRGEATADLRWEWGVDGILNPLANSKNRDDHRHHAVDAAIIAVTEPKHLKELARFKYSHERDTFDQPWQGFRKELEEKVSQINVSHRVSRKVSGLLHKDTSYGSTQKENVYVCRKALVDLEPEMVHKIRDDKVRSIVISRLEKFGFDSRKGIKTKKAEWLKITKQSWATPLYTYSKKGLKIPIKKVRIFNKLNFMMGVKDDKGKEYRYLAPSSNHHIEIFSSPDGNGKSKRYFRVVSLFEAAKRIRNSQPVIDRVHENGHRFLMSLSINEMFMLKMENETYALHRIQKMDKKGSVILRPHTYSGKVSDTDKPPLIQRKSHSTIEGYKVTVDPLGRIHPAND

SEQ ID NO: 10408 - protein, 1012 aa, unidentified
  REGION 1..1012: note = Description of Unknown: Cas Enzyme sequence
RFEAGVLGDIESGKDESRATARRDARGPRRLTWRRQHRMRKVFCLLQRLDLLPPSADDSHDQRHRLLAELDRQIRENPQSPFGEAAHRQLPYLLRARALHEKLSRHELGRALYHLAQRRGFLSNLKAAKKDEDVGVVKQGISDLQQAIEQAGAATLGEYFASLDPEEQRIRGRWTARRMYEDEFDKIWTAQSRHHTDLTDERKQELHDAIFHQRPLKSQKNLIGMCDLEPSKRRAPTACLEYQEYRLLQRVNDLQVIQPDSERRPLETDERAKLLAELQQREKITFGGIRKLLGMKKSKEYGRNYTFNFEERGEKEILGNRTAAKLLAAAGERWRQLDAQQQRSLVNEILSFESEEPLITRLTNGWGFDERQAKAIAETHFEPGHGALSRKAISRLLPSLREGVQFATARKAIYGEALESTDPIDRLPPNHDCAVLRNLRNPAVERALSELRKVVNALIRRFGKPRLIYIELARDLKHARKRRQALTDQNKKNQKAKEDAKKRILEEMGDERFCTERNILKVRLAEECSWQCPYTGREHIPMVDLVGDAPKYDIEHIIPFSRSLDNSYVNKTLCFHEENRNVKKNKTPFEAYHGTDKWEEILERVRRFKGDARTVRRKLELFQVEKLPDPDEFNARQLVDTRYMSRLAADYLGLLYGGQIDAGGTRRIRVSPGRVTHYLRQRWDLNSILGHPDQKERADHRHHAIDALVVALTDAAQVSALSRAAEEAERLHLDGLFPRDGSFEAPWDGFLDETRHNVERIHVSSRVSRRLLGKLHKDTIFSKPKPFDDGSGKPAHAHHVRKPLESLTTQEVGNIVDERIRHIVQEKLAQIGGTPDKAFKDKSDHPYLKAKDGRIIPIHKVRIRKSDKPMAVGKGSKRRYVNPGANHHMEIVAVLDKDGNEKKWEGHIVSNFEAVRRRRAGEPIIRRDHGEGKRFKFSLAGGEHVEMEHEPDKRQLYRVVVISGSQIEFRLHSDARPATILKKIPAGRVRRSVGKLREANARKVTVDPLGNL

SEQ ID NO: 10409 - protein, 1035 aa, unidentified
  REGION 1..1035: note = Description of Unknown: Cas Enzyme sequence
MKNGFAAPYVLGLDVGSHSVGWAVLPLHGELPSAIENAGVRIFDPAVAKGDIEVGTDEPPGAQRRLSRQQRRLIDRRARRKRKLFHILQKHGLLPPGEAGEVLPALDRAILHRRWPEGSGGADSGRIHHTLPYWLRARALDCKLEPYELGRALYHLGQRRGFLSNRKTAVSKQKEEGVVSQGIGSLQAEMEQVGARTLGEFFAGLDPRLRRIRDRYTSRAMYEDEFERIWTAQAPYHPGVLTDELREQLHDAIFYQRPLRSQKGLIGECELEPGHKRAPWALLVAQRFRLLQRVNDTRIICPDGTERALRPEERSALIEKLETVEELKFARAKKLLKLSEEHAFNWETGGEKRFVGNTTGARLAKIFGKRWQGFSSADKDRIVEDLRSFEKRDALKRRAMKAWGLPEDAAEKFADLHLEPGYCRHCRKALVRLVAEMENGTPYVTACDKLYPQRRKPSVPLDLLPPLQKTNIEVRNPAVCRALTQLRKVVNGIIRRRGKPTEIRIELARDLRRSRKQRREISKRYRQNERARQEAAAKIAAEAGIPNPSRADIEKVLLAEECNWTCPYTGRSISMNDLFGSTPRFDVEHIIPFRRCLDNSFFNKTLCEAQENRSRKRNRTPWEAYGHDEQRWHEIIQRVKRFRGRGRLEKLRRFQTREVEDLGDIATRELNDTRYASRLAIQYLGLLYGGVIDETHKRRVQAARGGVTALLRDLWGANAILGDGGTKSRDDHRHHAVDAVIVALTDPAAIKALSDASARPWRAGPISFSGASLPWPDFLDDLRRSIQAINVSHAVSRRVRGPLHEETFYGPTDDPSVFHVRKRLSELSSTELDDIVDDRVRHLVKAKLQELGQSDPGKAFQSPQNHPALPNRRGAPVPIHKVRIRKTLSAFPVGTSQPRWVVSKANHHMEIVETTDRRGRPRWEGHLVSLYEAARRLKNNQPVVRRDHGPSKRFLFSLAPGETIELDNPDGSRGLYVVRSIWGDRIAYVHANDARKIKDLKSAKAIHSPCTDSLRKMNCRKVTVTPLGEVRRAND

SEQ ID NO: 10410 - protein, 1141 aa, unidentified
  REGION 1..1141: note = Description of Unknown: Cas Enzyme sequence
MPNLLGLSIDVHAIGWSLIDRDSKKIIAMGSHIFPVACENYGSGKRELSKRAYKRGKRTIRLRYQRKRKRKIKVLSILQTHGMCPLSEQGLRDFKLHKKFPQEELKNWFFLNPYELRVKAIKERISLEEIGRILYQITLRRGFPTSERNRGKKENTMYLGAPIQNRIGINQTLIQKKEETLGCYLHTLLPHQSVSYHHTEVRVRNRYLTRELFQEELECIWEFQKEFHPELTPALKTKLIGQLQHASSEKGAVFFQRPLKSQKFRIGRCPFEPKKPKCCVSSLAYQELLAYRWANSLKRNGEFLTPRDQATAKEFFMTHKRFDFSRLSSLFENPEGHYNIKDTELIKGSFVNATLSHPHLFGSFWFQLQEKDREDIWHNLYFFNDEEKLKLYFMQRWGFDDYQAKKIAAIQLDKNYAPISKKATKNILYFLKRGVVYDLAVLLAGVKNSLGEKWDTIAENDINYIIRKVLLLHQEFKNQDFIDQLQYFLQEEMQLETLSTSKLYNLEVTQKKIKLVSKFPVGKQADKEIRSLKNPHLVNITFQVRKVLNELITAYGPIDEIKAELSANIKLNKYQRYLYKLDQNRRKNLKKNYIELLGNQAENITPLNLTKYELWEECKHTCPYTGAHISLHDLFTDKVQVVYIQPWQYSLNDSHWNKTLCVKSFSESILDLSPYEYFKNHSPDQWENIVKRAARLFSNTKTFPSSYRKFKRFVKKHNHRDPLKHQIEDTNIFSRHLKNYLSLGIKKVRVGPGHTTRIMIEKWRLHKIFKPEIYENPDLDYRFHALLAYINANRTKAYIKLLISENKYQPSKKINDFPDPYPEFIDELEYHIHSILVTHKKTNKLISSRKHRVKIKDQYYENYCLSIRGSLHKETVFGKRTSPEDQQESYHIRKHLNEIKTQKQVLKIVDPQVRKVVLEAINTAGGFKGELVPNHAFFSKNKEGYLVPKVFLPNKYGDPVPVKSVRKREILSGVIQLKKEQNQYVNLRNNHHVLVYLNDQDEYCEEVVSFWEAIRRYRFGEPIFQLPEGGKEFITSLQINDTFLLDIADKALDLKLESRSFIAKHLYRVQKLSSKFYEFRLVHDNDISSTESPSYIRINNFGHRKTGWQTHNPIKLSMNVIGTLSFRDEKNDFKKSLKSYL

SEQ ID NO: 10411 - protein, 1040 aa, unidentified
  REGION 1..1040: note = Description of Unknown: Cas Enzyme sequence
MEKTLGIDLGPNSIGWALIDIDNEEIIDSGVRIFEEGLNRNGGKEESKNATRRDARQSRRMNARQKARLRRLSYILKNNDMMPTNDTDLNLFFKLDPYYTRSAGVKSKLSLHEFGRSLYHINQRRGFKSNKKSDAPTDTGKIFDGKDDKTGINETSDGIINGGFKTLGQYLHSLNPHHKRQRNRYTLRAMYIDEFNILWNKQAEFYPELFREPLKKDLFDSIFYQRKLKSQRHLVRHCTFEPKKKVSPKSSLIFQDYRIAEQLSRIRISYGERENEILTESEREILANLLNTRSSITFDQLKKKLSFPEEAHINLQSQNKLKGNSTQVEFRKVFGVNIWDSFSEKEKHDIWQTLHYYNDPPDNEKWLQNHAKKKWGLNIEQIDKLLKIKLEKDYCNLSHKAMAKILPLLKQQFVTDEQLEMLNQIHKIPSKSQLMTYDKAVALAGYHHSQLNKNSGTKQRLPVPDNLRNPIVQQALHEVRHVVNQINDVHGKPDVIKVELTRDTKNPKWKRNGLLKLNSKRNKENEAIKGILIEQGISQPSRTDIIKYRLWEECNKTCPFTGKRIPFSGIFGEGGNEFQIEHIIPYSRSLDDSQANKTLCHWKTNQIKHNKTPFEAFGHNEQHWEEILDRVFKFRPTDGITRVTPEIGKIEPKWGNKLRKFKLKNIDEKLSNEFVARQLVDTAYISREVTKYLSNICEKVYTSSGKTTSTLRYHWGLNEILSGNIEQKQREDHRHHAVDAIVIALTSHSYVQTMSRFHKYDCEPGRGRFPIPWSSFWVDAKESVNKILISHKVNNRARGQLHKDTNYGQIILPNGEKGFVVRKQLNALTPKEITNIVDPIVKQLILSHLKSLGVDTSQKSFSIPKGAFDTSLHLPNNPYPIRKVRIIKPSTRLLKLYPDRNLFVEYGTNHHIELFENEDGKRDFRICSLYDAVQRQKNGKPTVNQIPPKEGYSFLMSLAINELVLLDVEPNQIDWNKPPSSQALGSQLFRVQKMDKNGILTFRHHTVSIVSDDTGRVIKNFSTFKGMKIIINELGQIRPA

SEQ ID NO: 10412 - protein, 1132 aa, unidentified
  REGION 1..1132: note = Description of Unknown: Cas Enzyme sequence
MSTKKILGLDLGTSSIGWSIVERSEGNGKIIGMGTRIFQEGVENLGEGQNEISKNASRRDARQARRQKFRRKLRKRMLLTLLAEHKMCPLTKEETSTCKASDSLPVSNELKDWFAINPYDIRSRALIEEVSLIELGRAFYHMGQRRGFQTNSRDAKEDGTIFSGTPKDGKTGIDETQKKIKDGTLGAYLNELYPEENTTYKDGLTRIRNRYTTRQMYIQEFEKIWEKQATYHKELDSALKERLGGRKKESSEYTMDGVLFYQRPLRSQKHTIGKCSFEPTKPKCPISAIEFELFRAHQFINTIEYNGKRLNDEQRAVVLKELLAKEKPKFAAIRRTLKLQANEFKFNYKDDDTCPGSHTISHLSNKKFFGDGWFKKSAKEQEDIWHVLFSFDDQLKLKAYAAKHWGFNEEKQIAIAKFHLKQGYAQLSRKAIRNILPYLKQGFGYDIAVAMGGVRNAFGSNWHSLKAEQLDFLDANVPSIVRSNLKGGYIDHLRNMLVDEFGLSEKSLRKLYHHSTNIHVGELLDALPVSAEADREIQKVRNPVVIQALFELRKVVNALIERYGKPDQIKIELARDLKVSKEKRKEVRSEQKRLEKVNQHVVDELNHFGIRPTHDSILKYKLWIECEKTCPYSGKPISFEQLFGGSGEIQIEHIMPWSRSLDDSFMNKTLCYADVNRKKGDRTPYEYFTQDYGDEKWEEVKNRASSIFYDVRQLPEKYFPNRYRKYKKFVAKKFDDDFISRQLNDTRYISKEASNYLKKVCTNIMVAPGLSTATLRHHWGLNSILSGSDNKTREDHRHHAIDALTMCCTERSHLQQLSRINKYSSLKEITSVEEPWEGFRSDAEEMANTILVSHKRNNKVITVRNVYTKKNGKTYTNLGVSVRGQLHKETVFGKPKGGQDGTYHVRKPLESITTSTHVGKIVDPRIRKLIERRIEDLGGYKGKNVPKDAFFTYDEEGNRIPLIKLPNSKGDDVPVLKVRIKENLTNAEQLNEGINRFVNPRNNHHVLIYEKEDGSLAEDVVQFWTAAERKVQGQDIIQLPTDGKKIVATLSENDLFLIDPDGVIESWDTTEDDISNHLYRVQKISSSYYTFRKCIAATLNYSEEEFSIRSLKKWGEVAPKPAKINSIGNIHF

SEQ ID NO: 10413 - protein, 1037 aa, unidentified
  REGION 1..1037: note = Description of Unknown: Cas Enzyme sequence
MRYRLGLDVGTSSLGWAVLELDNTDRPSPIRLVDLGVRIYSDGRNPKDKTSLATQRRVARGMRRQRDRRLKRRARLMDDLIELGLMPTDVSERKSLEKLDPYELRAKAVEGPVSKHELGRALFHLDQRRGFKSNRKTDAAAGDDTGVIRSGVAELDRRMTQSPAKTLGAYLHNRMKRGKGTRARPDVGIYPERRHYQQEFQCIRDTQAPHQTLSNADWERLEQTIFFQRPLRPVLPGRCQFETNEYRAPKALPSTQRFRILQEVSNLRIIPDVGNERPFPQAALEEVIERLGNQKTLGFNAIAKLGGVEGGERLNFDDGKRKHLQGDETAATLIKAGWLKESWSALSLEERDRIVELLIDVEDEAKIVQQLTTDWGLDPETALAVSRARLPEGYGSLSRKAIGRLLPLMDQGVPYYAAAKEVYGHHSNFEDGESLKKLPYYGERLTTSVVGGGDHSAETEEGRYGRFPNPTVHIGLNQTRRLINALIDQYGHPQEIAVELGREMKQTLEQKKETLSRQKADQHRNEKYRAQIEEMGAAATPDLMRRLRLWEEQGPPQARVCPYSGDPLSFEQVVRGDDLDVDHILPFSKTLDDSMSNKVLVKRVMNRRKGDRAPETAFQGDEYEAIQLRTARWPANKAWRFRVGAMERFNKNSDFLDRQLNETRHLARATKTYLNAICPNKDTWVLTGKMTALLRARWGLNSLLGSSNQKDRTDHRHHAIDAVVQAMTDRGLLQQIARASARDDVDRVIDAVPENPITLPDLRDQVRDKVNNLIVYHKPNHLRPNRNGATTGALHNATAYGLVGAPDSNNKQLVRYRKPLASLTPEKLQETIADRALAARIADDWEKAKATGMKWEAYTAALEKPDKERGGGLPKTGIKSVRILEGMSANSLFSISDASGRRYKAYKTDGNAFMDIYEDAKGLWRGETVRRIDANQNGFTPAWRSLPGVRFVMRLHVDDLVAIEEGGPKNTFRVVKMSGQGLVFAHHNEAGALKARDADKEDPFKYFSKSASAAKAIKMRRLKIDDLGHVFDPQMPT

SEQ ID NO: 10414 - protein, 1436 aa, unidentified
  REGION 1..1436: note = Description of Unknown: Cas Enzyme sequence
MTKKIISPIAIDLGAKNTGVFLSQYFEGEALQSHHSKAVTLVLPENASKMTYSQQARTATRHRIRTNKRRKLAKRLLKLAVFKLMEKGDIQLTGVEWDKSWEALCGLMNRRGYNRINTELDEGALISCDPRWFHEQLGDYFTNLETPLLEQWQRIIQRKEQIRDLYETDIFELSKKDFKKRLKTDGIEDKDEQEAVTLAWESMKIELINMISELDFGHRHRKEYLEIIYRELEKDSRLSPLVNTCGIENLWRVIGNISNLQLRTSRWYFNDAKMKEGDYWDGQKLHEVLIRWFRFWRPQSTVEKRSQKEALDLLKSHSDVLDVLSKIDPKLTIPPYEDQDNRRPPKDQTLWLNPQALETQYGNVWQIWGQKLLLKHPELSEGLIEILALFDRKSRLKSESFNLYDKNNPDLHNQPLALSYVLQRLLDRNQQLDKYRLRYLCKSQNNHNARKALENLSNVLGTQHLDKFLHFCQKYYHEVTLAKQGLWTISNDNLLERADINPPHKKKILAILVSNTLGENWDNEKLQDFKSNLWSKTVSGRSTLKSLCAAIEKCRKEHGNLFNEKLKRLRYRVEHLRENPKQLKGDEKILWSIWEKTMLVANTISDYLEHTTEKKSKYENPFSLSQLYNLLETDRNGFSKISLAAHIENTWRMGQVMLEGKKIARSSRLPADSIRPFDGVLRRALDRQAYEIAKLKAEQIQTISDKNTNIIVPLLIEENRFTFNLGLGELKKNKKKKDEITKKLNQQTERWDEKLSRIQKASKGICPYNGKEIGDHGEIDHILPRSESKSKDGTTFNSEANLIWCSRAGNLQKSEKRYLIENLNSKYLIVQFGTSNTHEIIDIINKTVASLGEDFIFDSLTEQEQRDVRHALFLPIESQAFKKVSWRLASQLSMRVNGTQGWLLREIMRSLSLQLKPWLQNTGNALSFCAQRISAEQVHSVRRRLSEENIHFEKKEIQSTISHVIDAMCVLASASAAPKLESQLCLGSSLVEDMAWLSSCMPNQADILHIQNLPIYRKDDISSQQLFKENPLSENFHSIWVNNKGVKIGFDPYNAESHVTVEGSDPYQLIQSLEAFLCDHIDLEKSIKSEKYIRIKIDKNKTFSFFDQIAKHPHTTEDDQLARLLESLTYITQNKEIWSHIYDAAKKSFKSRNDIFKKDLFFTKVTLQEGRGRNVIFSCKGNIQLPSFHDWQRLLNNDQISALIGKKNKLPEDTRGISQSFFNSGSKRPHGKSRRIYSLPILTKSSGGFRFRRKAPEGKTHWQRHDIEGSAVSGFIVDDDHINWKQCALLEPIAKSQRVTEANARYVSINNSVRLDHWLAIPMQQLQEPPLQLYLSPATKGRFYIRIVQNFDQFKNWLNGAVDQIPSSYFDLNNTLKLKDTKRFADNHNLTLLGKPRKTLFIETIGVSVCYRYEVDSTNAEMRNAYQEAYSSLINS

SEQ ID NO: 10415 - protein, 1071 aa, unidentified
  REGION 1..1071: note = Description of Unknown: Cas Enzyme sequence
MRLGLDIGTNSIGWWLYETDSNATSGNIVGIIDGGVRIFSDGRDPKSKASLAVARREARAMRRRRDRYLKRRASLMKVLAASGLMPSDPEQAKALEVLDPYQLRAEGLDQKLPITHLGRALFHLNQRRGFKSNRKTDRGDNEGGKIKDATRRLDIEMAAQNSRTYGEFLHKRRQKAVDPREVPSVRTRLSIAARGGPDSKEESGYDFYPDRRHLEEEFIALWEAQKEYHQDLTAELRDLVFEKIFYQRPLKQPKVGLCLFTAEERLPKAHPLFQRRVLYETVNQLRITEDGNRSRPLTLDERDAVIQALDSKKPAKSLASMNLKFTALGKVLKLQASERFTLEAGARDVIACDAVRAIMLRPDAFGERWSDLDWEQQWQVISSVRDVQTEDEFGELVAWLIQEYKLDRENAQNVANVHLPDGHGRLGLTATRAILEKLEADVCTYSTAVELCGWHHSDSRTGECLDQLPYYGEVLDRHVIPGTYDDNDDEVTRYGRITNPTVHIGLNQLRRLVNKIIEVYGKPSQIVVELARELTQSDAQKQDTIKGIRKATDEAIRRGQQLEELRQPNTGSNRMLLRLWEDLGPSADARCCPYTGKPISVAMLFDGSCDVDHILPYSRTLDDSFANRTVCLKEANRQKGNKTPWEVWGGTAQWETIEANLKNLPENKRKRFAKDAMERFEEDSDFLERALVDTQYLSRISRTYLDTLYTEGGHVWAVNGRMTEMLRRHWGLNGLLSDKDRDAVKAKNRTDHRHHAIDAAVIAATDRSLIKKISDAARRGADAGQSAELITKRTPPPWETFRLDIATKLNDIIVSHRPDHGRIDPEARKIGKDTTAGQLHNDTAYGVIDDNTVASRTPLMSLKPSDIEISSTGKNIRDPKLQHALQMATNGKEGKEFENALADFASKDGPYKGIRRVRLVETLQKSARVEIGAAENGKPLKAYKGDSNHCYELWKMPDGEVQHSVITTFDAHQGREHRHPAAKRIARFHKGDTVRVDRSKFGAITATVAKFSSKGNIELVPHNEANASDRYRTNKEDLYIRLSAKTGIKAGLRRVLVDEIGRVRDPGPPKL

SEQ ID NO: 10416 - protein, 1141 aa, unidentified
  REGION 1..1141: note = Description of Unknown: Cas Enzyme sequence
MPNLLGLSIDVNSIGWTLLEAKTMKIKAMGTRIFPAGSDNYGSGSREVSKQVQRAQFRVKRMRYARKRRRKNFLIKLLVQNEMCPLDKGLIERGAFHSWFDHEPFQNWMRLDPYPLREKAVHEKISLQELGRILYHISNKRGFPLKNREAHSDTNALLTGIPKFNRTGINETKKQMKDKTLGEYLNSLLPEENVSYRHNDRRIRNRFVSRKMYVEEIHLIWDKQASFHPRLHSMELRSKLIGLKDNASETKGAVFYQKPLRSQKHKVGKCIFEPNKSRCCISNLVYQDILAYKWINTLKNNGEVLSSAERQKIYRFFMTHPKFGIQQVKELLGTENLQYNRKTKTMVYGSFLNAKLSSSQIFGPAWFDLSMDQKKEIWHALYFYDNSDKLEVYMQKKWGLGKEESQNISQLVLDTRYAPISEKAAKNILFFLKRGVAYELAVVLGGVKNSLKNVWDNIEENDIQYIITRVVELYKKFERGGFIPKLQEFLLEEMQFSEFQIKKLYGLQAQTLDFSLLKKFPFGAKHDKEINNFKNPLLRNALFQTRKVVNSLIEKYGAMDEIKSELNTNLKTNKFQRYIYRLDQRREVRNQLRFTNKIGAHSENVTPLNLLKMELWEECKGICPYTGEPIPLEILFTEKITVVYIHPWSVSLNDSKQNKTLCYTHFSEQILNRTPFDYYNNVSPVEWQQVVERANGLFSNTLDYPSNQKKFRKFVKRYYQRDYLKNQLDDTHFVSREVACFLSKVCFKVGVASNYTTDHLIRAFSLDHIVEGSVEKLKNVDHRIPALKSYAVAVRNMKFLYELSHRNKYSYTTDSESFPIPHGDFRDEVEYFINSILVSHQKRDRLYGTRKIFFKKGDKTLIQKSYSPRGALHKESVYGKRTPPALSTAFHIRKPLEKISTLNQIDKIVDPIVRSEVLKVFKASGQSENRFINSSKVFFDIMDDGQKATKVFLPNKNGDPVPVNKVRIRVSLNAAVKLKKDIDQYVNLRNNHHVLVYLNEEKQYEEEVVSFWEAIKRKKSGADLYRPPKENCEMITALHINDLYLMGIDDLDEFLEKESRSFLSQHLYRVQKLSSKFYEFRLAFNNRLESTEFPSYIRINNFGIRKTGWLSYNPIKVNLDPIGGISLAKEFKTLTSNKISL

SEQ ID NO: 10417 - protein, 1138 aa, unidentified
  REGION 1..1138: note = Description of Unknown: Cas Enzyme sequence
MPNLLGLSLNANSIGWALLHSNTKQIKAMGSHVFPVGSVNFGSGRNELSKESFKRSKRVARVSIARKRKRKIKLLQLLIQHNMCPLSLMALKKWQQTKKFPEEELREWFRMNPYALRKKGLSTPLTLHELGRILYQITGHRGFATKYRHGALLENALQVGIPASERLGILHTKKALANTTLGVYLEGLLPKEGASYKHREERIRNRFLDREMFQKEMHLLWEYQSQFHKTLTDSLKVLLIGTEEGDKKTNGAVFYQRPLKSQKFRVGKCEYEKRKTKCCRSDLTYQEMLAYQWANRIKRNGFYLNVEERHWAAHYFLTHKRFSFKQFKSAFKDQESIYNFKDDEVIKGSFIHSTLSKPDLFGEEWFAFSQVEQETIWHKLHFFDNKDKLYDNLIQQHGLSHEQAQKLSKINLDRSYAPVSKKAATHILYFLKRGLVFNMAVVLGGVKSCLKSRWETIAPKDINHIIKTVLALEKTHKGIAFTEALAHFLKEEMGINEVQLSKLYGVYGVINNTLLQPKFEVGHQADMDIHCLRVPILKTVMFQLRKLLNTLIDTHGSIDEIRATLSIDLKINKHQRYLFGLDEKRRRALRQSYMQELGAMAENVIPLNLTKYELWHECKNTCPYTGKHISLEALFSDRFQVVYIHPWSRSLNDSILNKTLCEAEFAKKINTLTPFEYFQENDPMQWDVVVKRAARLFSNTKDFPASYKKFKRFVKRYNNRKILKHLMDEPNAVSRKVQCYLERVVPKVSVSAGHTDALFIEKWQLKSALAPVAFEDKNNDWRFAALMAYISANRTQEFLEILATQNKYLPQHKRAVLPVPYAHFRDDVEQHLQAILVSHKKENKLISVRKRKFKKGNDIIYNTHLSVRGSLHKESIYGLRQRPQSALSSFHMRKPIDSIKTVKQLDKVVDPVVKSILFKTLLANNRFLGTVIPKNAFTGFDADGKKFYKAFLPNAKGDPVPIKKVRIRENFTGTAQLKNDLNQHVNLRNNHHVLIYKTVDGAYQEKMVTFWEAIQRIRSGESVYQLPADGETFVTTLEINDLFLLGLNVPKESLMEVPKAELSKYLYRVQKLSSFFYEFRLAYDNSLKNMETPTFIRINNFGHRKTGWATYNPIKVKVNLDGQWTFATPTIKQHQNIF

SEQ ID NO: 10418 - protein, 959 aa, unidentified
  REGION 1..959: note = Description of Unknown: Cas Enzyme sequence
MYKKNGVKQILGLYIGTESIGWSLIRKATNPKIMDMGTRIFSSFVHNLGEGDRETSSATFRSLIRNTRKIHSRKVCRKKRPLFFLADSKLCPLSPKELICWQKKYHQRSLDTRMNQWYALDPYYLRNLGLGKKLSQHELGRVLYHFTQRRGKIMNAAQNEGNPKILLQGLPAANRLGISQTQEKLKGKYLGEYLYSILPEKGYPYHYTNERVRNRYLSRRMSVDEVKALLTKQKRYHNFITDSFIDTLIGGASTKGLIYFQRPAQYKKNGHIRTECPFEQRKRRLLKSHPLHEWYVLYCWVDSIRFYGEKLDTKQRETVLKVALQFSSFMFKKVRVALKVEDTLAFNYEDSNRFFLAHTLVQLSRVSSFGTKFLSLSEREQHELWHDLHFYTDKKMLEKRLRKRWGLSGKKAETVSAIKLRKGYGTLSMKATRIILSYLKKGFGVPNAIALAGIRNAVGCQKWRALADDVKKHITYFISNLVDEEVYRNLDAWIDDFRMEFDIELNTKKLYNTTFQGKDGSFLQCTPSEDQELQRKFKPVAQKPLFELRKLINNLIQEYGPIDQINFVFDGAVKASSKQRKQMYLSKKLRTQELPKIHDAVLDAGQNPTHTNLFKYKLWLEWNKTCPYTNAPISLEKLFSDEVCIVYIHPWKRFFNDSDRNKTLCMRHFAPYIKDKTPYEYFSTQSSGVWERVKTRVFAQLTQGSARHVYYQNFKHFAMANYTKDAISQEFNDQHQMALKLKHYLKRISPKVVAAKGNAISSLRRKWGIGAVFSHTNKQRYLSAKEPAINALVAAINESKFLEELKDWNRYEPTIRNVFFPMPWSHFKQDALSAITTTSVSYAVNNKAVRKMLIKNAGKHTLSPKGKLHKDSFYGLRKTAQGESFHIKKKINTLTTAKQVSKIVDDGVRELVYDQIDLCGGFINGKIPKNALSTPTDKGWETNVFLPNNRGDKVPVPQC

SEQ ID NO: 10419 - protein, 1033 aa, unidentified
  REGION 1..1033: note = Description of Unknown: Cas Enzyme sequence
MAKTRLGLDLGTNSIGWCLLNLDEAGNAASIKRTGVRIFSDGRHRKGLASLKADRRQARSTRRRRDRFLQRQKHLVNVLVNSGLMPADESERQALATLDPWKIRKTALHEKVPPCHMGRAIFHINQRRGFRSNRKSADGESGVVRKSIEQLKARLTETGAQTFGEFLANRHEAGDTVRARRFGKKSDDLYDLYPDRGMLKDEFEKLWSAQSKSNPSLYTPELGQKISDIVFFQRPLKPQQVGRCSFIPTEKRAPRALPSFQRFRIYQDLSNLRWIDRDGVDHPVTGNRRLRDRLYDELENKKKLTFKAMRAILRKEDVVDYPVGFNLESEIRDHLIGNLVSCAMRSLIGPKWDESDEATQDGLVLLLEDDERSDEQVTAILTGAYGLDAAEAEKCLDAKLPDGHSSLSKAAIDQILPVLRDQGLVYSDAVKEAGFTDTSLHDSDADRLEYYGRALQGHVIGGSGEPDDGDEKRYGTITNPTVHIALNQVRAVVNEIIRLHGKPDEIVIEIGRDLPLGADGRNKIMSQQQKGRDRNEKVAAELARLGLPNSRENRQKFILWEQLAKDPTDRCCPFTGRMISLSDLFSDRIEIEHLLPFSVTLDDSMANKTVCLREANRFKGNRSPFEAFGDSPDGYDWPGILERSRQLPHSKRWRFLPGAIGKHDAEGGFLDRQLNDSRYISRYTTEYLSTIIPRNKIWVATGRLTSLLRTFWGLNSVLRGHNEDADQPAKKSRDDHRHHAVDAIVVAMTSRGMLARVSKAARRAEELDLSRLFEDRIDPWPDFRDEVKRHIDGIIVSHRARKKLQGQLHDDMAYGLVEHIEDGPSTVVRRVFVESFKERSDLEKIRDRLIRSCLLQAAEGLSGKEFQTAVRGWCGDRGIRSLRILETWSVIPIQDADGKNYKAYKGNSNAYMEIIADPATGKWRGEVVSRFDANQPHHISGLRKAFPAQPLVMRLRIDDMLALDLGDDRPIFRVKELTAGNVVLAPHNEANVDARNRLKEDPFKVTNKSPGALQKANARKVHVSPTGLVREAR

SEQ ID NO: 10420 - protein, 1320 aa, unidentified
  REGION 1..1320: note = Description of Unknown: Cas Enzyme sequence
MKKILGLDLGTNSIGWALIENDFEEKEGKILANGSRIIPMTQDVLDKFGSGQSHSQTAERTGYRGVRRLNQRHLLRRERLHRVLNILGFLPEHYANAIDFEKNFGQFKKGEEVKLNYNKVLGEGKEKPEYHFLFKDSFLEMVEEFKAVHPELFYKKTNGEEIKIPYDWTIYYLRKKALEEKISKEELAWLLINFNQKRGYYQLRGEEEEDQSKSFEVLKVKEVIDSGEQVKGNILYDIVFENGWFYDKQITKPEEWIGKEKEFIVTSKLNKDGSIKRTYKKVDSEKDWIAIKKKTEQDINQSNKTIGCFIYDSLLNNPTQKLNGKLVKTIERKFYKEELKAIINKQIDLYTELKDRDLYQACINELYPKNEAHRNNIAEKNFEYLFVEDILFYQRPLKSKKSTISTCQYEYRTYRKKDEETKDEKWVKEPLKCISKSNPIFIEFRLWQFLRNLKIYEQVGKKDVDLTPHCLPDENAWCDLFDFLNDKKEVDQKSVIDYFIKNKRLEKIKKDVYCWNYVSDKKYPMNELRAQIISRLKKINIDSNFLNKEREIHLWHIIYSVKDKGEFEQALRKYAIRYEIDADGFVDNFKKFPPFASDYGSYSEKAIKKLLPLMRVGKYWDESEIEEKVKQRISDIMARIETIKPDTLPEKENKRRIELDLRIENSADDDIPARLIKSFLPFYKQNPLSGLNTYQACYSVYGRHSETGDLQKWNTPGDIDSYLDAFKQHSLRNPIVEQVVTETLRTVRDIWQYHGQSEEKFFDEIHVELGREMKNSADKRKKVSEKNTENENTNERIKLLLQELKDEYQAVDIRPYSPSHQEILKIYEEGVFLNPEVKYKDIKEDEVLKIRKNSSPTKSEIIRYKLWLEQKYISPYTGQPIPLSGLFSSDYQIEHIIPQSRYFDDSLSNKVICESAVNAEKSNKTAYEFMKNPGKSIIDLGNGNSVRLLSFDAFEDHCSLYFKKNRTKLKNLLSEDIPDGFINRQMNDSRYISKFIKGLLSNIVREEGEQEATSKNLLPISGAVTSKLKQDWGLNEKWNEIIAPRFQRLNELTNSNDFGYWDYQKDENGKPVGKQFFRLQVPKEAGKLNKKRIDHRHHSLDAIVIASCTREHQNYLNSLNSERENHGLKERLLIKNKQGDFTKHFQLPWKTYHVEVKNCLETTVVSFKQNLRVINKTNNKTWQWCEEDGKLKKKLVKQEKGDNWAIRKALHKETVSGSVEIKREKKGLSNLTSYLQTPELIVDTKIRKKVKSLRSLFDNDIKQIRKYLKDNPITIEGKEVGKIKVYEWTKNATATRTSLTEKFTRKQLDAVTDSGIRTIL

SEQ ID NO: 10421 - protein, 1191 aa, unidentified
  REGION 1..1191: note = Description of Unknown: Cas Enzyme sequence
MKKVLGLDLGTNSIGWALVNEAEKEGEQSSIIKLGVRVNPLSVDEKINFEKGRPLSINADRTSKRSARRNLQRFKLRRKNLIEILLKHGIINKDTILTEIGKETTHQTLKLRSKSAKEKIALEEFARVLLAINKKRGYKSSRKVKSEDDGISIDGMAIAKELYEKQLTPGQYVLLKLQKNNKYIPDFYRSDLQVEFDRIWEFQKQFYPNILTDDFYTKLKGQGQQNSRKLFLAIHQIYTAENKGKRDVVKFQHYKWRSEAVHKQLAIEEVAYVLVEINNNINKSSGYLGAISDRSKELYFDNKTVGEYLYRKVLENKHAPLKNQVFYRQDYLDEFETIWETQSKFHKELTEELKTEIRDVVIFYQRRLKSQKHLISECQFEKQHKVIPKSSPLFQEFKIWQNLNHLAFENTQTKEEVAFVELDDETRQLVFDELNVKGKLNITEIKKRIGFKTPKYWKANFEDIEGNLTNEALFNVYKTIAEDLGYGFDWSKKTALEIRIELKVIFKDAGINNSILNFDTDIDGNAFDKQESYQLWHLLYATEDTEKSSEEDKLIYGNFYTRLKKNVHQKFGFEPKYGSLLTNVSFQQDYGNLSAKAIKKILPYLKSGNSFSQACKLAGYNHSNSFTKEETESRDLKDKLILLPKNSLRNPVVEKILNQMVNLINQVIEEYGKPDEVRIELARELKKSAKQRDELTKHINEATLKNQNIRKILQKDFGIKNPTRNDVVRYKLYEELKDNGYKTLFTNQYIRREQLFSGEIDIEHIIPKAILFDDSFSNKTLAYKKVNLAKADTTALDFIADKYTDDLGNYKARVEALYKNGNIKKGKYKKLLMSRKDLPEDFIERDLRNSQYIAKKASQMLYEVFRIVTPTSGKITSKLREDWNLVNVMKELNLPKYRALGLTGLQERKNNKKVEQIIDWTKRNDHRHHAMDALAVAFTTKNHIQYLNNLNVVHGLQGTETDHTKSDLYGIKNKITKVYTNGNSKKRKFIPPTPNFRSEAKKHIENILISFKNKNKVVTKNKNRIKTGKKGIIHEKVQLTPRGQLHKETIYGHVKKEVITKEKVSSKFTAEKIQKVTKPSYREALLQRLKTFDNNPKKAFAGKNSLQKNPLYIDIASGKKVPETVKIKSFQDVYVIRKEVNPDNFKNAKSLEKVLDHGIRRILKDRLEAFDGNAKEAFSNKEKNPIWRDET

SEQ ID NO: 10422 - protein, 1236 aa, unidentified
  REGION 1..1236: note = Description of Unknown: Cas Enzyme sequence
MKKILGLDLGTNSIGWALIKEENNENSILGLGSRIIPLNPDERDEFSAGNEISKNRKRTMRRTQRKGYDRYQLRRKALTELLIEKDLFPGRGLLALDQLPLWGLRAKAVTEKVELKELGRVLYHLNQKRGYKSSRREENLDKKDTEYVAEVKSRHLELKEMGATIGQKFYPELEANPNYRIKQQVYPREAYIEEFDAILKQQQKHYPDIITDEFINTLRNEIIYYQRKLKSQKGLVSVCDFEGFWTNDKEGREVFVGPKVAPRSSPLFQISKIWESINTLKLKNKKGEEYSFSMEEKKKIFEHLDNNEKLTAKDLFGILGIDKNDGWYYDKQLLKGIQGNLTKTQFAKILEINNPWLNFDLQVEKKAGEAYLVSKSTGEISDATEKKEISPELEYEPLYKLWHVIYSISDFEECKKVLQEKFLFDELTAEKLARIDFTKSGFGNKSAKAIRKILPYLMDGWVYSDACSFAGYNHSGSLTKDENLKRKLLDSIPLLPKNSLRQPVVEKILNQMINLVNAVTETYGRPDEIRVELARELKQSQEERNDTFKFLRKRERENDQIRNRLIDEYGIRATRNNVIKFRLFHEINGEESKLNAGCVYCGKPFGISDALRGDNVDVEHIIPKSLLFDDSQSNKTLSHRACNEAKGNKTAFDFMQQKGSTNLEAYIERVDKLFNNGLIGKAKRDKLLMPASKIPDDFIERQIRETQYISRKAREILQQVCFNVWSTSGSVTDYLRRLWGWDDILMNLQLPRHKEQELTEWVEWETGNGQLHKKEVIKGWTKRNDHRHHAIDALVVACTKQGFIQRINNLSSQGNRDEMYRELKENGENQRNGLSLLEKYLIAKKPFNTNVVQQKTAEILISFKAGKKVATYGKRKIKKGGKTQVVQTGIVVPRGPLSEESVYGRIMTLQRDPKTNKVIYQPLKYLFANPQLIFKPRIKELIEERLAQFDGNVKNALDSVKKEPIYLDRENEVLLENASCYSEEFVIKYPVEGLKPNDVPYIIDGRIRQLVKERLDDHGGNPKEAFKEPLWYDKEKSIKINSIRLLTGLSSVEPVKWDDKGQPIGFVKPGNNHHIAIYRDITGQLIEHVCTFWHAVERKKFGLPVIIKNPEVVWSKILSKEEPLPESFLGKLPTDGLKFEVSLQQNEMFIIGMQPEEINSALLNNEKEKVSKNLFRVQKLGSFYYVFRHHLETQIDDSAKAMEAKKFYRIRSFKAWENANPFKVFLNYLGEIKPSY

SEQ ID NO: 10423 - protein, 1171 aa, unidentified
  REGION 1..1171: note = Description of Unknown: Cas Enzyme sequence
MAKILGLDLGTNSIGWAVVEKEDGEYSLLDKGVRIFQEGVKIEKGIESSKAAERTEHRSARRLKYRRKLRKIETLKVLSEYGYCPQLTKEELALWRYKKVYPQNISFHNWWLTDEDSEKHPYFFRNLAITQKLDLNNEANKQKLGRAFYHMAQRRGFLSNRLDSTPENETGKVKSSIKALQEKKGDRTLGQYFYEDCYFKGEKIRNHYTSREEDYLDEFHRICAFQNISEELQRKLHRAIFYQRPLKSQKGFVGKCVFEPTKPRCAVSRPEFEEYRMLCFINNIKIKTPDDEKLRPLNAQERCKIVPRFFLQREHFDFEDLAKQLAPKMQYKYYKDRKKNPEDYLLNYSMKTTVSGCTVSARFKDLFEADFIDDDFNYFKDGNNRTPKLISDAWHALFTFDSEKKLKEFAQKHFNFSEDKTILFSEKIRLKQDFASLSLKAINKILPYLREGLIYSHAVFLANMEETLPVHVWKNEENRKIIRTAIKEIIENHSDNVTIVNMVNGFITNARRENVVWSEEAKHLYFDELDRRIKTAFGTKRFESFSEYKKNNLINKAQQLITEFMPKNLGKGEHIKVERLDEAVLSFLADNFGEENLNAKKLYHPSAIETYKPAKRGKDGRLYLGSPITSSVRNPMAMRALHQLRMVINELIKNGIIDVYTKVNIEMSRGLLNANERTGLKRWQDAREKKRKEYIDRIKEHFSPDYQPSEGEVLKYQLWEEQKRICLYTGYPINIEDFLGSYPKFDIEHTIPRSQSYDNSQENKTLCENEFNRKIKKNKIPYELSNHAEILVRVEHWKEEIENLEKEIEKVVRQSKGAGDKEQKDKAIQKRHQLTYERNYWQNKYKRFTLEEVPEGFKNRQMVDIGIITKYSRLYMKTVFPRVYTVKGNTVADFRKMWGLQDNYTKKARVNHVHHCIDAITIACMDKSNYETLAKFYHDSENAFERGHEVKPKVKKPWTTFTEDIKEIEKEILVSHHTPGVLSKQSKKKLRKRGKIQYNKNGYPVYLKGDSVRGSLHKDTFYGAIKREVLNKKGEADKQIKYVVRKSLNGLEDAAIKNIVDDRVREIVIHARKQEKELQKQIENLLKQRSNAEENEEAEIDANIAELKQQITALYCLPNKSGSPVPIKKVKVYQPMVTNPLSGFKKHRDLSDKEYKAVQCSKRWELCDGCL

SEQ ID NO: 10424 - protein, 951 aa, unidentified
  REGION 1..951: note = Description of Unknown: Cas Enzyme sequence
LGTTSIGWAYVHEAESETEKSIIKRLGVRVIPLTVDEESNFQKGKSITTNADRTLKRGMRRNLDRYQLRRKNLLDLIRQRGIVNNETILTETGKNSTFETLRLRARAAIERIELDEFARVLLMINKKRGYKSSRKAKDSDEGSLIDGMSVARQLYENNMTPGQFVFNLLRDGGKYIPDFYRSDLAAEFQKVWDFQKVFYLDIMTDDLKKELAGKNKTQSWSVCKDPFDLVGIKQNGKSHEKRLERYKWRSEALSKKLEPEILAIVIQDINGELSKSSGYLGDISDRSKELYFNNETVGQYLYKQVSANPHARLKNQVFYRQDYMDEFERIWETQRAFHPVLTAELKSEIRDVVIFYQRRLKSQKHLISECEFEKHHKVIPKSSPLFQEFKIRQIINNLELTEIGRRRKFVLNKEEKEVLFKDLNLRTSIKSDNALKLLGYDPKLFEMNYDELDGNRTFSALYSAYERILEIEGYEMKFSSMTDTDVNEAVKSVFRQTGIDEGILQFDSGLDGSDMFEQPIYQLWHLLYSFEDDNTKLHSKLEEKFGFKLEHAKILSNISLQQDHGNLSSRAIRKIMPFLKEGETYDKACEMAGYNHSSSMTAEERDNRDLKSSMEILPKNSLRNPVVEKILNQMVNLVNALIDDPELGKPDEVRVEMARELKKSAGEREEMTRNINSTKADHQRISEILQQEFGIKKVTRNDIIRYKLYRELEMNGFKTIYTNTYVPREKLFSKEFDIEHIIPQARLFDDSFSNKTLAVRQVNLDKGDETAYDFLKEFLSPDDFGQYLLRVEELYRKGKIGRAKYNKLLMKGIDIPDDFIERDLRNSQYIAKKAKMMLEEVCREVTTTTGSVTNRLRSDWQLVDVMKELNMPKYRQLGLTETIEGKDGREEERIMDWSKRNDHRHHAMDALTVAFTKRAQVPGITIMSLFTGMKKENFRRKLYPSSKLCTG

SEQ ID NO: 10425 - protein, 1262 aa, unidentified
  REGION 1..1262: note = Description of Unknown: Cas Enzyme sequence
MKKILGLDLGTTSIGWAIINEAESDKEKNEILGMGCRIVPLSPDDKSEFESGNAISKNQKRTQRRTQRKGYNRYQQRRAALTKELIKMGMMPDEDLFKLTPLELWGLRAKAVYEQISLKELGRILYHLNQKRGYKSSRKDENLDKKDTDYVTEVKGRQYKINELGLTIGQYFYSKLQYDERYRIKDQVFPREAYIDEFDKIWHGQKNFYPEILTDDAIQKIRNEIIYYQRSLKSCKHLISICEFEGKNYKNQEGKWVFNGPKVAPKSSPIFQLGRIWETINNLSIKSKYGLTIYATNPHKKKLRQDDKIMSQEERLKIFEWLDNNEKLTFSELIKILKLKKDDGWFGNKQISKGIPGNSTKRAIIKSLDGYEKLNELIRFNIEIEELEEIDKTSGEILLRKQLSPKCEYEPLYQLWHCIYSIHDKASLISILKNKFQIPDKYCESISKIDFTKMAFGNKSAKATRKISPYLMSGSVYSDACFHAGYSHSDSLTKEENKARELLDKLPILQKNSLRQPIVEKILNHMINVVNAIIGEYGKPDEIRIELARELKQSKEERNDAYRNINKRERENNTIKERLSEYNLPQNRRHIEKWRLFHEISNDESKLNSICLYCGQPFGITQALKGHEVDIEHILPQSRIFDDSFQNKTLVHRKCNANKGNMTAFDFMKMKSKVEFENYIERVNKLYESKLITKAKRDKLLMPVDEIPQDFIDRQLRQTQYISRKSREILSLVCHNIFATSGSVTEKLRHLWGWDMILHDLNFEKYKSVGLTEFKIIHDESGNEKKIEVIKDWTKRDDHRHHAIDALTIACTKQGYIQRINRLNSDENRDEMYQAIKESRKFDLDEKISDKIKTLEEQARGRSGLLDEYFKTRIPFSYENVKIVTSGILISFKAGKKVASKGIRKIHKGGKSIIVQKEGILIPRGALSEESVYGKIKTIEKNKPVKYLFENPHLIFKPHIKQLIEQRLQKFENDQKKALASLKKEPIYLDDQKQIELKTGTCFSEEFVIKYPLSTIKKKDIDSVIDEKVRDILLQRIEQLGEKEAFKDIENNPVYFNREKNIKIRTVRFLTGLDSQKIAPVRFNDKSEPIGFVKPGNNHHIAIYKDSDGNLQEHICTFWHAVQRKMDNISVIIENPKNVWSRIIETKQDYPESFIDKLPNDDWEFIMSMQQNEMFVFGLNKDELINLIQSNNKKIISDNLYLCQKLNRITDGGWYFIHHIETRRNLKTVEDINAKRLIRITSLKKFNPIKVRITNLGKIEIK

SEQ ID NO: 10426 - protein, 952 aa, unidentified
  REGION 1..952: note = Description of Unknown: Cas Enzyme sequence
LLNYLIKLNLLPVELSRHLQPEGILNSLGDPYALRAKALDHDLDPHELGRVLLHFVQRRGFLSNKKTLLGRDMLDDPDVIALLGDDDVDEKNTAEETAFMADISLLRHDISSGGFRTLGEYLASKPTHECKRNRHGEHIRTDRQMYMDEVALIFARQSKCHPLLTKDVQAEIEHIIFFQRPLKLKTDRIGKCSLETKKKRSAIARLEYQRFRYLQDINNLSYFCLQTEQWIKVNSEDKAKLAVLFEQSDHLTFAAIRKALGLQRGTELNLDTGVKHLKGNTTASAIRKALPSWDSLSKDDQLLLVEDLLSIKKKSALKQRLMSYWSLSGQDALILCLIELEPDYGSVSLKAINKLLPHLESGMIYSDARIAAGYDYQVEEIIASNKLGIPPELPNPIVRKGLFELRRVVNALIAEYGKPDIIRIEMARDLEMNTKKYKNFIAQQTKNTKMNDRATEAFRDAQTGINTSRYPSRDQKIKYRLWLDQNHCCAYSGKTINLATLFSAEIEIDHILPYSRSLNDSYMNKVVCFARENQVKGQRTPKDAFGGNEEKWNQITQMLNKLPRDLASKRDAFYKEDSDLLKSDFVGSQLTDTRYMSKVAGEYLKSIGSEITFTRGVMTSWLRRMWELNSLVGTTTEKERTDHRHHAIDAAVTACIDRPLYKSLVDISRDLERNKSGLTMGDVYIDPPFADFKKRVADKLDSMIVSHVPIRKITGPLHEETGVGFVNNFGTVYRKRLDQSFDLNASEKIIDPVVMKLVQNHLEKHNGSGRDAFGEGFILHHADKSTPIKRVRVLQSKTTKEDLEENKFGIQDKSGKTFKWHAYGNLHHVEILQSKTTQKYKSVFVTAAEAASRARGVKRAKESIITYDHGEDLNLIMVLHKNDLVTAAIGGNVKSYRVQKLERDSNGLTLRLHTAATVKNTNECIRKSISVLIKDHDLKPLRINSIGKKIDD

SEQ ID NO: 10427 - protein, 1397 aa, unidentified
  REGION 1..1397: note = Description of Unknown: Cas Enzyme sequence
MKRILGLDLGTTSIGWALIEEAEKRENSKIIKLGVRVNPLTVDEKINFEGGKPISTNADRTLKRGARRNLDRFQLRRDNLIEILKEHNFINDDTALTEIGKNTTYETLFIRAKAAREKITLEDLSKVLLAINKKRGYKSSRKTKEESDGVAVDGMAVAKILYEYELTPGEYTFSLLKNKKKHIPDFYPSDLKAEFLAIWENQKNYYPELLTQALFLELKDKKSGQTWTICSKPFEIEGKYLKGSNDEQRLLKYQFRNDGLKEQLDLEQLAIALQEINNDIDGTSGYLGKISDRSKILITDKITVGEFMYDQIKKDPHTSLKNQVFYRQDYLDEFELIWNTQAAFHKQLSDELKSEIRDVVIFYQRPLKSQKGLLSHCIFESWEQEYYDQIKEKTRKRTVGHRVIPKSSPLFQQFKIWQNINDLEFKYIGKNIDELKKEDLIIDKKLVTLKIDQEDRELLFNEANSKANSKGKISTTEVLKLLGLSSKDWKCNFEEGINANTTNQKLLDVYQTIANREGYGHDWSKKTGSEIWEELQVVFNDIGIDNGILGFDPLIEGNEYSSQKSLELWHLLYAAGDGGKVQEEDQLIYGNQDVALRKKLHLKYGFKPEYAKMLSNISFPNDYGSLSSRAIRKIMPYLIEGHDYYEACDLAGYNHSNSLNKEENDNRELADHLDLISKNSLRNPVVEKILNQVVNLVNQVIDTYGKPDEIRIELARELKKSTEERKKMTQYINTATKLNLDIAKTIQKDFGFTPTKSDVVKYKLWEELSTRGYKSLFSDTYIAKEDLFSKKIDIEHIIPKALVYDDSFSNKTLAYREVNLKKANRTAMDFISQDKSKDIEVYKERVEALYDKGKGAITKAKRDKLLKAAGDINEGFIERDLRNSQYIAKKSRTLLEKVCKTVTPTTGMITDKLREEWGIINVLKELNLDKYKALGLVEVEQRKHGKEVEKIKDWTKRNDHRHHAMDALAVAFTTVSHIQYINNLNARRNTLHEKHKLILGIENKITEMVLNKNGKNKRVYIKPFPNFRSHAKKNLEEILISFKAKNKVVTKNINKTKKEGGYNRTKSLTPRGQLHKETIYGKSLTPEVKTTKLNKRFAFAKAEHVIDQKQKIIVLEYLKKYKDDPELAFDGKTLKKDPLLWHDKPLTEVLCYKEIYTIRKDVSPDLKIDKVIDNGTKEILRKRLSEYGNNAKEAFSNLENNPIWQNKERGIAIKKVTITGVANAVPLHTAKDHLGTDLIDENNNKIPVDYVSLGNNHHVAIYKDPKDKLQEKVVSLYEAVTRSNQDLPIIDKTYNQELGWEFLFTMKQNEMFVFPSEEFDPKEIDLMDEKNRKLISPHLFRVQKIANKNYMFRHHLESTINHDLDFTYKHLRSLGLMEELVKVRFNHIGQIVHVGEY

SEQ ID NO: 10428 - protein, 1017 aa, unidentified
  REGION 1..1017: note = Description of Unknown: Cas Enzyme sequence
MAQRMRYRLALDLGSTSLGWAMIRLNAENEPCAVIKAGVRIFSDGRNPKDGSSLAVTRREARAMRRRRDRLLKRKARMMNTLIAHGFFPQDAAERKALETLNPYTLRAKGLDTALTPAEFGRALFHINQRRGFKSNRKTDKKDNDSGALKTAINKLRQTLLDTGCRTVGEWLHKRDAAGDTVRARYRQEKVVKEDGKTRIDKSYDLYIDRAMIEAEFDVLWAAQAAMNPALFTPTARDELKDALLFQRPLKPVLPGRCTLLPDEVRAPLALPSTQRFRIYQELANLRILGEGLKEQALTLEQRDKLARALETGHKSFKTAIPKLLNLSGLVKFNLADAKRLELKGNVTCAILSKKDLFGDAWWTFDEAKQDAIVLQLIKEENEARLVRWLQDETGIDEARADKLANVALPEGYGSLSATALARILPELRREVTTYDKAVIAAGFDHHSNISASSTGEILPELPYYGEALQRHVGFGSGNLKDTPEKRFGRIANPTVHIGLNQVRLVVNALIKRYGHPSQVIVEVARDLKRSKDQRDEDSKRQAENQNRNRRHRKLVAEVLTLSEERVRVADLQKMVLWEELSFDPAERRCPYSGVQISAAMLLSDEVEIEHILPFSKTLDDSLNNKTVSMRHANRYKGNDTPWDAFCRQQVQGFEYAAILQRAELMPRAKRARFAEDGLERWLKDDKGFLARALNDTKYLSKVAREYLSLICPQDTRVIPGQMTAMLRGKFGLNDVLGINGEKNRNDHRHHAVDACVIGVTDQGLLQRFAKASADAREKQLNRLVETMPDPWPSYRVHVQRAVSHIWVSHKPDHGHEGAMHNDTAYALLGNGKVGVHKQVEGKRTYIEDNLKVIEFANAKATERHGLLQDGSPRPYKGYKGDSNYCIEIVRNEKGKWEGEVISTFEAYQLERQRGLAQLRHPTMSMSGKPLINRLIIDDFVRLNIEGSLQTMRVASINSAGRLTLASHQEANVDARNRDLGGDWRYTYKQAGSLLSAKARRITISPIGELSDPGFKE

SEQ ID NO: 10429 - protein, 1477 aa, unidentified
  REGION 1..1477: note = Description of Unknown: Cas Enzyme sequence
MKKILGLDLGTNSIGWALIQKDPENNHGEIKGMGSRIIPMSQDVLGKFDSGVSISQTAVRTAYRATRRLYQRDNLRRERLHRVLNILGFLPKHYQDSIDFEKRLGQFKKGLEVKLNYLPKDKAKHEFIFMDSFNEMVSEFQEAGVSNQLPYDWTLYYLRKKALKAKVNKEELAWLILNFNQKRGYYQIRGEEGDETKDQKKEYVVLDVDKLIESSDNVKSGNDMLYEVHFTNGWIYDKLIAKRENWVGKSKEFIVSTNKKRSGEIKRTFKAVNSEEDWLAIKSKTEQNIARSKKTVGEYIYESLKNNPRQKVRGKLIKTIERKFYKEEFSTILKKQIEFHPELRDKDMYQACVKHLYGKNLAHQENIKNRGFEHLILEDIVFYQRPLKSKKSTIGGCQYEYRTFLKRNEATKESTWVKKPLKGIAKSHPKFQEFRIWQFLHNLRVYEKDRMVDGSIVLDYDITEELLKSADDWTDLFDFFNARKDIEQQQLLKYFSDKGLMPKQLKADSNYRWNYVEDKKYPCNETGAMLTSRLRRVEGVNPTELLTETVLMQLWHIIYSVTDKIEFEKALKTFAESHEIDVNSFCENFNGIPPFQPKYGSYSEKAIKKLLPLMRIGKYHDETVIAQKVKSRIANIMERLNDIYFNLKQIDSVTDDDIPKRLLKSFLGFEGKSALSGLNTYQACYAVYNRHAEVAEINRWRTPEDIERYLESFRQHSLKNPIVEQVVTETLRVVRDIWKVHGKSEPGFFSSIHLELGREMKNSAEKRKKMTLRSIENENTNYRIKALLSELKSDSSIYGDIRPHSPSHQEILKLYEEGVTQNPSVNYQDISELEINKIRKNTSPRKAEIVKYKLWLEQGYLSPYTGRVIPLSKLFTSDYEIEHIIPQSRYFDDSLGNKVICESEINALKNNQTAFEFIAKHGTEKVSLGEGKSVTVLSLKDYESNCNQYFKKNRFKLKNLLSEEIPEGFISRQLNDSRYISKLIKGLLSNLVRVENETEVTAKNLISVTGAITSKLKQDWGLNDKWNELIAPRFKRMNLLTNSNEYGYKDRQQINGNSAGREFFRIQVPEEISRGFNKKRIDHRHHALDALVIACTTRQHIQYLNALNSERENKRIRESLLIQNEHGHFTKNFLTPWVNFSSDAKLALETVIISFKQNKRIINKANNRTKQWRLDNGVWKKVAVKQTQGDNWAIRKALHKETVSGKIQLDAPRGKIATASRVAISEIKNEKHLAKITDAGIQLIFRNHLANYAAFGAKKFEEAFSPAGIDKLNENIVSLNNGNKHQPILKVRMFEIGVKFAVGRNGNKPSKYVEAAKGTNLFFSIYQNEVSGKRSFSTIPLNEVIEHQKQVAHLAKNERYQVPIDNTQGQFLFSISPNDLVYVPNEEEQENPGSVDLNNLSKSQVSRVYKMVSCTGRECHFLPALIASLVKSYDAKSGVGEFGSLNKSELSFENVRIKESCWKLEVDRLGRVINFKR

SEQ ID NO: 10430 - protein, 1372 aa, unidentified
  REGION 1..1372: note = Description of Unknown: Cas Enzyme sequence
MKKILGLDLGTTSIGWAFVHEAENEQEKSTIINTGVRVVPLSTDEKINFNKLNAVTAAADRTASRGARRNLQRYKLRRQELLSILQGHGFISKNDILSENFENSTYFTWKIRAHAASDPISKKELAMVFLAINKKRGYKSSRKANNQEEGQLIDGIGIAKKLIEENLTPGQFNHKLKTEGSRYLPDYYKSDLHKEFEKIWKTQSIYYPEILTDTHLKELDGRTNKATAYYFEKVMLIERAENKGKEKKLQEYEWRSDAVKQQIPLEQIAYILTELNNDINKSSGYLSAISDRSKTLQFNNLTVGQHQYAKLFGMPLASQKNQVFYRQDYLDEFNTIWELQSKHHPELTDDLKVEIRDVIIFYQRRLKSQKGLISICELESRKRTTTVDGKTITKLTGPRVAPKSSPLFQSFRIWSNINNIVVTSKADKKQIYQLDEETKKALFKELNWRSSMTDNQFLTWLFAGSKEKVSDYEIKYGKIEGNRTNEELLNAYLKITVLEGYDINTKQDKVDVVKDVRSCFKEFGIKDSLFLFKWDLQDTTIIATQDSYELWHLLYSYEDDSSNTGLDSLNNVLIEKYGFATNHTGIMSSVTFEKDHASLSARAMRKILPYLEDGMVYSDAATAAGYNHSRSVTKEENLKRELKDQLEILTKNSLRNPIVEKILNQMINVVNAILAEPSLGRPDEIRIELARELKQTAKQRADATTQIAKATREHEEYREIIKKEFGLPYVSKRDLIKYKLYRELKSNGYKTLYSNTYIKPDELFSKKFDIEHIIPQSIRLDDSFSNKTLELRDINIEKGSQTAIDYCQRKGYEDRFIKTVQTLATVIDGISPRKMLKLFTKIEDVSTDFNERDKNNTGYISRKANEILIDVTRNVYATSGTITSMLRSDWELIDVLKELNWSKYDTLGLTYYETNKDGQKLPKIKDWSKRNDHRHHAMDAITVAFTKPALIQYINNKSAKSKGNIIISNIEEKFTYRAKDGKRRFVKPAPDIREQSKKALASILVSHKAKNKVVTDNINIIKIKGGTIKKKQSTPRGQLHLETVYGASKFYETKLEAINASFDEQKINTVSNKQQREALLSRFRESANDSKKAFTGKNALSKNPLKLSNGEELPLKVQTVALQTRYTIRKPINADNFKDEKTIAKIIDVGSRNIVLKRFLESGKNSKAAFSNLDENPMWLNKEKGIALKRVTITGIQNTESLHIKKDIDGNTILDKNGKELPVDFVNTGNNHHVAIYKDEKGNYQEEIVTFYEAVARKNANLPIVNKIHEKGWKFLFTMKQNEIFLFSNDGFDVNNFDILNPNNAATLSAHLFRVQKIATKNYFFRHHLETELIDEQKLRGFTWENIRSTSPLKELIKVRINHLGKIVQINE

SEQ ID NO: 10431 - protein, 1074 aa, unidentified
  REGION 1..1074: note = Description of Unknown: Cas Enzyme sequence
MRYRIGIDLGTNSLGWAAIELRNDENGALGAGPLIDMGSRIFSDARNPKDKSSNAAQRRGPRGMRRNRDRRLARGCAMLHALVAVGLMPANKDARKALESHDPWILRADALDRGLQPYEIGRALFHLQQRRGFKSNRKTDGDEDGAMYAAIEAAREKMALEGVRTLGELFGKPRRETLEKNMTQPKGKGAPMPQARVKARFEGSKMAYDYYPDRAMILDEFDQIWVSQAAFHPMLLTPEAQEKLRHVIKHQRPLKVQRAGKCTFLSHLERAPKALPTAQYARVLQEVNNLAVGAIGEQQKVLSPEQRETLIDFLMTPSSKTSRRTFKAIRKTLNLPESQVFNLESRKRDHLVGDETAGRLLQDDAWGEGWLDLGHAVQDEIVMRLLETQEQGDLVAWLCETHDLDEARAIAMSKVRLGDKYGRLSSEALARIIPHMERGRRYDESTSAEFKDHRALGDGVIYEDGLPYYGEILERHTAFEKDPPEGGKDTRNDEEKYGRVANPTVHVALNELRKVINDLIRRWGPPEEVVLELARDLPLSDRGLRELETAQRKNQDLNEARRKELLLRNAPDSYENRLKLRLYEEALECFGGTAQCVFSGTTISLTSLFSPDVEIEHVLPLSRTLDDSFSNKVLAMRAANRTKKNQTPYEAFGHDPSGYIWEDIGQRASDLPKSKAWRFAPDAMENWEARGGDFLARQLNDTRYISRLGKSFVEALYGGQGIKGEKRRVWVVPGRLTSDLRHYAGFNTLSGFTDTNQKDRTDHRHHAVDGLVIALTDQAMLKRAADLEKREDKAAHYEIMQAMAEPLKRYRRSAEDRLSKLVVSHKPDHGFQDAMHNETAYGITGERDAKGQMMLVTRKAVEALEPKQIVDIVDPDIRRAFAYATEGLTGATFKQAILAAGENMRPPVRRVRMKTPMKDTSFVTIRHGEAGQHAKAYKGDGNYCYDIFMGTKGKWDGEVVTTFEAYQRAQADKGWWQKLERADGAPLLLRIRKGDMLEIDGDGGKRVICTVAYLTQGKVALSEHYQANVDQRTRGSYKGDAPLKYIFKAPSSLQKSNAVRLSVSPSGRVKRHKA

SEQ ID NO: 10432 - protein, 1758 aa, unidentified
  REGION 1..1758: note = Description of Unknown: Cas Enzyme sequence
MKKILGLDLGTNSIGWALVEIDHESKTVKILGLGSRILTMDAAEIAKFESGSKIESGAAVRTKQRSPRKLNERYLLRRDRLHCVLNLLNSLPEHYKLSIEFENSKGKRSGKFKKGVEEKLAYYKDHNGKFQFLFKDAYHQMENDFRAKYPEMFYQKKNGNQTQIPYDWTLYYLRHRAVTDKEFELTKEQLAWITLSFNQKRGYEKVIGQDEKAQKKGELTDVFVGKVLNITKIENEEAYEITLVDNNNETVELFKYKEETKIQISEIGDLKEVEIVSKYDDEGTIDDMNTEYNINEVREFLITNVRNTTQKRKENFVFEIELETGWIKEQQSKFTPKWKDTRRDFIIKTKYDESGNRILKGADKGRNINIPKEEDWTLMKLKTETSLTSFNTNNNTKGIASFVYYNILQNPKQKIKADLITVIERDYYRDELDIIYKNQEKFHPELKNINLYEQAIQLLYPNNSSHQKKINKLDFNYLIKEDILLYQRDLKSKKSLISDCTYEKENFERKDEKTGRKYKKPLKAIHKGNPLYQEFRLWQFIKRLKIIKKEDIVNEQIKINVDVTSRLITNEFKEELYSFLNDKENVTEKDILSFFNKKYKDLTINSGTYKWNFVSEKEPCNSTRYNFILRTKRIKGFDYRTFLTPENEYILWHFFYSVKKKDEFNKGLSNIIIRLLDKSELPKEYHAELVKNFSSFGGYTTDYGTYSEKAIKKMLPFLRIGKYWNEEDVEAILAKTNHEIKKNILVKEEINGEVKDFQGLWVSSACYLVYDRYSEVGEVQFWQSPYDIENYLKNEFRQHSLNNPTVEKILVETLHVVKDIWKYYGGEIGTDETGKIIYNKLFDRIHIELGREMKKNNKQKEKDDKQNKENRKANERIVELLRELKSTNTSLQEKSPFQQEKLRILEESLLSSIEYDKDNTEYKLSNGKITKREIKEITTKEFSKISRSDFERYKLWLDQRYQSPYTGKFIRLSDLFDRKKYEIEHIFPQERITLNALYNKVICETEINKEKKAFTAYSFISNAKSKEVFCSAHDKKIKVISIGEYEELVRNNFSGKKKEILLSKEIPEEFTNSQLNNSQFISKMAMKLLSNIVREKDEDTFRSKNVLATNGTITTTLKRHWKLNDTWNEIISSRFKRLNELTNSNLFGDYREINGHQIFINTVPEQANKNFDSKRIDHRHHALDALVIALTSENHVQYLNNISSQENNHEEKLDTRKGIKFQLTNSRKGFSSEKEWYFLPPAQTKTKDGIDEFEYQFNGLKSQVFKEIAQKALENTIASFKQKNRVIRQRWNKYLKVGNGKLEVIKQEDLKEIINYNVRKRLHEDTFYGKVKLQNNKNTNKNVITMSFRKALDGGYDLFDTELASKLSYLQNDENKTNKEIIEIFQKLNKSVEVYEKFVATRFGNNLESFAQISSDKIIKTVRSITDTGIQRILENHLNNYKKFIDDKANYDTENAFSFDGVKELNKNIVSLNNGKPHHPIYKVRTFDAIGTKFPVSEQGQKSTKFVVTAAGSNAFCGFYHKELVRKFYIPTLRESVECLKQGSEPCPLTHPEDPDFKLIFVLNPDDLVYVPTEDENNYSNLVDFNNLEKGQISRIYKFTDGSGTTMNFVPANNSGLLFNLSNKEQEKIGLNLPIQNEIGLGSPQSKNQNSLDGIQIKSVCWKLHVDRLGNFSLANQKKLNYRTPKNEPNRVEDPRVVYSGSKKIDILDQVSDLDKSQLNYWADLTPKRRFEDFLELMNRFYNFSKPDWKSKKIIIDL

SEQ ID NO: 10433 - protein, 1394 aa, unidentified
  REGION 1..1394: note = Description of Unknown: Cas Enzyme sequence
MKKRILGLDLGTTSIGWALVEEAENKEENAVIKLGVRVNPLTVDEKINFEGGKPITTNAERTQKRGARRNLDRYQMRRDYLIKVLKVEGLITEQTNLTEIGKDTTHQSLMLRALAARNEVTTEDLGKILLAINKKRGYKSSRKTKNEGDGVAVDGMAVAKILYDQGLTPGEYAHSLLEQKKKYIPDFYPSDLKAEFEKIWINQQKYYPEILTNELYTSLAGKNKGQTWSICAKPFNIQGIKLDGDRTTQKVLRYKIRMNGLTEKLDLEHLAIALQEVNSNIHGTSGYLGKISDRSKVLYIDKLTVGEYAYQQIVKNPHASLKNQVFYRQDYLDEFEQVWETQAIFNSILTPKLKEKIRDIIIFYQRPLKSQKGLLSFCIFESWEQEYFDNLKQRKRKRTIGQRVIPKSSPLFQEFKILQNINDLEFKKIGESNKDDALTKKTFKLDTEERMLLFTEANLRGNLSAATVLKLLGLLSKEWKINFKEGIQGNTTNEKLFNAYQEMASRAGYGIDWQKLTAVEIVEELKAILPTMGIDNTILDFDAGLSGNLYAKQTSYELWHLLYSAGDDSKITEDDKLIYGNVDVNLKRKLHTKYGFAPEYATLLANLNFPIDYGNLSARAIRKILPQLEEGYNYYEACGAVGYNHSSSLTREQNENRVLKEKLDILPKNSLRNPVVEKILNQMVNVVNQICDNYGKPDEIRIELARDLKKSAKERLETTQYINAATKTNLDFAKTIQKQFGFTPTKNDVIKYKLWNELAPRGYKSLFSNEQIKLEDLFSSKIDIEHILPKALIYDDSFSNKTLAYRQVNLKKANRTALDFMTQDYNSELEIYKERVESLYNKGKGSISKGKRERLLKSAKDIGEGFIERDLRNSQYIAKKARTMLLEVFKDVTPTTGRITDKLREDWGIINVLKELNLPKYRALGLVEIEERKNGKTVEQIKDWTKRNDHRHHAMDALAVAFTTNNHIQYLNNLNARRDESNEKHKIIQNIENLITEKIKDEKGFYKRKFVVPMPKFRTEAKKQLESVLVSFKTKNKVVTSNINKTKTKNGYNTSLELTPRGQLHKETVYGKSKTPKAQLSKINKNFTLNDANWIIHGGQRKLILSHLEKYENKPEIAFDAKTLKIDPLLWNEEPLKEVHCFEEVYTIRKNITADLKIEKVLDAGIREILKKRVKEFNGNTKEAFSDLDKNPIWQNMQKDIAIKKVTLTGVRNAVSLHVAKNHLREIILNSVGDEIQTDFVELGNNHHIAIYECPDGTLKESPVSFYEAVIRKTNGEGIIRPLNEDGWLLKFTLKQNEMFLFPNENFNPLEIDLADAVNINLIAANLFRVQSISSKYYIFRHHLETTVATGETFKNQKILKGKTFQFIRSEKLLQGIVKVRINHIGQIIQIGEY

SEQ ID NO: 10434 - protein, 933 aa, unidentified
  REGION 1..933: note = Description of Unknown: Cas Enzyme sequence
LDLKKELTDELAFKSNMSAKDVFTHLPLSEKTHELNFPKVEGNRTNNSIFEAFAKIIEMEDGESIDLSQMRSDDILDQFSEAFLRLGINTDLLKLDEKLEGEEYEKQAYIQFWHLIYSAEENGNLKKSLIKKFGFKESHCKFLLNINLQDDHAGLSSKAIKKILPHLKDGLEYSEACKVAGYNHSSSLTKDQNQERILADKIELLKKNSLRNPVVEKILNQMINVVNAIIDDPKLGKPGEIRVEMARELKANADQRKNMTNNIAAATRDHEKYRKILKEEFGLLRVTRNDLIRYKLWLETDGISLYTGKPIEASKLFSKDYDIEHIIPKSRLFDDSFSNKTLCERQLNIDKSNSTAFSFLEDKFSKEEFEQYQERVKGFYNKISKTKIQKLLMSNDKIPEDFIERQIQETRYISRKAVEVLFDAVRNVTVTTGKVTDKLREDWGLIEVMKELNWDKYNALGLTYIIEGKNGEKLRKIKDWTKRNDHRHHAMDALAVALTKPVYIQYLNRLNARGREDKKGKEIYGIEKKYLERVNGKFLFKSPIENIREQAKKHLSKILISYKAKNKVVTINTNKTRKKGGYNEQKINTPRAQLHKETVYGKSHSYETKLEKIGTAFDYEKINTVAKQAEREALKTRLDEFKGDAKKAFTGKNALSKNPLYLSLSENIKVDEKVKTVQLIPGYTIRKAISPDLKLDKVIDVGIKRILQSRLDEYNGNAKEAFGNLEDSPIWQNEEKGIAIKTVKISGVSNAEVLHVKRDHYGNSISDENGNEIPSDFVSTGNNHHVAIYRDDEGNLQDEVITFYEAVIRKNQNLPIIKKQHEKGWEFLYSIKQNEYFIFPAPSFNPNEIDLINPDNFDLVSPFLFRAQKFSKLKYGNSFVREYVFRHHLETTLNDKSELKDITFFNIKSLQYFEGMVKVRINHLGKIVQVGEY

SEQ ID NO: 10435 - protein, 1409 aa, unidentified
  REGION 1..1409: note = Description of Unknown: Cas Enzyme sequence
MIKTKLGLDIGTNSIGWAVLEKEDKKYKFFCKEDSNRSPIPSKGSYIFPKGTEANEKSKAATRRGFRSARRRIDRIRRRKIATLKVLSENKLCPPLSNEELNDWRYSKKYPCDNKDFIDWQRTGRKGGNIETEKYKQPYFLRYLAATKEGLMDSRHGRYQLGRAFYHLSQRRGYKSIDEEQTEDAIEQFKIATNKLLEEHSNPISFVEPFNAVAETYKSDKKVKTLTGKIRRQLKKETSFQLIKEFIQQEFDKKENLGKVASGINELSDEIEKSGKQTLGCYFHSIYASKKDDGSIERIRGRYIDREKHYLKEFNYISDKQGIEKDLRDKLQFAIFYQRPLRSQKGLVAKCPFEPKRKRIAISHPLYEEFRMWESINRIKIKTENDSRLRPLNKVEKDLIKNEFEQVGDIEFKKIAEKLSLGQDFRYIKDREKESAEVEFNFPMTTTFSGSPTISRLKRILGKDDNGEIIYNSLPILNSGYKDEKNKEKISIEDIWHCLFVDSFGTKDKIEGRTEFAKKHLNWIDVEAFSKIKLKKGYGNLSKAAIKKILPYLEKGYHYSHAVFMANIPKVLGGTPAEKEEKIILNCIEQALKAKDFEKSVNAVVNNYIDKYKNEENGFGDDPNSIWIHKNGIKNEIEEWFAEDELEAMTESQQKLFENTCWTKFETAVNDKRPKEVKYYSSSTIPELILEQLITAKDLSVNGIDIEKLYHPSAMETYSKAEGRLGNPEISSIKNPVFNKALHQIKHLVNKLIEEGLVNKDTEINIEMAREINSASYRRAMALYQNDQKTIRNWARNKIKECYTEEQREDMNPTDDQIVKYILYAEQNQHCLYTGKTITPRKFFTEQKYDIEHTIPRSKTNDNSLVNKTLANAEFNRNYKKDKLPAILDLSYKGEKINGDTIIQNRDAWLKSYTISNNEIQFNVKLSSLKEELRKYRRAAKAAVSDAEAHDSLMDKVHYTRLKLNYLAQKYRTFEREDIPAKFTNANLVDTRLITKYARAYLNSYFKKVNVINGQITDTLRKIWGLQGQYEEKDRSNHIHHCVDAVTVACVEKGTVNRMSEAFHKYERDYFEGNESAKVYLPEPMNDFAGTMKRMKDEVLIFHKQVDRIKPMLEEPKEEEINLRGSLNKQKPYGIRKKENGDYFYVQRKEITAIKEKDIVNIADKRIQERIRNLCDTTGKKIEKLVSENGGYLVLPEYEDRNKNGKIVKSGPMIIKKIRLISSKTKLAPYKKIRKIDQTDKVGQEYKHDFYFDKKEGSNYEAILYGDLVPNEKGKLNREYRLINHFNIVKNVFEKEPSLPLLLKIHVDDMFLVFNRHYDEIDWENKKDLQFKLFKNVKFDENGILVFERHNYADGDVDHAKPAKENELQNLNGKVLRRSPSTFRAIPTKVDEMGRIDIEYSKKFIERHA

SEQ ID NO: 10436 - protein, 1522 aa, unidentified
  REGION 1..1522: note = Description of Unknown: Cas Enzyme sequence
MKRILGLDLGTTSIGWALTNNDFDNKLGNIEGLGSRIIPMAQDAMGKFESGAPITTQTAERTKYRGTRRLVQRFLLRRERLHRVLHILNFLPKHYSEAIDFNKKFGQFKPEREEKLSFYKNESNKNQFLFLESHQEMLSEFKLLYPDLKAVPYDWTIYYLRKKALTQKISKEELAWILLNFNQKRGYYQLRGEEKEENKTKLEEFHTLTVVNVIEREKGKSGIWYNVILENGWVYKRESKIALFDWVGKKREFIVTTELNDDGTIKLNKENEEKRSFRSPKEDDWGLRKIKTEQTINHSGKSVGSYIYDNLLKNPNQKIKGELVRTIERHYYKNELKQILETQIEFHSATLKNENIYKKCIDELYKHNDSHKNNIKDRGFDYLFLEDIIFYQRPLKSKTSLISDCSLEFRPIKDKKGVLVTDINGKQIVRPLKCIAKSNPLFQEFRLLQFVKNLKVFRKEIASEIDVTSDYLKTEDDLVELFNWLNEKAEISQKQFLAYPKFKLKEDKFRWNFVEEKIYPCNETRNQFLNAIAKIDVDKSFFDTKNTQDLWHILYSVTDKTEITKAITTFVKRHSLPEEFIVNFSKLKPYKKDYGSYSEKAIKKLLTLMRFGNHWDVNSIDTKVLNRIDKIQTGEFDENIKTRVREKAFHLNVLSDFKGLPLWLASYIIYDRHSEASDVSKWKIPADIEHFLKYDFKQHSLRNPIVEQVITETLRVVKDIWQYYGEGKENFFNEIHIELGREMKNDKATRERMSKQISQNENTNLRIKAILTELKNDGINDIRPYSPSQQEILKIYEEGIYSSENRKEKIEEVDKIRKNAKPTTAEINKYKLWLEQGYISPYTGKLIPLSDLFTTKYQIEHIIPQSRLFDDSLSNKVICESEVNALKSNMTALEFILKNEDRIVPLTGGKTVKIFTKDAYNQHITSYYSKNKSKQKRLLSEDIPEKFIERQLNDTKYISKIVKNLLSKIVREDDEQEVTSKHIVSLNGSITSKMKQDWGLNDVWNRIITPRFERLNTITNSNDFGKLELKKDEFGNTGKQVFQTTVPDAIAKGFSKKRIDHRHHALDALVIACVTKDHINYLNSINSERTNYSLVSKLRKTEEVQINGKMQKIAKEFHKPWENFTKNTEDELNQTIISFKQNTRVINKTVNKYQVWKEEDGAMKKITTKQTKGDNWAIRKPMHAETVSGKVFLKRIKQSHISIANAIEQIELIVDKEVKKQLAAKIKQYPNNADGLKKHLKAFPVMIDGKAIEKVQVYETVGGVNGATATRKTLDITFDEKRIEKITDTGIQKILLNHLQQEIYQNGIDENGKKIPAHEVAFSENGLDELNKNITKLNNGKKHQPIKKVRVFEEGGKFSLGQTGNKADKYVEAAKGTNLFFAIYQDEKGKRNYKTIPFNEVIERQKQGLCSALEIDENGNRLLFTLSPNDLVYIPTEDEKDNLTHLNFDKLSREHVQRIYKMVSFTGNRLYAIPNNIATSIVDKMEFSLLNKLEFTIDKESIKEFCLKLEVDRLGKIKNIIR

SEQ ID NO: 10437 - protein, 932 aa, unidentified
  REGION 1..932: note = Description of Unknown: Cas Enzyme sequence
MNKILGLDLGTNSLGWAIVDAENESIIDSGVRIFPEGVVNKGEGEDREMSKNATRTEHRQARKQNYRKRLRKIKLLEVLIDNDMCPLDKKELEKWGKWDSIKKSESRVFPQSAEFKEWLKLMPYELREKALEESITKFEFGRILYHLIQRRGFYSSRKSNDTGALYKGNDTIVGADKTEEEIKNKTLGSYFNSIYPEPNKSYEKITDDDGNELRIRGRYTVRDWYVEEFDKIWEAQAENLGLHKIFAEKKKKVVLKGGQNRKRNQKKINYLKQKRDKVLVEEMTFKNKEGAKKTETKVFSSEKVSLKEYLAGEIKHEDGNIKYNNKDSVLFYQRPLKSQKNLLGKCRFEINKTPAHLSHPLFEEFRTWQFVNIIEYGTKKKLNPDQKNLVASLIKTTKNTIKFERIIKELKLEDYDFNYESDFKVKTCKTISSISPLFPKKIWEDNYNEIWHDFHFYDSSEKLQQKLLENYNVNISTDQLDKINIEEGYSNVSLKAIKNILPFLKKGMTYNKAVIFGGIKNAFNYGDDINRWDNFKEEHGKIISDIGNFIKGDNKKGELLEKIKDYLIKGEYGFTEDDKAFKKLYHHSQEVEQKKLKFEISEIENLRNPIVQRSLQEVKRITNALIKKYGYTPDEKEKPFDRVVVEMAKDLKTNKTNRNKIRRLNIDNEKKNTESKEILTNHGLAHSRENIQKYLLYKEIEDKNGLVICPYTGKTVAISSLLGKSNKFQIEHIVPRSTSLDDSFANKTICDAKFNQIKGNKTPFEFYKSNSDEKLWGVKSWKEVEMRAFKLLPYFKAKKFTNRKTDLDRGDFISRQLNDNRYISKKTKEIMSEICDDVRVSPGQLTAELRRLWGLNNVLQPMHNINDKLDKYDENEAVPHYAVINKKDNNVEKLIPVYNEKPYSLDNEVIITGKVNKKTFESKIFNVKYQNV

SEQ ID NO: 10438 - protein, 1050 aa, unidentified
  REGION 1..1050: note = Description of Unknown: Cas Enzyme sequence
MTYRLAIDMGATSLGWCILDLNDQGQVCNVLDMGVRIFPDGRDAKSREPLAVSRRGTRGSGRRLDRYKSRRKRLMVFMTKNGLMPTDIAKRKELELENPYELRARAAGEKVSLHELGRALFHINQRRGFKSNRKADSKSNESGAIKTGIAELEHAMLANGSKTLGQFLHERLKNKESVLARPETKGSKNEYDYYPARAMYEHEVDFILNKQQEFHPELIEKVCAGLKEIIFYQRPLKPQPVGWCTFESKENRARLASPIVQKFRILQEVNNLEIDGLAETDPKLKREDRQKIIVELQKKKEVKFNRIRKMLGLGDDVTFNLEALESRAGLDGNTTNFILSKPEYFGDSWGELSTDQQEAIIKLLITEPDPEKVIETLICDYDVSLEQAEKISNSPLKEGHGRLSMKAIQNILPYLEQGYSYHDACKKAGYHHSDFRTGEIFDELPYYGEALQTAVIGGSYAEEDKNNPEIFYGKINNPTVHIALNQLRKLVNALIDIYGKPHEVAIELAREIKYGQKRLQEHNKNQNENRARNEKINAELEKLGKTPNYKNRLQYKTWEELATDPTKRCCPFTGRQIGANDIFSGEFEIEHLLPFSRTFNDSPANKVLSLRSANRLKGNKSPYEAFSHTAQWSEILARAENLPFNKRWRFKEEAWDIAKGNNEDMIARQLTDTQYMTRIAKKYLSFVVEEQKGQSRVYGIPGQLTALLRRKWGLNNVFDDSLDKKDRSNHRHHAIDAFVVGCTTRGMLQAISRSNENEREKIEIPEPFAGYREIVKEKAENMVISYKPDHGNARKAIKHGKTVAGLHQDTAYGLAENANAKKGKALFVTRKPVNGFTKRKDIEAVIDPVWKKKLLDAVETCKDGSNEFKTALDKFAETNNVRRMRVYVERSQNTMIPIYHPDEKGKDGAEPYKFYSLGGNYCTEIYCPDKGKNAGKWGIEIISNYHAHQKDYIPQWQKGNPTAKLVMRLQINDMLAYEDEGETKICKVKKMTGGRVYLRDHRIAEELADKESWAASPTQLQKKNARKISVDITGRIKDPKKLTENQGVAA

SEQ ID NO: 10439 - protein, 1100 aa, unidentified
  REGION 1..1100: note = Description of Unknown: Cas Enzyme sequence
LSERKSRPWRLGLDLGTNSLGWCAFDLAKGEDGRQRPAGIRRMGVRIYTDGRDPQSGASLAQERRGPRGARRRRDRYLDRRADLLKALIRHGLMPADPAARKKLEDFDPWRLRGEGLDRALTLHELGRAIFHLNQRRGFKSNRKADRGRDDKEAKDAQDMKAAARKLDAVLGPDKENARTLGEHLYKKHRATFNGTAWQPTTPAKAETVRSRPTTVNGHNTYEFYPLRSMILAEFDALWAAQAPHHRELTDAARDAIRDIVFYQRPLRPVDPGPCTLDDEEDLDKRDRRAPLALPIQQDFRILQELANLELFHKTNPSIRRRLTLAERDALYAALKRSEKVTFKRVRILLKIEDIWSFNLESDRRDHLKGDIVAVRLGREGAFGKRWLDGLGDVERQNIVLKLLDEESPEEVVRIGVEVWGLAPDEAERVADTPLPVGYGSLGLKALGRIVPILRERADKDGGPIRYAEAVQAAGYTHHSDFRDGELFDELPYYGQALQRYTAPVRSESAPAWEREFGRLANPTVHIGLNQLRKLVNALSEKYGPPEEIVVELARDLKRTQEQREEVQKTQAENQKKNDGRREIIDSIQKSDPGWKPPRDAMLRLRLWEELDPANVVNRRCVYSGKPISRRMLFSDDVEIEHILPFTLSLDDSPSNLTVSLRSANRVKGNLTPHAAFGHSPPGFDWDEIMLRVAALPRGKQWRFRPDAIDLIKSKMARETARLEGALPKDALDDIEKTGGFLARQLVDTAYLARVTRQYLWKICDPDKTWVIPGQMTALLRRKWGLNSLLGDHNKKNRADHRHHAIDAYVVGLTDRSMLQKIQQAQGVNRERIVDDMPDPWDGYREQLKAALDRIVVSHRPDHGIDPKAQPGIRRSTSGRLHEETAYGIVEDPEREGGNVVARKPLESLSENEIDRIRDPELREKLRTHLAPYLPDGQSMENARARLAEARKAKDAKAVERAQAEIGRLKVENKTRKKAGAKDFKAALAEFGRANCIRRVRLVKPEAAVVVIRDRFGNPYKAYSAGDNLRVEIFERDDGSWGREIVTAFDANRADFRAKWRDVTPEPRLKWRVHKNDLVKLDVDGEERVMRVVSIWDKYL

SEQ ID NO: 10440 - protein, 1297 aa, unidentified
  REGION 1..1297: note = Description of Unknown: Cas Enzyme sequence
MHQIIGLDLGSNSVGWSVIIYDDQGQFQEVRDAGSRIIPLNQLKTKFEQGQSISVNGDRRFQRMQRRLKDRDKLRRKHLLTVFQHLNAAPDFLGKNPHKGSDQYTDHQLYQLKRDALHKKVSLSDLARITYHANQRRGYFSNRREKQRESSETNQETFITLSVIEEVTPTGEKKKNKPEYAVALANGEVAYTTDETFRALQGEEKEVKISKKVNKQGEVTAVGITLPSEDDWNAQLARMERELAQKGFHPCEYFLEKMKASIAEGERYRVKDHLIYRDRYIQEFNAIWDQQVQHHPELTDENLKKRIVEAVLPKNYPEKRKWLKRDLKTFVRDFIIFYQRPLKSQKGRIDTCFYEPWKKVVPKSHPLYQEFRMWSTINNLMLEDDEGHRYPLTNDVKADLYDYLQYQVKVTPKQLTKHLQLGASETLRVPDEVPGNATKASIAKAFKDAGEDVADYIGGYDDWLAMWHILYSHQTSEKGLKKALRKQFGIASSTLQESLAQTYFSQEFGNLSHKALKNLLPLMRADRYFDPEAIPEGVISRMDNLLNNQPDEGLKDSTYQKFLGELLVQNRTDFQGLQYNEAASLVYGEFQRTVDETWTEPEAIPKIQPGELKNPVVEQVGNEALEIVRAIWERYGKLGKIRVEFARELTQSAQEREKRSKAMRDRQKEREQASNQIQQDPDFGIRNPKRNDVERYLLWKESGMYCIYSGKTIPKTALFNGETDIDHIIPRERYFDDSFANRVICYQDANREKANYTAYEYMSGQDWERYEQDVKNTFNGLKRYYLLTEKVPESFLNRQMSQTRFISSEVRRRLEKIQDCKVELVPGQVTDHLKNEWRLNEAFKELVKPRYERMEQVVYQGKRKLIQHRDTENGQVLDLENYSKRLDHRHHALDAIVTGVTSYGNVMTLARLNKHGAGARHIRPPKLPNSSQPFHQHVKRVLSRILVSHKDKKQLVTQGLNQYYRRDPETGKKTLAKQPGKNLFAVRRPLHDQQPYGRITRFKKVSIKEAMKQPDRIKEPWQRDLVKERLNAYQQDVKKAVQSLKNSPLYRPNGKVLEGVTIYEEHYAKTHALKDFAGKSPKALDQVSDIGLQKALKEHVQEYGGEVTKAAMAEAFKPANIERFNKNRKDPVHQVRLIEHQGKLEALDDERWVYPGENYCIIVNNQEGLRLRPVTNLEALEHFKQGGTHQELLEEPSDFSLWAYEMVYVPKPQERVPETLAELTQEELAERSYVFRKNSNEQMYFLHHCVADSILRSEEFGTQDMVQFIDTEQPRTKIIDQCIKLQLDRLGHPMGFE

SEQ ID NO: 10441 - protein, 1126 aa, unidentified
  REGION 1..1126: note = Description of Unknown: Cas Enzyme sequence
MKKTIIGGDLGTAKTGITLISIVDDETKIVDSKVLIDNFKNGHEYNTNNYKTPATIRREYRSSRVNRRHKRMKIVKLSNFLCEKFNLDEIKKTSNVLDLKIFGLNDKLSLNEISFVLLNYARYNGYNTLDDESSIDDEAKSKYKKKLSESKLWCDNHPELTISSYYKEINNNSIKYRCSDYPIVKELHLHELKLFLAKQKEFHSEITDDFNEEVIKMIYYRRDLKSSRHLISDCEYEYNRKVCPKYTLLSQEYIIWQGIHNLRLNDESIENTEKLILFKKLNENSSLKRNEILDIILEYRRDNYKLLHSVTSYDDIECAELTDITNDNVFTFTSKECEIIKRLIRNGVNSNDLLNKLYLNDNYKISHKELTGNRTRTKIREIIGNKLDLINNELIENDIIEKIGHMIYSESYSTRRKKSLIKFNSSQNIINLSNNEIESLSIAKLPDGFSDCSNKALKKIISHMNGQNDYLDHYSAIMKVYGNTIKSVKKKLTLDKIKEGSLRNPIVEHKTNQFIKIMNGYIKQGLIDNHTSVHIEFSRDLMLPKKIRLSIEKNNDNNKKFNKELENLLLFHDYPANSKNVKRVKLWIEQGGKYETNGKNFSITNDACDLYTNTPITLINALDGNSYNTDHIVPKSRCFNNTLNNFILTSRKSNELKDARTSYEFVEETFSDDEKKTFYDNLKKYYGNNKRKLESFSYGYDNMPENMGENQLVLNSFIAKKTKSQLETYFDKVICVNGITTDYVKNVLGYTKMFKTNIKDNMSDYKKKEINDDEIDKRYDDRNHALDSIVIAMIDDKITHRINNLNQYYSDDKNVSLDNFIKNHAVSFFNSENHLNMVSDSLNKTITIRRKDKHPIFNKTIYYNNEKHKISCVRGQLHDETFYSSTNIDGINVLTKQKSLLNIEKDLINALKKKTSDDIKMKINDIINTIVNEKSRDLLRTFIYENDLTPETIKSALKKFVNDPLRKNAKSLLVKAYYHNSVQVGKNLSNDKNHVRNVIPNNNYLLIIYKKNNKHNHICFSLLDYTKGKHKDFLKNNQIVHVFKKNDYFVCDYDNNQLKTLINNNDYSFLSKLYFIPEMNNSSFFYEPYFSNNKDCFRIRESSNTFFSKNKIITKIKINDFGKIFV

SEQ ID NO: 10442 - protein, 1371 aa, unidentified
  REGION 1..1371: note = Description of Unknown: Cas Enzyme sequence
MEKEYFLGLDIGTNSVGYAVTDTEYSVKKFNGKAMWGVQVFEEGKQAADRRGFRSARRRLDRRQQRITLLQELMANEISKVDVNFYKRLSESALYPKDKETKSDYTLFNNIAYTDIEYHKDFPTIHHLIIALMKWNIKYDIRLIYLACAYILGHRGHFLNTADKNNIENVLDFKVVYNDLLNWFINLEVDVPWSCDTLKFSEILKKKLPVSKKEKELNDLLFNGNKSVDEENYIVSKSYLIKLLIGGKTDLSKLFKNEQYKELEKKSICLNDSEFDNDVNCISPNLNDGDSDLLWEAKKIFDWSLLSDLLGEQKENEALSISNSKVKIYDKHKEDLALLKKIIKKYMPNKYIEVFKTADNSKKSNKRIVPNYVAYSGNIKSLAVGNAFDLEKCNIDEFSGYILNILKNINPDKEDKQMFDNIIDRLQEKNFLTKQVSNANRVIPYQLYWVELKTILGKASIDYPFLLEKDEYGTVKDKILSIMEFRIPYYVGVLNNNKYNSAWIERKAEGKIYPWNFDEMVDHEKSEEAFIDRMVGNCTYLAGEKVLPKSSLLYSKFMVLNEINKIKIDRVPITIQDKQQIFNDLFVDKKSNVSQKSIRDWFKSNKGIHVKEVSGIDVLIKSSLKSYHQFKNLLISGSLNENDVETIINRITITTDEKRFKEWLKDKYSKLSNDDIVYISNMKYSDYGRLSYKFLCEFDTQNINKTIIEMLWETNYNLMELLSDEFDFKEQVEIYTENYYSEHGHTIADILDKMYISNAVKRPIYRTLDIVNEIKHIQKKDPKKIFVEMARGEEAKKRTVSRKDKLLELYKALDRSKYGDLIDNLNKESEDRLKSKKIYLYYMQLGKCMYTNQQIHIEELVDDKMYNIDHIYPQARVKDDSFDNMVLVTSKSNGEKGDDYPVKEEIRNSMRAFWNMLADKELISKEKLFRLSRHTGFSPEELSGFINRQLVETRQSTKAVAVLLKQLFPNSEIVYVKAGLVSEFRQAFDLIKCRDINDLHHAKDAYLNIVMGNIYHTRFTTSPINFINENVKNTKYTLKLTAKDGQGLLSRDIERNGCIAWRGDGSSIKKVVSTMNKNNVNYVRYSFCRKGGLFNQNINKAPNKDNELIPIKNDLDTNIYGGYNNTTASFFTLVKHTIKGKSAISIVPVDLLVAEKYKNDDKFAIQYCKEKLKLENAELIKNRKLIKINTLVEIDGFRANIASKSNGGKTIVLSSSIPLILNRNYEKYIQKLSSVVSKAKENKSQLIVKSYQDITTEKNIQLYDALINKGTISMFKNVSIIIKIQKTMIGNKNEFEKSTLEKQVFTLLQLISLFKTGRTTGCDLKDIGSSGQAGVITTNSKITGSNYKSFRIIDQSNTGLFEKVSDNLLEL

SEQ ID NO: 10443 - protein, 948 aa, unidentified
  REGION 1..948: note = Description of Unknown: Cas Enzyme sequence
MNTLGFDIGSNSVGSVWIDRAKGGITAGVSVFPAGVDESDDKRGDPKNAKRRMTRRTRITLARRAERKRLLRLRLIEAGLLPPTEAEFKTLLETTDPWDLRRRGLDKPLGPYEFGRVLLHLAQRRGALGLHVPDPSEEEAAADDAAQDDGKVKAAIGAVRAKMIEKNARTFGEFICMVRAERVTPITTDDKRAAAKRKGPREWRGAVRNKAASYEHCADRPMIRDEFARLWDAQRRFGGETAGLLTAELRLALDDESGDAVWRHKGLLFGQRRQSWDLGTLGRCVLHPEERCVPHADMYASRYLVVETVNNLRIIERDKPPRPLTPEERDRIRAYLSGPLGTETNGKRKGQPKRTVTVTDLRNLMGWGRASKSSQFRFNIENDENRTINTDWFSREIIHGAVTPETWEAMPDRVREGLNRAILKFDPDQEEDAAKLRAGVMDWAGLTAAQADALVAAWKSRPKPDAKRLSMSRRAVRNLLSVMDRPDPWPDDRSPTGYRWLTQIEARKLLAGDGDFIDATTGKPLDDHTRRRYATGAKGATARDRYYMGKHVLMKGGRPVIDRETGEPLAEPPPAPLVSNPVVRKAIHEVRRHLVEYMTTFGRRPDEVYIELAREAKMGKKDADRLLFRNRLRNRIRNDIIRTDGFGLSGPHVTSTQQRAAVDRVILCVQQGGVCPLCGQGGLTPLKAAKGEDCEVAHIIPRASGGHNGLSNIVLAHTKCNREMGRRTPRQFWSDGPGFEQGMVWVEGIYGEVKRPKPSEFKSATGDALWACYFNKRDDTAKVEQFKKDVKDIQDMTARQEAATKYAARQVMAYLSDALFDGKGLPERGGERRIYATDGLWTSRLRREWNLFFDPHDARSHGLSNDEERERKEKNRGDHRHHAIDAVVIALCTRQVQIAWEEREKRADNEGINTANEEEMANYRRLHPLDPPEPFTSIEEFREEVKRA

SEQ ID NO: 10444 - protein, 1220 aa, unidentified
  REGION 1..1220: note = Description of Unknown: Cas Enzyme sequence
MSKVLGLDLGTNSLGWAITEETASGYALLDKGVDIFQEGVAREKNNEKPAVQDRTDARALRRHYFRRRLRKIEVLKILIDNGLCPWLTDGQLTEWRKHKTYPLDEAFIRWQRTDDNADKNPYHDRYRALTETLDLNNESDRHTLGRAFYHLAQRRGFISNRKEAGKESEDGQVKQSIKNLTADMENAGCRYLGEYFHMLYLRKEKIRKKYTSRNEHYLAEFRAICDRQHLPEPLEQALYRAIFFQRPLKSQKGTVGKCTFEKQKSRCPGSHPHFEEFRMYSFINNIRIVTPKENDFRPLTQSEVETIVPLFLRKSKQHFDFEEIARKIAGKGRYACKGDRNEAPYRFNYARIATVSGCPVTASLISVFGDDWLPEIYRRYTLASGKSEQQILNDVWHALFSFDDEERLRTWAREKLRLTDEQAAAFAAIRIPQEYVALSLNAIDKILPYLRAGYRYDEAVFIANLKAALPQEIAEDETRLQEIERDIVRLLLDYKRNPYDKYDSKERRIEAYFSDNGLDVSRLQRLYHPSMIESYRAQRPDSNGILQLGSPRTASVRNPMAMRALFRLRALVNRLLRDGKIDPTTKINIEFSRGLNDANKRKAIERYQREREAEHRQFADEIRKQYAAETGTEIEPTETDILKYRLWEEQKHVCPYTGRQICISDFIGSATGFDIEHTVPRSRGGDNSQMNKTLCENRFNREVKRAKLPSELSAHAEIMACIEWFGWQEEVEALQKMIEAQVRKSKGATTKTEKDNAIQRRHYLQMQLAYWRGKIERFTMAEVPDGFSNRQGVDIGIIGRYARLYLKTVFERIYTVKGATTAEFRKMWGLQAEYAQKERVNHVHHCIDAITIACIGRNEYDHWARYVGDEERYLRNEGVRPQFEKPWPTFTEDVKAIADELLISHHTPDNLPKQSRKRLRIRGKVQVNGQGKPIYMQGDTARGSLHQQTFYGAIKRNDEIKHVVRKSLDQLQPTDVEKIVDEAVKQKVKEAIDCVGFKTAMNPEEHTIWMNQEKAVPIRKVRIFTPSVTQPIHLKKQRDASEKTYKQDYLVTNDGNYCMAVYEGTDKRGKTRRSFEIVSNLEAAQYFKASADRTARPDLVPVTDTNGNPLKCLLRTGTMVLFYENSPEELHECSRKELAKRLYKVIAMSAEGRAQFLFHQEAREQKALKEICGSGASVFEAKCPAPKLRLSTSNFNMYVEGYDFDMTVTGEIEFKHGPSC

SEQ ID NO: 10445 - protein, 1085 aa, unidentified
  REGION 1..1085: note = Description of Unknown: Cas Enzyme sequence
MKNILGLDLGTTSIGWAFVKEAETSEEKSSIVKIGVRVNPLTVDEQTNFNKGKPITTNAERTLKRGARRNLQRYKLRRAYLINELRNAGLITDAAILTEQGPGSTFETLRLRAKSATDKVSLEEFARILLMINKKRGYKSSRKVNNDEDGQLIDGMTVAKALYDNSLTPGQYVYQLIKSGKKYIPDFYRSDLQSEFDKVWECQKTFYPEIFTDALKSELEGKNEKQTWAICEKHFRINGISRTTKGEELKKENYLWRTKAIEEQMDLESLAVVFQKINSQINGSSGYLGAISDRSKELYFNNQTVGQYLAQKISGDSHFSLKNTVFYRQDYMDEFERIWSVQAKHHPELTDELKKRVRDIIIFYQRPLKSQKGLVSICELEGREIEITCDGKIKKKLVGPRVCPKSSPLFQEFKIWQMLNNLTANKRYLSQEEKERLFDRLCTCDKLSKAEIIKCLSPEKSVRERNQDSLFAPDEMYEPEVLVSLENKKKEIVLNYKEIDGNRTMASLFRAYSKIIMLTGHDEYDFSKMPLSKAAGIISDIFAGLGYRTDFLHFDSSLEGKAFEEQGAYRLWHLLYSYEGDKSVSGNEKLISKISEITGFEPEYAKVLANVTFAPDYGSLSTKAMKRILTFMKEGNEYSLACAYAGYNHSKKSLTKEQIESKILKEHLEILPKNSLRNPVVEKILNQMVNVVNAVIDEYGRPDEIRIELARELKKSAAEREELSKAVASADKHHKEIRETLHKEFGIASPSRNDVIRYRLYEELKDNGYKTLYSDTYIPREKIFSKEFDIEHIIPQSRLFDDSFSNKTLEARQVNLDKGNATAYDYVKDKYGEAEVEKYVARVEQLYKAGGISKAKRNKLLMQMADIPSDFIARDLRDSQYIARMAKSMLEEITRHVVSTTGSVTDRLREDWQLVDVMKELNWDKYDRLGLTEIVQDHDGRRIKKIRDWTKRNDHRHHAMDALTIAFTKLSYIQYLNNLNARIQKEVGKEYMADLSQYSVLDIHKSDRTDVIMAIERTQLYRDKVGGRLRFMPPMPLDEFRREARRQLENTLVSIKAKNKVVTRNANRTKCMGGTRQKVQLTPRG

SEQ ID NO: 10446 - protein, 1225 aa, unidentified
  REGION 1..1225: note = Description of Unknown: Cas Enzyme sequence
MSKVLGLDLGTNSLGWAIAEQTENGYALLDRGVDIFQEGVAREKNNEKPAVQDRTDARALRRHYFRRRLRKIEVLKILIEHDLCPPLSDEQLAQWRKRKTYPLDDAFIQWQRTDDNTDKNPYHDRYRALTEELDLDNRHDRWSLGRALYHLAQRRGFISNRKDTGKESENGQVKQSIKNLTTDMEAAGCCYLGEYFYILYQQKEKIRKKYTSRNEHYLAEFRAICEKQKLPESLTETLHRAIFFQRPLKSQKGAVGKCTFEKRKPRCPISHPHFEEFRMYSFVNNIRIAGPQDPDFRPLTQDEIQTIRPLFLRKSKPHFDFEEIARKIAGKGRYACKGDRNEAPYRFNYARIATASGCPVTAALISVFGDDWLTEICSLYTLGSRKTAEQILNDVWHALFSFDDEERLGAWAREKLQLTEEQAKAFAAIRLPQDYAALSLNAISKILPYLRAGYRYDEAVFIANLKAALPQEIYEDETHRREIEQDIAQLLLDYKRNPYDKYDSKERRIAEYFTDNGLDSSQLDRLYHPSMIETYPAQRPDADGILQLGSPRTASIRNPMAMRALFRLRILINKLLRDGKIDPTTKINIEFSRGLNNANKRKAIEQYQREREADHRKFADEIRAQYAAESGMDVEPTETDILKYQFWEEQKHVCPYTGKQIRISDFIGTATDCDIEHTVPRSRGGDDSQMNKTLCENRFNREVKRAKLPSELSAHAEIMARIEGFGWQEKIDTLQKMIEAQVRKSKNAATKSEKDNAIQRRHYLQMHLAYWRGKIERFTMTEVPDGFSNRQGVDIGIIGRYARLYLKTVFDRIYTVKGATTAEFRKMWGLQAEYVKKERVNHVHHCIDAITIACIGRNEYDRWARYVGDEERYLRNEGARPQFEKPWPTFTEDVKAIADELLIAHHTPDNLPKQSRKRLRIRGKVQVDNQGKPIYMQGDTARGALHQQTFYGAIKRDDEIKHVVRKSLDQLQPTDVDKIVDEAVKQKVKDAIAEVGFKTAMNPQEHTIWMNQEKAVPIRKVRIFTPNVTKPVHLKAQRDISEKEYKRDYLVMNDGNYCMAVYEGTDKRGKTKRSFEIVSNLEAARYFKASADRTTRPDLVPITDANGHPLKYLLKTGTMVLFYENSPAELHECTQKDLAKRLYKVIGMSSTMIQQKYSYGILTLRHHQEARQAVDLPIKKGAWKIDESYRPIIGLYHTQLNAYVEGYDFDMSVTGEIIFKHEPSC

SEQ ID NO: 10447 - protein, 1322 aa, unidentified
  REGION 1..1322: note = Description of Unknown: Cas Enzyme sequence
SITKLGVRIINYDNFGSSETGKDSKDPVNDFRSGKGLSCNAKRTLKRSMRRNLQRYKLRREALIDTLKSYGWFSDSSILAESGKDTTFQTLKLRAKATGEEISLEELARVFLNINNKRGYKSSRKLNKSENTDEGSLIDGMETARILSEEGITPGEYSYRLLCEGKEEKNLPEFYKSDLENEFERIWTFQRQFYPDIMTDALKEELRGKNEKQTWAICEKPFNIAGIKRTSKGKELAKENYQWRTLALKEQLDLEQLAVVLQKVNAQLKKSDSYLGKISDRSKELYFKHQTVGQYQLEQLLKDPHSSLRNQVFYRQDYMEEFDRIWETQSRFHPELTQEMRNTIRNIIIFYQRPLKSQKSLVAYCEFEKGRKVCSKSSPVFQEFKIWQMLNNLKIDGMYLDIDAKQRLFKELSIQKELSKADTLKLIFGKSKGHDMNFRKLEGNRTQATLFQAYSRILSLSGHGEIDSSKGADSIIEKTAAVFSALGIDTGILTFDSSKSGKDMENEPLYRLWHLIYSYTEDSSKTGYDSLVRKLHDEFGFDPEYGKILAAVTFEDDYGSLSTKAMCRILPYMKKGMEYSAACTEAGYRHSQRSLTKEEIESREYKDRLDILPKNTLRNPVVEKILNQMINVVNGVIDTYGKPDEIRVELARELKKNAAERQSMTEAINRSTKENKDIEEKLKQDFGMSHVSRNSIIRYKLYMELKDNGFKTLYSNTYIPYEDLFSKRFDIEHIIPQSRLFDDSFANKTLESKDINITKGDMTALDFVTDKYGQEGLEEYRSRVEMLFKNNAISKTKYHNLLRTGKDIPENFIQRDLRDTQYISKKALEMLGDIVKSVVATSGEITARLREDWGLVDVLKELNWDKYDKLGLTEYYNDPDGRRISRIKDWTKRNDHRHHAMDALTVAFTRRSIIQYLNTLNAKDKEQQQEITSKGRLMPPMPFDEIRSEAKRHLSDILISIKAKNKVVTRNVNKTKRKGGSNEKVQLTPRGQLHNETVYGQILQYECKEEKVGSTFDADKIATVACERYRNALYQRLAQYGGNPKKAFSGSNSLEKNPVFTDILHSEQVPQRVKTVRLSPVYTIRKQIDPNLKIDKVIDGHIRRILTERLEEFGNDSKKAFSNLDENPIWLNKDKGIQIKRVTISGPTSVYALHEKRNMLGTPIVNNQGKPIPSDFVSLSNNHHIAIFIDPDGNLQEQPVPFMEAVARVSLGDPVIDKTHKAKEGWKFLFSMKQNEYFVFPNNETGFDPNTIDLLNPINYPTISQNLYRAQALSTKDYWFRHHLDTTTDKTDTLKNISWKRIQNVNGLKGIVKIRIDHLGNI

SEQ ID NO: 10448 - protein, 1047 aa, unidentified
  REGION 1..1047: note = Description of Unknown: Cas Enzyme sequence
MKHKHILGLDLGTNSIGWAVINASKNEEDKEQLDGINCDGVRIIPMDAAVLGDFDKGNSKSQTADRTQYRSMRRLYERGKLRRERLHRVLALLNFLPLHYSNQLNRYGKFIAATEPKLPWHKDEQGHWTFIFQESFDEMLADFYRNQPELLSKGQKVPYDWTIYYLRKKALTQKISKEELAWILLNFNQKRGYYQLRGEEEQERPSKTRQYFDRQTITDIIDTNQTYKGMKVLSVILENGMKGKIFRKYVPDWIGQKKDIIIKIDLDKEGNDKYDETGELCCIFKIPTEQEWEEQWELIKAKTQNDLDASEKTVGAYIYDTLLQMPKQKIRGKLVRTIERKYYKEELRRILEKQKEFHPEFQDQALYEACLEELYPQNEAHRNLISTRDLVYLFVDDILFYQRPLKSKKSLIADCPYEEYTHTDKGTGEVRHFGIKCIAKSHPLFQEFRLWQFLSNLRIYQKEKTVDGKLCLDVDVTSEFLKDEEDYTDLFDWLNRQKSVKQDSFLKCPLFGLKKNDIGKYRWNYVEDKLYPGNETRALILGRLEKAGIAADFLTREKEEALWHILYSISDKEELQKALKSFAQKQGFDKRFVEEFLKTPPFPKDYGAYSYKAIKKLLPLMRMGKYWNENEINEQTRDRIDKIISGEYDENIRTRVREKAIHLDRLSSFKGLPLWLACYVVYDRHSEAKDVQKWENPSDIDDYLKKFKQHSLHNPIVEQIILETLRTVRDIWKQVGHIDEIHVELGREMKKTKDERAKMTRQIQENENTNLRIKALLTEFINPEFEIENVRPYSPSQQDLLRIYEEGVWNSVGEMPDEIAAIIKKFNESDVKKRPTTSEVLRYKLWLEQKYRSPYTGEMIPLGKLFTPAYEIEHIIPQARYFDDSFSNKVICESEVNKLKSNMLGYEFINKHHGEKVQLTGGKLVEISSIEAYEKFVKDNYSCNSAKMRKLLMEDIPEQFIVRQLNDSRYISKLVKSLLSNIVREEGEQEEMSKNVIVCTGSVTDRLKKDWGINEVWNKIILPRFLRLNELTGSNRFTSVNTNGNVI

SEQ ID NO: 10449 - protein, 1401 aa, unidentified
  REGION 1..1401: note = Description of Unknown: Cas Enzyme sequence
MKKILGLDLGTNSIGWALVEIDHEKGVLRIIALGARIIPMDSQEFSKFEAGQKITSAAGNRTTLHRARITKERYLLRRDRLHLVLNLLDALPEHYKIEIDFERNGKRCGQFKDESEPKIAYLPTKNIDNKHTFYFEDAFDEMIKDLKKVNPEIENRTGKRVPKDWTIYYLRQKAIKQKITLEELAWVLLSYNQKRGTELNELENKNERSDEFREFLDLQVVSVTRKSDTNEVYYEVVLNDSENFTFREYTTEQLTFKDDIKEVVKTSKLDAAGNIEKEKTIYQITDLYNLTLSKVEHRETDDKKFKHIYTFLYTNGWSNQKKKEKWYKSYNDLGKKLEDEAVKKNPKFISELFVISNKYNTKGLPENNIPSIKVPDFNSEGSKDWTLLKKKTEKDAVKYNIDNGYKNEDGSAKHYISPKIYDVLINDAKSGERTKLIGGLFQTIDRKFYREELNQIILTQKQFHKTLEDNSVFMKCVKLLYPHNEEHSQALLVNKNAISHLLIEDILLYQRPLKSKKSEISDCKYEIDYWKNEVDTTSGEVLEIPVYKKAVSASHPLFQEFRIWDKIHNIKLIQLDAKNSEGKTETNVDITSQYLNPEGYKALFEHFNKRSTVAIDDFLDFCKKQFGLDIGKKGDRRILWNYPAEEEFKGNETRKSFEIRFKRCGFKDFDSFMTQKKEVELWHYLYSVNQRDRKKVSETKNKTNSKFGKTSCQNFFAKFLNEENIEEDVFIKLCNDFENYPKFPSKYAAYSAKSLNKLLSVMRVGDNFLSKGKCDESWQDKYQERASTILEKSKQINWLANEIDYSKVVVNEVNHRLRELAFPKGLFNTFRDFKSIDKFKFLNLTQASYLLYGRHSELAQTKYWDSPDKIRDEINKELKHHSLNNPVAEKVLKETMKVVADIWELYGASVKKYFSEIHLEVARELQKSNEEKQEITSKQKSSRKENERLRQILEEFLCQNPYNAKKGNQDHFERLKIVEDGAKTTSYIDKNFYSKNEKQFEKKEIEEILKKQKISKSDFEKYKLWMEQGYRSPYTGKLIKLSDLFNGNKFNIDHILPRAAVTNDSLNNKVVCEAFLNRLKSDRTGREFIVQMGGKTHTVFDEKSKEQVEIKLINEEEYVDLVKTQYRDSKRFILLSKEVPTGFTDSQMNNAKHIARKAMELLSHVVREEGEVEFRSKNLIPVTGAITDKLKKEWKFNQVWTELLTPRFERLNSLFKSDDFGNYAISKTGHRYFDVNTKYILERNDKFELKRLDHRHHALDALIVALCTENHVHYINNMNSGITNKKKEKIGAIKEQRAGIKRQIMYCEPDKENPDEKKWIFMLPGSFRKKESVGNDKSTVVDLKWQNNYSNEASTDYRKIALAVIENCIVSFKNDFKIVSKSSNIYESYYDENGNLRLDEN

SEQ ID NO: 10450 - protein, 1127 aa, unidentified
  REGION 1..1127: note = Description of Unknown: Cas Enzyme sequence
MAKILGLDLGTNSIGWALIDDAQNKILGIGSRIFPMGVDNLGDGDKEMSKNAGRTGARGVRRQFFRRRLRKKILLKALSENNMCPMDANDFEDWKKTKQFPAEKLASWFALNPYELRQKALNEKLTFEEMGRIFYHLIQRRGFLSNSRKGGADDGVIFKGNAKEGKIGIDETLESIEGKTLGSYLYEIYPKENQPFQEGLERIRNRYTTRKMYVDEFELIWEKQAQFHQVLNHDLKTLFGGRKQDNYKEDGILFHQRPLRSQKHLVGNCSFEPSKTKCPLSAIPVEMFRIWQWVNTVEYNGNKISQAEKEKLIEQLLSFDKIEFKKLRKAIGKESAEFKFNYKDDDKIVGTHTISNLSNKKFFGKKWFEFSEKEQEDIWHVLYFFDSKSNLKEYAIKNWNFSEEQAIAISKFNVKDGYASLSRKAILNISPFLQQGYTYDVAVVMGGIKNTFGNKWQNDTSENNQKQLDLIDNVEGIIRAKISGGFIDTIKDLLRKDFGFDDKQLKKLYHHSATIDVSELLLKLPVDKDADKEIQAIRNPIVITALFELRKLINEIIEEHGQLDEIKVEMARDLKISKSQRNKIRRDQKRLEKENDRVKTEVEKYARVSQDNILKFKLWEECKQTCPYTGVAIPVAKLFTGEIQIEHIHPWSRSLNDSFNNKTLCYADENRRKGDKTPFEFYGNDELDWSARKERTLKLFSDTKEYPNSYQKFKRFVQQKFDDDFSSRQLNDTRYISKEAANYLKQICKKVMVSPGQMTANLRQKWGLNTVLNDENAKTREDHRHHAIDALVMACGKTSYLQELSKWNRYNRNYDLKEFLMPWDSFRYDAEKAVEKILISHKRISNDITIRYKKVEKNGKTHTNKGVAARGQLHKETVFGKRHFNGEEAFHVRKPIDSLTTEKQLEKVVDEAIKKLIHKRIQELGGFVKGTIPANTFFIVDENGIKQPQIFLPNKNGAPVPILKIRMKENIGGAEKLKENVNQWGNPRNNHHVLIYKDEKGNLKEDVVTFWTVVERKRTGETAYQLPADGKEIVTTLHINDMFLLGINEDEINWEKPDYEVLKEHLYRVQKLSSKFYEFRQSSQASIQNNFQPFYIRIQSFGEGKTGWDTFNPIKVKISVSGKITKM

SEQ ID NO: 10451 - protein, 1521 aa, unidentified
  REGION 1..1521: note = Description of Unknown: Cas Enzyme sequence
MKKILGLDLGTNSIGWALTNNDFDNKLGNIEGLGSRIIPMSQDVIGKFDSGVSISQTAERTKYRGTRRLVQRFLLRRERLHRVLNILDFLPEHYSDAIDFDKKFGQFQPEREEKLSFYKNKSGKNQFLFLESHQEMLSEFKSTHPDLKQVPYDWTIYYLRKKALTQKISKEELTWIILNFNQKRGYYQLRGEEEEVNKNKLEEFHTLTVVEVIEREKGKSGIWYNVILDNGWIYKRESKIALFDWVGKQKNFIVTTELNDDGTIKLNKDNEEKRSFRSPKEDDWGLVKIRTEQTINQSEKSVGSFIYDELLKNPSQKIKGELVRTIERKYYRDELSKILKTQIEFHSAILTDRNLYKKCIDELYKHNDSHKNNIKDRSFEYLFLDDIIFYQRPLKSKTSLISDCSLEFVPIKNKKGVLVKDANGKQIVKPLKCIAKSNPIFQEFRLLQFVKNLKIYKKEIANDIDVTNDYLKTEEDVLELFHWLNDKAEISQKQFLAYPKFKLKEDKFRWNFVEDKIYPCNETRNQFLNAIAKIDVDKSFFDTKNTQDLWHILYSVTDKIEITKAITTFAKRHNLSDGFIVNFSKLKPYKSDYGSYSEKAIKKLLTLMRFGTNWEESNIDSKTLARIDKIQTGEFDENIRTRVREKAINLSAISDFQGLPLWLASYIIYDRHSEASDISKWKTPADIEHFLKHDFKQHSLRNPIVEQVITETLRVVKDIWQHYGEGKENFFNEIHIELGREMKNDKATRERMTKKIAENENTNLRIKAILTELKNDGIAAIRPYSPSQQEILKIYEEGVYSSEIRKENLEDIDKIRKNAKPTSSEITKYKLWLEQGYISPYTGKLIPLSDLFTTKYQIEHIIPQSRLFDDSLSNKVICESEVNELKGNMTAMEFIIKKGTTIVTLTGGKSVEIFTKEAYNQHITAYYSKNKNKQKRLLTEEIPEQFIERQLNDTKYISKIVKNLLSKIVREDDEQEVTSKHVVSLNGSITSKMKQDWGLNDVWNNIVTPRFERLNAITNSSDFGKIELKVDEFGNRGKQVFQTTVPDAIAKGFTKKRIDHRHHALDALVIACVTKDHVNYLNSINSERTNYSLVSKLRRTEEVQINGKTQNIAKEFHKPWDNFTKKVEDELNQTIISFKQNTRVINKTVNKYQVWKEDDDTMKKVTVKQTKGDNWAIRKPMHAETVSGKVFLKRIKQSHITIANAIEQIEFIVDKEVKKQLTAKIKQYPNNPEGLKKHLKAFPVMIDGKAIDKVQIYETVGDENGATATRKTLDITFDEKRIEKITDTGIQKILLNHINQEMYQNAIDENGKKIPAHEVAFSENGLDELNKNITALNNGKKHQPIKKVRIFEEGGKFSLGQTGNKADKYVEAAKGTNLFFAIYQDENGKRNYKTIPFNEVIERQKQGLSSALEIDENGNRLLFTLSPNDLVYVPTEDEKENLTLFNLDKLSKEQVQRVFKMVSFSGIQAFFVSNNIATSIVDKMEFSALNKMEKSIEGIMIKSLCLKLEVDRLGKIKSIIR

SEQ ID NO: 10452 - protein, 1119 aa, unidentified
  REGION 1..1119: note = Description of Unknown: Cas Enzyme sequence
LTKAEVAFVISDLNGTISNSSGYLGAISDRSKELFFNKQTVGQYLMAQLDQNPNNSLTNKVFYRQDYLDEFNTLWEKQAQYHKELTKDLKLEIRDVVIFYQRRLKSQKGLVSFCEFESRKIEVKIEGKKKLKTIGLKVCPKSSPLFQEFKIWQILNNIQVNDKSNGEKRFLTQEEKEILFNEVNFKEKLSKDEALKLLYENYRKFDLNYKDIEGNRTQAALFKAYQNIIDLSGHGEYDFSKMPSKEVLDIVESVFKGLGYNTNILKFDSGLSGKAFEGQEVYKLWHLLYSFEGDDSKTGNEKLVNKISELYGFDQHYASILSNVTFQSDYGSLSAKAIRKILPYLKEGTEFSLACEYAGYRHSKSSLTKEELDNKVLKDKLDILPKNSLRNPVVEKILNQMINVVNASIDAYGKPDEIRIELARELKKSAKEREELTNSISKTTIEHEKYRETLKSEFGLQHVSRNDIIRYKLYLELASNGYHTLYSNTYIAPNKLFSKEFDIEHIIPQSRLFDDSFSNKTIESRNVNIEKGNETAYDYVLSVLNETGLAKYLQTIEELQKAGKISKTKYNKLRMKGTEIPEGFIERDIRDTQYIAKMAKTILEELVKEVISTSGSITDRLRQDWQLIDVMQELNWEKYDKLGQTEFIENREGHKIKRIKDWTKRNDHRHHAMDALTIAFTKRSHIQYLNNLNARSDKSGSIYGIETKELYRDDKGKLKFKAPIPVNEFRAEAKMHLENTLVSIKAKNKVATININTTDKKDGVNKKIQLTPRGQLHLETVYGSQQQYITKEEKVGASFSEEQILKVAKKSYREALLKRLKDFENDPKKAFTGKNSLEKNPIWLDASHTSHVPEKVKTVATETIYTIRKEISPDLKIEKVIDRKIRKILESRLKEFNDDSKKAFSNLNENPIWLNKELGIPIKRVTITGISNAEALHDKKDKEGKLILDKRGNTQAVDFVNTGNNHHIAIYRDISGALQENVVTFFEATARISLGQPIIDKDYKKDDGWQFLFSMKQNEYFVFPNEQTGFNPNEIDLLNADNYILVSPNLFRVQKFSKVIYGNTAVRDYVFRHHLETKIEDNKELKDVTYKSIKSLQYFNSIVKVRLNHVGQIVSVGEY

SEQ ID NO: 10453 - protein, 1032 aa, unidentified
  REGION 1..1032: note = Description of Unknown: Cas Enzyme sequence
MKTTNRKENIKQECFVFGLDIGIASVGWAVVTANRIVDLGVRRFNAAENENGKSLNLERRMARLSRNRFLHRSDRLARLSQAMEIEGLISGSDFFKKQPKFSESTWKLRVAGLDRLLTSTELARVIYHLCKHRGFHWASKADAVNAKGESGKIKKSLTHTQFLMSDRGYKTAAEMILAEFPTAQRNKRGNYDKAISRIILDNELAKLFEEQRHFGSEYANTSLELLIRGNGDQKSGIFWDQKPALTGVNLLQMIGKCTFEKTEYRAPKASFTAERHVWLTKLNNLRIIVNGESRPLSEPERQAVFLLPYQSGEKFTYKTFRSAAIKTGLFPDSFCFGDKYPENQTLIKLSAWHELRTVMNRLDLGDVWQQISVAALDGQPETLDQIAWILSVYKEDDEAKFELEKLNLPKSIQTIDALLNIRFDKFHALSLKALRNIVPLMERGLRYDQAVASIPQYGHQNQQTTLENSKNKYLSPFYSGCDKNGKMLFKENIDVPRNPVVLRALNQARKVVNALIKTYGSPVAVNIEMARDLSRPFDERKDVEKLQKEYKKRNDEAREEFERLFFRKPNGKDFEKWMLYLEQGGQCVYSQTPLAPTGDLNEIFLDGCTQIDHAIPYSRSFDNNKNNKVLVLTRENQNKGNRTPYEYLTSFAGGEDGDRWRSFAAWVNQNKSYRMAKRNRLLKKDYGEKESVGFRDRNLYDTRYICRFFKNYVEENLLLASRDDGEVNKRCVVVNGQLTSFSRARWGLTKNRSESDRHHALDAVVVAVCSHSMVKALSDYSRRKEIQFLRNGIPDPETGEIISQLAHDHLSRHFPEPWSQFRHELDARLKTDDLTALREDMACLGSYSDLDLQNLRTVFVSCAPQRLNTGSAHTDTILAKPRIGHNLRVKDKTDNSIRLAVKSELNNLSVKKIYVFETTSFGKKYSLDQYCLDKIVGDKRDTRMIEALKLWIIERGDDPKKPGTTAFPKKPCKEDPKNGPFTGPEIKSIKINNGVTTSIEVRNGLVGNDKMIRVDVFTKAGKFHLVPVYVHH

SEQ ID NO: 10454 - protein, 1569 aa, unidentified
  REGION 1..1569: note = Description of Unknown: Cas Enzyme sequence
MKKILGLDLGTNSIGWALLQEDDNEVITSIIDSGSRIIDSDLASNFEKGKPASATAERRKARSARRLLQRKRMRRERLIRTLKLLGWIPTDYEATDGNKIKVPENILNSRIKEMKDFFGKSDSEKINEDLIVYFLKYKGLSEQLCKEELAMILYHYAMKRGFKSSRKEQQKTDEQPEETEENNTDTVETKFVTIQSIVNDGTPAKNESNITPFLMTLSDGTTGRFYTKDKPNWEGKEIELNIIRKNQKKGVFTMFTLPKKTEIKIGKFLKITETQTQKNYKVFECNFQLQDGLILTGNLFKKAKPEWENIDMEIEIKTETNKDGEHKFSFKQVVNNEENSTKRREALEQYLEANNLHVSESFLLKMKENFAFRIKDNLVYRKRYKSELEAIWNKQIELNPNLLNIDSQLIEKIALDLYKSNKERQYALKKKGLFYILAEDIIYYQRPLKSQIHGIAECRFEKKYIETKDKGKIAIPCKVIPVSAPLYQEFRIWQFINNLKIDNSFKKDCTEMLLTKEAKQLLFEKLDTTKEIKDPKLIIKALNLKPTEYSINFRPGQKITGNATKASIRNALKNYNFEMLADNDDLLNKIWHILYSVVEDEHVKKSLVKLLKNHPFVAGNFKIADDILLKIADKLKNITYKNEYGSMSAMAIKKILPLMRAGKYFDHTKINPSVVERIADIRDGVADSKILEATRKEIINQRLDKIQDFQGLQYWLASSIVYGSHSENLDIKPYKHWQRIKPLKHNSLRNPVVEQILNEMLQLVKAIWKLHGRPDDIRVELARELKNSAAERSSINSAITKSMVDNDNIVAMMKELGLGRHDSLNDIEKLKLWKETASNETIKECDEFFRKPSKSLFDKYKLWLEAKFVSPYTGQPIPLSKLFSNEYQIEHIIPKTRFFDDSMMNKTICESEINKEKGALTAYEYIKAGSAKFKLLSLENFEKHIQNTFKRGKANLRFLAKEIPEDFVERQKKDTQYIAKKAVELLSKVAKNKVSTTSGGITDFLRQQWGVGDVIKNIVKERFLALEEKYKDRGVKFVEEVVEENGKRKTIIKEYSKRLDHRHHALDAIVIAATSTAYINNINKLHTNFQDLIKNLKSNPKFQDFINKYKINFNQSFHLILADLQQYPEFSELMKQHTASLYKPALPCKNFNVMVVNAIENIVVSFKNRTRIVSKTINHYKYKAFGKNKQKAGTFVIRKALHKQTIYGERHVNHYKMELATEAIKHIDKIADKNTKIALQELLAKMNNNVEFATKELKKNPVNTDNKVVVREISSSMASSRKSLIASGPSDKGMGRKELYKMIDREMANQLLMHLINCIDDEKKQEWERFKPLLNNKINIDFILERERPYNELTTEIKLELSECMKWIDKNTNPKEAFSAEEIEKFNANRKIPVHKVTVIEDMGEKYALGDKPNLVHKFVETAKGANLYFVIYVNIENPQKRLYESINYYQAVQAAVAGNSYIETKPGYKYFTLSPNDLVYVPDVDEDVVNTNFSDIKSIAKKIYKMVSYTGKRSFFIPYNISKPIENDFVKEFGSIGKIELLNNGKSIKDCCIKLNIDRLGKISPLFV

SEQ ID NO: 10455 - protein, 1424 aa, unidentified
  REGION 1..1424: note = Description of Unknown: Cas Enzyme sequence
MKRILGLDLGTTSIGWAYVIEGEKQSESEIKQIGVRVNPLTVDEQTDFEKGKPLSTNADRTLKRGARRTLDRYQLRRENLIDALTKANIINTDTKLNEDGKQTTFQTWELRAKAAKERIELNEFARVLLAINKKRGYKSSRKAKNEDEGQAIDGMGIAKKLYDENQTPGQFAFHTMLGGKKAIPDFYRSDLQNEFDKVWNFQKQFYPEILTDEFYKELKGKGHRATSATFWTKYKFNTADIKGIEDNLKNVHTIKYDARTQKKLQCYKWRNDAVSKQLDKEQVAYVLTEINNNLNNSSGYLGAISDRSKELYFNQLTVGEYCYNQLLKNRHTSLRNQVFYRQDYMDEFEKIWTTQAQFHPELTEKLKEEIRDIVIFYQRKLKSQKSLISFCEFESREVEVNGKKKTVGMRVAPKSSPLFQEFKIWQNLNNVLIKKAGSKKRTVKQDNQTLLFEEEKEIFVLNLDTKQLLFDELNIKGNLTSKSIIELSGYKPKDWQINYNQLEGNRTNQALYNAYLKILEIEGYNEDLFKLSDSDEINVKDLKTPATEIKDMVKSIFDVLGINTAILEFNAELEGNDFENQASYQLWHLLYSAEDDTKKYSEEDKMLYGNENIGLKKQLCSKFGFKPEHAKILANITFQDDYGSLSTKAMRKIITHLMQGFSYGGRKEKPNELSACEHAGYRHSKHSLTKDEIETRELKLKLEALKKNSLRNPVVEKILNQMVNVVNTLIDKENKELQEQGKEPNFHFDEIRIELARELKKNAAERAELTTNINAAKIAHEKIYKLLQTEFGLKNPTRNDIIRYKLYEELKSNGYKDLYTNEYIPREILFSKQIDIEHIIPQSKMFDDSFSNKTIVYRKINLEKADKTAFDYIENKYGEESLNAFQQRVENLYEFGKKNKEDGISKAKYQKLLKSESEIGNGFIDRDLRDSQYIAKKAKEMLFEITRAVVSTSGQITDRLREDWGIINVMKELNLPKYRALGLTEMEERKFGQQIEVIKDWTKRNDHRHHAMDALTVAFTKHNHIQYLNYLNARKNDKHKLHNNIIGIEAIETEVKIDDNGDKKRVFKEPIPNFRQIAKEHLENVIISHKAKNKVVTKNKNKISGKEKPQEALTPRGQLHKETVYGKYHYYEQKEEKVGAKFDKATIEKVANPLYSKLLLQQLETNGNDPKKAFTGKNGLDKNPIYLNDEKSEKLPEKVKLVWFEEDYSIRKEVTPENFKDQKSIDKIIDRGIRKIIENRLKEFGGDAKKAFSDKEKNPIWLNKEKGISIKQVTISGVKNAEALHYKKDHFGNPILDKEGNKIPVDFVSTGNNHHVAIYRDENGNLQEKVVSLFEAVTRVNLGLPVIDKTFNQEQGWQFLFTMKQNELFVFPNEKTGFNPAEIDLLDPKNKKEISPNLFRVQKATNGDYWFRHHLETTVEDKKE

SEQ ID NO: 10456 - protein, 1346 aa, unidentified
  REGION 1..1346: note = Description of Unknown: Cas Enzyme sequence
MKKILGLDLGTTSIGWSFIKESEGENEVSSIVNTGVRIVPLTTDEETDFKKGNTISINADRTLKRGARRGLQRFKQRRDSILEIFTKIKFISTNFIYAETGSATTFSSYQLRAKAATEAITKEELVQVLLMLNKKRGYKSSRKAKTAEEGDSIDGMKIAKEIFDNNLTPGQWVYNSLSKGGKFIPDFYRSDLQKELEKIVRFQNQFHPEQMNDKLLEDIQGKARTVTSQYFSKTLNIPLAENKGTREETKLQHYKWRNDGLTNEHDLKILAFIITEINNQINQASGYLGAISDRSKELYFNKETVGQFQYKQLAKNAHTKLKNQVFYRQDYLDEFEKIWETQSKFHPELSDKLKSEVRDITIFYQRKLKSQKHLISFCEFEKGHKAIPKSSPLFQEFRIWQNINNIEFKKDKIVYPVGEELKQIISQDLLFKESMTDAQFIKFIIDQCKLEKGNYSINFKKIEGNRTNTAIFKAFEKILEIEGYEMDFSTMKHIEIIEAVTPIFETLNINTNILDFDPTITGNDFDKQLYYQLWHLLYSSEEDEPLKKSLMTKFGFKENHLPFLLNINLQADYGSLSAKAIKKILPHLMDGHIYDKACLMAGYNHSSSLTTEQNNDRVLKDTLELLKKNSLRNPVVEKILNQMINVINAIMKDSTMGKPDEIRVELARELKNNNEQRSDMTKAINKSTAEHEQIRKLLHTEFGIHRVTRNDIIRYKLWKEADGFSIYTGNPIEPSKLFSKEYDIEHIIPKSRLFDDSFSNKTICERQLNIDKSNKTAFSFLKEKLSPEEFDQFEKRVRGLFGKISRTKQNKLLMADNEIPEGFIDRQLRETQYIAKKAKEILLEVSRNVTATIGSVTDKLREDWELVDVMKELNWEKYDKLGLTHIEEGKNGERLYKIKDWTKRNDHRHHAMDAITVAFTKPAYIQYLNNLNAKTQGNQKANSIIGIETKYLKRDKNNKLRFIEPMPNFREEAKKQLESILISYKAKNKVVTLNKNSTKKSGGTNHKIQLTPRGQLHKETVYGKQQRYETKEESVSAKFTEEYIAKVAKKEYRVALLKRLQQNGNDSKKAFTGKNALSKMPIYISLKDNILVPEKVKIVWFEDDYTIRKDITPDLKIDKVIDVGLKTILQNRLTEFGGDAKKAFVNLDENPIWQNKEKGIAIKRVTISGVSNAQALHTKKDHFGNEILDENGKPIPVDFVSTGNNHHVAIYRDEKGNLQEEVVSFYDAVVRRNLGFSVINKNHEMGWDFLFSMKQNEFFIFPSESFNPHEMDLLNPDNYHLISPNMFRVQKFTIRDYFFRHHLETSVEDKKELKDISFKRLGLNGINNIIKVRINHLGQIVQLGEY

SEQ ID NO: 10457 - protein, 1348 aa, unidentified
  REGION 1..1348: note = Description of Unknown: Cas Enzyme sequence
MKKILGLDLGTTSIGWSFIKESEGENEVSSIVNTGVRIVPLTTDEETDFKKGNTISINADRTLKRGARRGLQRFKQRRDSILEIFTKIKFISTNFIYAETGSATTFSSYQLRAKAATEAITKEELVQVLLMLNKKRGYKSSRKAKTAEEGDSIDGMKIAKEIFDNNLTPGQWVYNSLSKGGKFIPDFYRSDLQKELEKIVRFQNQFHPEQMNDKLLEDIQGKARTVTSQYFSKTLNIPLAENKGTREETKLQHYKWRNDGLTNEHDLKILAFIITEINNQINQASGYLGAISDRSKELYFNKETVGQFQYKQLAKNAHTKLKNQVFYRQDYLDEFEKIWETQSKFHPELSDKLKSEVRDITIFYQRKLKSQKHLISFCEFEKGHKAIPKSSPLFQEFRIWQNINNIEFKKDKIVYPVGEELKQIISQDLLFKESMTDAQFIKFIIDQCKLEKGNYSINFKKIEGNRTNTAIFKAFEKILEIEGYEMDFSTMKHIEIIEAVTPIFETLNINTNILDFDPTITGNDFDKQLYYQLWHLLYSSEEDEPLKKSLMTKFGFKENHLPFLLNINLQADYGSLSAKAIKKILPHLMDGHIYDKACLMAGYNHSSSLTTEQNNDRVLKDTLELLKKNSLRNPVVEKILNQMINVINAIMKDSTMGKPDEIRVELARELKNNNEQRSDMTKAINKSTAEHEQIRKLLHTEFGIHRVTRNDIIRYKLWKEADGFSIYTGNPIEPSKLFSKEYDIEHIIPKSRLFDDSFSNKTICERQLNIDKSNKTAFSFLKEKLSPEEFDQFEKRVRGLFGKISRTKQNKLLMADNEIPEGFIDRQLRETQYIAKKAKEILLEVSRNVTATIGSVTDKLREDWELVDVMKELNWEKYDKLGLTQIEEGKNGERLYKIKDWTKRNDHRHHAMDAITVAFTKPAYIQYLNNLNAKTQGEKKAGAIYGIETKYLERDKTGKLRFIAPMENFREEAKKQLESILISYKAKNKVVTKNKNITKIKGGWSAPKTQLTPRGQLHKETIYGKLQQYATKEEKVGVNFTEEYTQKVAKKEYRVALLKRLHQNGNDPKKAFTGKNALNKMPVYISLKDNIVVPEKVKIVWFEDDYTIRKDITPDLKIDKVIDVGLKTILQNRLAEYGNDPKKAFVNLDENPIWQNKEKGIAIKRVTISGVSNAQSLHTKKDHFGNEMLDKNGKPIPVDFISTGNNHHVAIYKDEKGNLQEEVVSFYDAVVRRNLGFPVINKNHEKGWEFLFSMKQNEFFIFPSESFNLDEIDLLNANNYHLISANIFRVQKLGTKDYTFRHHLETQLVDNNELNNIAYKRIRSPKELSTIVKVRINHLGQIVQQGEY

SEQ ID NO: 10458 - protein, 1105 aa, unidentified
  REGION 1..1105: note = Description of Unknown: Cas Enzyme sequence
MKKDIGPYKLSLDLGSTSVGWAVLKIQEHEANSQHKGGNHEVLALEALGVRIYDDGRDAKTKEPLAVSRRTARGARRNRDRKKKRVSRLLNTLVEQDLFPSNPDEQKELQNKNPYEIRDRALKETVSPHEMGRGLLHIAQRRGFKSNRKTDSKDNESTPLKEAIAKLDKNMMAEGASTLGQYLHNLKEGQPKRIRKTRNTQSQESEQKKNNKEEYSFFTSRDMYEREVDALLKSQERFSSHDKSRAYANAKDIIFHQRNLRPVEVGFCTFEYETKERRAPLALPVVQEFRIYQELANLDFRTYKKDELHLTKEQKNIIAQELFKKNKVSFKNMRKVLKIDGDLPFNLESDNRKELDGHHTHVLLAHEKAFGKEWYNFSGEDQQRIVLRILEEENEDILVSEFQAEFALEEEKARHIANLSLKDGYGRLSEKAIRKILPHLKEGCVYSEACKRAGYDHHSDFRTGEIKEQLPYYGEALPHRVIGGKPTSENEQFPEKFYGKINNPTVHIVLNQIRKLVNACIDEWGHPDAISIELARDLKEHPSELNKTNAKNKRDNERIDSELSKLGVSQPKRDDRLRFKLWEETSSEPSSRCCPFSGKTIGFHEILSPAFEIEHLVPYSVCYDDGKGNKVLACKQANQFKGNKTPHEAFSHSPPGYKWNEILARVDAFKSNFKKSRFMEDARERFANQDDVIARQLNDTRYLSRMAKEYLQFICDPDKITPIPGQLTAMMRQKWGLEGEGIWGKREDGTEIVKNRDDHRHHALDAFVVGCTTRSILQKVATEANNIENNPARREQRKKLVDKMPDPYPGFLQNVKDHFSKMIISHKPDIGSARKATQKGTTISQLHEETAYGLITRPDTNEKVYVVRKAVEDLEKKDIEKIVDENIRSELQYALHGAEGKEVKEIIRECLGNRKTKKGEKAPPIHRLRMIGKTEEQGKSLVPIKDKSGKTYKYYQGGNNAYTEIFVSEEKDVKDPETGKVLYKKGQWYAETVRQYEAHQEKEARKWISQAPMAKKIMRLHKNDMVAYEKDGKTIIARVKENSGEKVRLIPHKVAREEKRYEKTWEASAKQMQRKNLRKIRVDILGRVYDPGPYPYKKKTSEESS

SEQ ID NO: 10459 - protein, 1216 aa, unidentified
  REGION 1..1216: note = Description of Unknown: Cas Enzyme sequence
MEKRLGIDMGTNSLGWALVEVTDEGCLLLDKGVNIFQEGVARDKSSEKPAVQDRTDARALRRHYFRRRLRKIELLRVLVRHDLCPYLSPEQLREWKNKGVYPVTEEFIRWQRTDDNTDKNPYRDRFRALTEELDLGNRADRHTLGRALYHLCQRRGFLSNRKDAGNEAEDGKVKQEINTLSADMSAAGCTYLGEYFYRLYQNKEKIRKHYTSRNEHYLSEFRAVCRKQHLDEELEQALERAIFYQRPLNSQKGTVGKCTYEKGKSRCPMSHPRFEEYRMLQYINNVRVMGPGDAELRPLSWEEVEKIRPLFLRKSKPHFDFDDIAKKIAGKGNYACKGELLQAPYRFNYAEKATVMGCPVSALFASVFGTDWLKELCSLYTLGAGKSEEQILNDVWHALFEFEDEARLQAWLQEKLQLSADDAKTLAAFRLPQGYASLSLNAVNKILPYLRRGYRYDESVFFANLGKVLPAEVYADPTRRREAEQGITAQMDDLGQEEKARKGERVRDYLRRYWGVGDTRLELLYHPSKDESYPAAHADENGILKLGSPRISAVRNPMAMRALFRLRALLNELLREGKIDRGTKINIEFARELNDANKRKAIARYQREREAENRTYAEEIRRQYAEATGRVIEPSEEDILKYRLWEEQGHRSLYTGNPIPISDFLGDGRKYDIDHTVPRSREGADAQYNKTLCEEKFNREVKRDKLPSELANHSEILGVVEACGWFERIEGLERRVWGADRRAKGAPTKSAKDFAIQDRHYWRMHLDYWRGKCEAFTMAEVPEGFRNRQGVDVGIIGKYAKRYLETVFDRVFPVKGAATAAFRKMWGLQEEYTEKERVNHVHHCVDAITIACIGRREYDRWARFNRGEELYRWGEADKPHCEKPWPTFTEDVRAVTEELLVSHHTPDNMPKQSRKKLRVRGKVRRNDNGEELYCQGDTARGALHQETFYGAIRREDEIRYVVRKSLGQLLPADVDKIVDDTVRWKVQEAIDTYGFKLAMDTTKHTIWMNEEKGVPIRKVRIFAGKMMSPQPLGGKTHRDASLYPYKRPVYVSLGSNYCMALYEGTDAGGKLKRTYEIISSLKAAQYFKKSADKRDGMLVPQSDGNGYPLRCILKAGTMVLFYESSPEELRYCTRAELAARLYKLTKFSTQQSKYGVLVFRHHQEARPVGELQEKGGPWKRGEAYRPLIKMLHTGFQAYVEGYDFDLTVTGEIRFKH

SEQ ID NO: 10460 - protein, 1354 aa, unidentified
  REGION 1..1354: note = Description of Unknown: Cas Enzyme sequence
MEKNKKEEYYLGLDIGTGSIGWAVTDKNYEIIKKHGKALWGIRLFESANTAEERRNFRSARRRTERNKNRIALLQEIFAEEISKKDPGFFQRMKESRYYPEDKRDQNGNALELPYALFADIGFTDADFYKKFPTIYHLRYALIKQPEAKPDIRLIYLAIHHIIKHRGHFLFEGKKMSEVTDFSNAVQILAECAEANNIILSLDDNKIQSMEEILKRRDKNRTEKKKQLCDLIADNDKQKKALAGLLAGCQIKLSELFADKSLEEEEQNKLSFSDSKYEDNISQIESFLADRFLLMVAAKAIYDWSVLSDILGTATYLSEAKMEIYNKHKLDLDKLKNLLKTDSSVYHRVFGIPETEKETNYSAYIGMVKKNGKKQSIKNCPNKEEFYSFLRKILNNFSCPEEDKQIVDELLAEIDNGTLFPKQSIRDNGVIPYQLHERELIKILENAASYYPFLMNKDSNGYTQIEKIRSIFRFRIPYYVGPINTYHQDQGGNSWAVRKDALGKVYPWNFTEKIDEELSAEKFIRRMTNKCTYLIGEDVLPKESLLYAKFCVLNELNNLRIDGELAPVWVKQKIYTDVFQYNRNVTGKKLKNYMIKEGIITKEQELSGFDQNFKSSLKAYHDIKQIAGEIPLSKIEQEDIIKDITLFADSQKMLKRRLKQKYPILSDKQISQLAEKKYKGWGRLSRTFLEDLESVNVETGELYNIITALWETNDNLMQLLSKKYQFSDEIEKRNSQFTSKSEITYEDIQELYVSPAVKRPIWQTFKIVRELEQIMGCAPVRIFVEMAREPGQKGERKISRKAKLQDLYRNCKKEAPELYNTLSQKNDNELRSDKLYLYYTQMGRCMYSNEVIDLEDLFTNRYDIDHIYPQSKVMDDSLDNRVLVKRELNSNKTDVFPVPIDYVNTSKGLWTALLQKNLITKEKYHRLTRREPLNEGELAGFIARQLVETRQSTKAVTQLLKKNYPDTEIIYAKAKAISNFRLKFDLIKVRDINDYHHAKDAYLNIVVGNAYYVKFTKDAAWFVKNNPGRTYNLKKMFEQDTIKRGSEVAWVPGENGTITTIKKWMHKNNILFTRKSYNGKGKLFDQQLLKKGKGQVPIKTEKRDTRLTSIEKYGGYNSASGAYFILVESEDKKGNLIQSIKHVPIYLSKKLESSPEYMLQYCRDEFGLKNPKILLANIKIDTLLDIDGFQAHLSGRSGKQLILKNANQFVIQNNIAAAIKKVIQFCTDYKINKNAVISDKMDLSEEDLQNIYQEFQHKLENTIYGKHLTEQIKTLENGKEKFKLLTKEEKCLVLYEILHLFQCQSTTANLSLIGGPKSAGIIRLNNNISKLNHICIIHQSITGFYEQVIDLKAL

SEQ ID NO: 10461 - protein, 928 aa, unidentified
  REGION 1..928: note = Description of Unknown: Cas Enzyme sequence
MEKAGCRYLGEYFYKLYGEHKKIRTTYTDRLAHTEKEFYAICKKQGLSDEEILKLHKAIFYQRPLKSQKGLVGKCVFEPSKNRCPLSHPLFEEFRMWAFINNIKIKESADCEFRPLSEKETDEILPLFYRKSKPTFPFEDIAKKIAGKGKYAYKDDKRDAAYKFNFRMATVVSGCPVITGLKDIFGEDYRRNIAECYDKADGKNLEEILNDIWHVLYFFDRDDKMEQWAVSHLQLNEEDAEKLTKIKVPQGYASLSLCAIKKILPFLKAGMRYDEAVFVANLDKVLPDNIRNNPEARKDVILSVCDTVANFAENPLNKTITKEQAVKGILEDIPDIDFGKLDLLYHPSRTEVYPEATMNSKGELRLGSPRTSSIRNPMAMRALFRLRHLINQLLEERKIDRTTTINIELARELNDANMRKAIERYQREKEKINKESIEKIKKLYQEATGNEIEPTDDEILKFRLWEEQEHICLYTGEQISITEFIGVNPKYDIEHTVPRSLGGDSAQTNLTLCNSVYNRQIKRSFLPSQLSDHETILQRIETLGWDKEIERLANEIARLKTSMASTKDAKDSIIQKRHYLKMHLNFWRDKVRGFKLTEVPEGFSRRQGVDTGIIGKYAREYLRTLFRSEDRQIFLVKGSTTAEFRKLWGLQDEYAKKERINHCHHTIDAIVVACIGRSEYQRWAKYHTERENYELGSGSKPDFRKPWPTFTEDLKSLDEKILVSHNVSYSTFNQTKKRLKRRGKIIRNSKGDPVYEKGDSVRGALHQETYYGAINREGTIKYVLRRSLSDLAEKDIKNIVDPAVREKVELAVKERGFKNLLSEPVWMNREKGIEIKKVRIFTPSVTNPIHLKPLRDESRHPYKRFVNVANDSNYCLCIYEGNITGKKTKRSFELINLLEAARRHKSGDDLYPLSDKDGLPLKWKLRVG

SEQ ID NO: 10462 - protein, 1297 aa, unidentified
  REGION 1..1297: note = Description of Unknown: Cas Enzyme sequence
  MOD_RES 1271..1274: note = Any amino acid
MNKNIEHTEGNYIMGITVGTSSTGYAVINDDNEILKPVHNKYGIGARIFRTRDKAEDRRNFRSARRMLNHKKSRLKYFDDIMRPEITKIDPQFFNRLKNSYVAKGDKTREKYESILFPTKEEERAYYQQYPTVYHLQQALLTEHRQFDIREIYIALYALLKNRGHFLLETPVKNFKAETVDTETVLKDLEENLNQIGFNIKFDLNKAADINQVLDEPMLKKEKIKYLRTLLFVKSNKDKDTDKQNKAVVTQVINALLDYKVKFNVLLNIDVDDPKEWSFNLGNSEIDIKMDMLKTKLGTTELKIVTTLTNWYNALLLRETLGEASTIAEAKVNSYKQHLEDRELFNRYISKLSQILPDDETVTQQLRDNYRLYINNRSGNIGKARKRLKTTSLTKEEFYKNLKQIISKQKELPEGREIIAKIELDNFMPKQRVRENTVIPHQLIALELNKILENQGKYYPFLIKENPSADKSNLADSPYEISQLVNFKIPYYIGPLDTPEDQKKKGIPENQRFSWLVRKEEGTITPWNFAQKVDIEKTADAFIKRMIGQDTYLFDQPVMPANSLIYQKFTVLDELNKIKVNNKKLSVSEKQWIYNELFKKYKTVSVKRLKQAFAKRGHEVYSVTGLSDPKKFNNQLSTYLDFKKILGDLMDDKSKRLDIEKIVEWSTVFEDSKIYALKLKEIEWLSEDQREALAKIRLSGWGKVSRKLLTELIPSNGNSILSTMWNTKLTFIQIISKPAFKALIEEENMNASAFATPQDLIEKAYISPDNKKAVNEVLNVVKDIVTKQGAVPKVIALKYNRNPQNESQLMLNRQKKLIKLYDSISDKNIITTLLRKQLVDSTDKKLMDKKTYLYFKQAGRDGLTGQPLDLNDLNQTSIIHILPPSLISDDSFNNIMLVKNSTVPKKGMDGAAFRFGNLKVQDLHMSVRDMWNRYKELGLIPNKQFDNLLTDPDNMDPYNKLIYTNRQLTNNNVVIKLLATILHSIYPDTTLILIKNEYVRQLRYNFDLYKLKNLNDFYHGMDAYLTAFTANYFSKVYPSLKRYFVFGEYLRDSPKEKNALKSDKELDNLKDIKHFNFLWRLLYGKDEEIISTSNVPVFKKRDLIEKLNTAYNLTRHNISQESTIKNGPIFDATRYPILERDTAKTRTLFPFKKNMDTTLYGGFSSSKNSYLCLIELIYKNGSNAYKLVGVPQRYADILKNSKQDKNLKLYSLLKNSIISSKVKDFRILKSPVRLNQVVIENGQRFLVSSPQYLNSLYQFDVSQSSKKVLAXXXXIQTSIFIKKQKIIVMIQLKYQNG

SEQ ID NO: 10463 - protein, 1363 aa, unidentified
  REGION 1..1363: note = Description of Unknown: Cas Enzyme sequence
MKKTREDYYLGVDIGTNSVGWAVTDENYRLVRFNGKTMWGSRLFDEAQTAEKRRLSRTLRRRLQRRRWRIELLQELFSEEICKVDPGFFQRLKDSTFLPEDKHSHQTNTLFYDTNYTDVEFHREYPTIYHLRKELIQNEEKKDIRLVYLAIHHIIKHRGHFLFSGTIENATSFECAFDKMSQCIRDEFEIELNCNIKMDQRKMDDLKKIIQDKKLSKRDKASQFLEYLQYGDKEKQKQLKAIVSLICGSKCKLADIFSDETLKDAERSSISFSESSFDEIRPELEDLLQERCGVLDILKGVYDWSILADILEGGEHNGNSYLSFAKVHIYKKHQKDLFELKKLIRTYADDQYQSFFQKADSSSSKNYCNYIGSTRRNGKRHSVKKCTYEELTKTIKNIFTNIQHADAQNTIEKIKMELDAGTYLPLQVSKDNSVIPYQVHDIELKKILENAKKHYTFLNKKDEQGITISEKIIQLFEFRIPYYVGPLNTSVGTNSWMVRKKDGPIRPWNFDEIVDESQSAEKFIRRMTNKCTYLIGKDVLPKHSLLYSEFMVWNELNNLKIENKPLDVEIKIKLFNDLFLKQKQVTPKKILEFLKCEGYRVEQKDISGIDQRFKSSLGSYLEMKKIFGDEIRKQSMREIAEDLILWITLYGEAPKMLKKIIRSKYETTQISDKQMERICKLKYQGWGRLSKEFLDGLEGTFTKTGEIFSIISALRNTNDNLMQLLSSNYTFTEEIEKLNHKATPKLTNFSYETIMADLVASPAIKRAAWQVLLIAEEVKKIMGRQPKKIFIEMARGPKEKRPTDSRQKKLLQLYAKIKDESRDWKKELEDRQESEFRSIKLYLYYTQMGKCMYSGESIDLSRLADTSVYDRDHIYPQSKTKDDSIDNLVLVKRDINEKKSNHMLSPAIQDKMKEFWHYLEDQGLISKEKYRRLTRKFPLTDEELAGFINRQLVETRQSSKVVAELFQRLYNDSDVVYVKAKAVSDFRNEILKVKKCRSLNDYHHAKDAYLNIVVGNVYHEKFTNNPLHWLKNHPSEKEKYNLNQMFNHDVIKKQVIWKCGEKGSLKMVRKQLKLRDIRYTRLATENKCGQNGGFFDSQIVSKTANASVPIKKGMDVTKYGGYKTITPAYFALVTSENKKGNIQKSIEAVPLYLKEAIEKDINIFIDYCKDTYKLKNPNILLPKIKKDTLFVVNGFPMHLRGRSNNKLVLQCGVQLFLESNYEIYLKNIEKYLLRNQSFHGKELLPITENDGITSIENLEMYDELYRKQWDTIYKYRPASQLETLKKGRDIFSQLPCEKQCYVLNEIMNLMRCKPISANLKEIQGSSRSGIITINKVIDKCFQCQIIHQSVTGLFEQEIDLLSL

SEQ ID NO: 10464 - protein, 1022 aa, unidentified
  REGION 1..1022: note = Description of Unknown: Cas Enzyme sequence
KRLKTTSLTKEEFYKNLKQIISKQIISKQKELPEGREIIAKIELDNFMPKQRVRENTVIPHQLIALELNKILENQGKYYPFLIKENPSADKSNLADSPYEISQLVNFKIPYYIGPLDTPEDQKKKGIPENQRFSWLVRKEEGTITPWNFAQKVDIEKTADAFIKRMIGQDTYLFDQPVMPANSLIYQKFTVLDELNKIKVNNKKLSVSEKQWIYNELFKKYKTVSVKRLKQAFAKRGHEVYSVTGLSDPKKFNNQLSTYLDFKKILGDLMDDKSKRLDIEKIVEWSTVFEDSKIYALKLKEIEWLSEDQREALAKIRLSGWGKVSRKLLTELIPSNGNSILSTMWNTKLTFIQIISKPAFKALIEEENMNASAFATPQDLIEKAYISPDNKKAVNEVLNVVKDIVTKQGAVPKVIALKYNRNPQNESQLMLNRQKKLIKLYDSISDKNIITTLLRKQLVDSTDKKLMDKKTYLYFKQAGRDGLTGQPLDLNDLNQTSIIHILPPSLISDDSFNNIMLVKNSTVPKKGMDGAAFRFGNLKVQDLHMSVRDMWNRYKELGLIPNKQFDNLLTDPDNMDPYNKLIYTNRQLTNNNVVIKLLATILHSIYPDTTLILIKNEYVRQLRYNFDLYKLKNLNDFYHGMDAYLTAFTANYFSKVYPSLKRYFVFGEYLRDSPKEKNALKSDKELDNLKDIKHFNFLWRLLYGKDEEIISTSNVPVFKKRDLIEKLNTAYNLTRHNISQESTIKNGPIFDATRYPILERDTAKTRTLFPFKKNMDTTLYGGFSSSKNSYLCLIELIYKNGSNAYKLVGVPQRYADILKNSKQDKNLKLYSLLKNSIISSKVKDFRILKSPVRLNQVVIENGQRFLVSSPQYLNSLYQFDVSQSSKKVLADYVEDPNFNLHKKTKDYSDDPTEISKRLKSVVEELLHILNTKVSIFDVGKTRNKITTGFMKYFDKLDISEQKNAVLQLLITLHASKRAGNLSKLHINSTVLSRNMILSSDSQLVFQSASGLTEYKVQVDKIK

SEQ ID NO: 10465 - protein, 211 aa, unidentified
  REGION 1..211: note = Description of Unknown: Cas Enzyme sequence
MILKGIKLRLYPNSFQKEQFTQMFGNDRFVWNQMLAMMNERYQNNASLSFLGKFKLNYLLKPLKNEYPFLKNSDSSSLQVVNEYLVQAWKIFFDDKTGKVGKPCFHSRKYLKSSYTGKPSIKIAGKRYLYLPKAGYIKTSKTAILKDVKIKRYTVSLAPTGKYYLSLQVEVDDPEQFRKTDKEVGIDVGVADLAVLSNGFKYDSFDASYLD

SEQ ID NO: 10466 - protein, 1017 aa, unidentified
  REGION 1..1017: note = Description of Unknown: Cas Enzyme sequence
MGQLRYRLALDLGTNSIGWCLLRLNAEDSPCAVIRAGVRIFSDGRNPKDGSSLAVTRRLARQMRRRRDRLLRRKGRLSSALIRHGFFPASEPERKALTALDPYELRASGLDRPLLPGEFARALFHINQRRGFKSNRRTDKQDNTRSALKSAIEKSRNSIVEDGCRTVGEWLARRHAQRLPVRSRYHEKRALREDGRPKIDKYYDLYIDREMVEREFDALWSAQAGFDPKRYREAARAELKDILLFQRKLRPTKPGRCTFLQDLERAPLALPTVQRFRIYQELNNLRLVDEHLGEHALTSAQRDAIAAELEERSEITFKGIARRLKLGGDVRFNLEDEKRDKLKGNATSALLAKDYFFGASWRTFSEEMQDVIVQRLVTEENGSALVSWLVTETGVDESCAERIANAVLADGYGNVSIDAARRILQQLRIAVVSYADAVQKAGFDHHSALSHFQQTGELMLDLPYYGGLLQRHVGFGTGVLTDPDEVRYGRIANPTVHVGLNQVRRVVNGLIARYGAPTEVVIEVARELKQGRERRMEIQREQAERQKQNQLWADDYRAMTGHAPTAADLQKFRLWRDLNPKDATDRRCPYTGEQISLQRLFSADVEVEHILPFSRTLDDSLNNKTVAMRRANRDKGDRTPWEAFGEGRTSGYDYDSMLARASAMPRDKAIRFAPDGYERWLRDEKDFLARALNDTAYLSRIAREYLSLVCPHNKVRVIPGRLTALLRGKFGLNDVLGKTGEKNRNDHRHHAVDAAVIGVTDQGLLQRVAKASASARAMHLDRLVDSMPVPWPTYRAHVERAVNAIVVSHRPDHNHEGRLHNDTAYGLRDDGKVSYRKMVDGTRTRVLETLNVIPMTASKAAGRHGRLADGSPKPYKGYKGDSNYGIEISTGEHGRWEGRVVSTFEANQVARTRGIAALRDPITTLDGKPLLMRLMTSDCVRFEIDGRAAIMRVAQIRRAGNVTFAEHFEANVDARNRDQDDQFVYVTKSAGSLKAARACLVSVSPIGEVRVGWRRDF

SEQ ID NO: 10467 - protein, 1062 aa, unidentified
  REGION 1..1062: note = Description of Unknown: Cas Enzyme sequence
MGIHVGLDIGIASVGWAVLDPEAQQIAGLGVRTFPKAENPKNGASLALPRRLARSSRRRLRRRRIRMQSFRELLTSTGMISPADLDAAFTPIAGDPTPYQLRAEGLDRRLSPDEWARVLSQICKRRGYRSMKLATQSSSAKDEDGVVKAAIAKNQARMADREYRTVGEMLWLDERFQGARRNKGDYKGVVSRELVLDEIRTLFEAQRALGNAYATGEIEASYVEILQWQAPILEGDALRAKVGPCSIDRLNRRIPLACPTFERFRLVDRLHNVRYTLNGSGSRINLDHEQRNAVLEKAFGKTAKLTYADVRKLCGLPADARFVGVRYGSDAENLAAETKEKLPLPRSWHEMRKALSNCPPDVWTTLSADTNLLDAVAEVLTYFKYDESIERELLALGLARCTVTGLGELRFSGNGHLSRETLLAILPHMEAGLPYSEACVAAGFHHSQRTGTARRAKVPPIPTDEMRNPVVIRALTQTRKVLNAIIDEFGPIEQLHIEFGRDVARSYDDRRKIEKTQKENRARNDSVLEDIGSQHGIANPRPLDIVKYKLWREQGGRCAYSGAYIDPKRMLSGEPGVSEVDHILPHSRSFDDGYMNKVLTTTAENRRKREQTPHEYMGGDAARWHTFEELVQSMHLPRAKRERLLRIDFDERASDEFRERNLQDTRYIARFFKNFVEENLQFAGDHKAPVVTVNGRATAYLRTAWQLQKVRADGDLHHALDAAVIAATTRSMVQAVSRFFSIRPLRNPQGLYVDAETGEIIEAKHVPEPWEGFAATLSERLSQRFGGDPYGEMIAGVSGPMPILVSRMPNRTVRGEVHKETIKRIDGEDAKGRTVTSKKVRLDDLTPKSLDAMVGRAQDRELYEALQARLTEFGGDARKAFAGPFYKPTRLGHDAPRVRSVRVYDEPSSGGTEVRGGFADNGEMVRTDVFERDGKYYLIPIYLKDTVAEALPSRAIVAHKPESQWREMGETYRFVFSLYMNDPIRLVRKNGAGAWSGYFKGTDRSSGGIQIEAHDSSWLKRGQGVALGIAAFEKYAVDPLGQSVHLVKREKRRGFSHSGDQQ

SEQ ID NO: 10468 - protein, 977 aa, unidentified
  REGION 1..977: note = Description of Unknown: Cas Enzyme sequence
MSSYTLGLDIGSNSIGWALLETAGKPSIVDMGVRVFPEGVDRDTKGLEKSKNATRREARGARKTRQRHSQRKDQLLTTLQDIGFLPTTDTELRSLFHINPYSLRKKGLDEKLERHEFGRALYHINQRRGFKSNRKSGKASEDGVVIKGATALQKEMDAKECRTIGEYFAGLNPEEQRIRKQYTFRSMYADEFDRLWAKQKEFYPDALTEELRKKIRDEIIFFQRPLKPQNERIGNCQLEPGEKRCPRGDWYARRFRLLQDVNNLMIRNPTGSESKLTSEQRKTLLDELGQKKELSYDKIRELLGLLETQQFNLEQDGKIKNLKGDAFTATMHSKKLFGPTAWKEMAEEEKIKLNEWLVELEDDALSEKLASEYKLNGEKIETALKIELPQKYMSFSRKAIVKLLPFMEQGALTNEAKEKAGYNQNKATDGKTVEKLPLPPDLRNPIVQKALFEVRKVINAIVREYGKPAKIKIEMAREVQGSSKQREEMHWKQIENKERNDKVRERLMQDMNILNPSRADITKYKLWEECGKVCPYTGRHISQEALFGKNPEFQIEHILPYDRSLDDSYMNKTLCEVHENKDVKRNQTPYETYSHDTNKHEQILERVNKSAMPYPKRKRFWQKELDLDQHIARELNDTRYICREVISYLKQLGIYVRGTRGKITHELRHQWGLDGVFDELGSKRDDDHRRHSVDAVVVGVTENEHLRKLARSKYSVKGEQFELPWPDFREEVRENVKQINVSHRVQRKVSGALHKETNYGSTKEPDKYVFRKELKGLTPAMVEDIVDPVVREIVKKHIEEKGADFWKEPVYMKTTKSSKKVPIKKVRLYNVAKNVIPIKDSSGQPYRYVEPGSNHHIEIFEYTDKKNQVKRDGKVITMFESVQRSRRGEPVIKKDYGDGKKFVCSLSINEMFMIELDGGTKELHRVQKISSNQQIFFRYHTFGGDLQKYKGISRYPNTLIGHKRVIDPLGRDLPAND

SEQ ID NO: 10469 - protein, 1025 aa, unidentified
  REGION 1..1025: note = Description of Unknown: Cas Enzyme sequence
MKKILGLDLGTNSIGWALIEIDHEKRTLKIIALGSRIIPMDGQEFSKFNAGQKIESAAGNRTKLHRARITKERYLLRRDRLHLVLNLMEALPDHYKIEIDFERNGEKCGQFKEGKEPKIAYLSTKNEEKRFAFYYEDAFNEMIADLQKANPSIANKKGSRVPKDWTIYYLRNKALEEKISLEELAWVLLSYNQKRGYEQAEIEDENQKSDEIKEMLDLKVLKVEHKTDKNGEYDEITLNDVDNFTYKEYSIKQLTFVDDIKEVVKISKLDGSGNIIGNKITYQISDLYNLTLAEIKHTEIDDKIAKHKYDFVYTNGWSNEKKSKKVNASFQKMSKEIAEGKKNANLFVVKNTYDLIGNPVALEPTIKVPDFNNEGSKDWTLLKKKTEKDAIAYNIGKGYLKEDGSAKHFISPQIYSVLIHDALTGERTKIVGGLFQTIDRKFYREELHQIIKTQRKFHSQTIDNKDIFEKSVKLLYPHNEDHAKTLLENKIAIAHLLVDDLLLYQRPLKSKKSEITNCKYEIDYWKQDVNTSTGEITEIPVFKKAVSVSHPLYQEFRIWDKIHNIKLIQLEKQNEDNESETNVDVTSLYFKTSEDYLALFDLFNNQRSVTLNNYLEFCKKRFNLNIGKADDRNYIWNYPVEEEFKGNETRKSFEIRFKRCGFTDFEKFLTQEKEIELWHYLYSVNFKERTEIGKTGKSSIQNFLSKYLKNVSVDSVVYEKLCNDFVYYPKFDSKYGTFSVKALTKLLSVMRTGDNFLLKAKGVNNWQNKIIDRANTIIEKTKQLDWNAKDVDYGKVVVIDVNQRKGELPFPKGLFNTFKDFSTINDFQFLNLTQASYLIYGRHSELAVAKFWDSPQKIREEINKELEHHSLNNPVAEKMLKETMKVVADIWEYHGNSAKKFFSEIHVEIARELQKSNEEKKEINENQKNNRTGNERLRNLLEDFLYNSPYNAKKGNQDHFERLKIIEEGARIRSNFDKKFYTEHEDKFSKKEIDDLLKKQRISNTDFEKYKLWIEQGYKSPYTNK

SEQ ID NO: 10470 - protein, 1378 aa, unidentified
  REGION 1..1378: note = Description of Unknown: Cas Enzyme sequence
MEKIIGIDLGSNSIGWAIRDVSVSKNQITDKGVLTFDKGVGEDKGVEIPMVKKRTESRGKRRNYQAEKYRKWELLKFLIERNLCPLTIDELNLWKHYSIGKGRVYPQSEKFLQWLRFDFDGDLKPDFHLFNAEPGESHYIFRVKAISENEEDRSVFIKNPHILGRIFYQLVQRRGYRGRDDDAEEAKTILKGSEKSGTQGHDDIAPYIETYKTLGSALYHIQKDKRGRIRKRYNLRTDYEQELKEICRIQKITEDDYSRLWKAIIWQRPLRSQKGLVGICTFEKNKSRCPISHPVYEEYKTWVFINNLNIELPDKVDKIKYLHDEIYPLFYNASKDFKLTTILKKLQKVGGTFKSKFSYDTKVISCNLLNSFEKILGKNWKEDFGWNDILQNKPKSCNYSIDDIWHVLFSFDSKEKLKEFALLKLKLDEESAKKFSKINLPKGYATLSLSAIKKILRYLQKDFIYSEAVYLANMHKVICNNEITLEVAQELTNTISEIIKEHRTKIETNIVINRLISDQLNSEYRFGMDKDYQLDNEDKRDISNKIIEVFGSKTWSEKINAEKRNLIYQNVEKEYLSFLRKPINTKKETMFVKTSRLHDKIFEGLRKSYNIPSENIKYLWHPSEQETYTDAAVYQKVIQQGKELYIPIEKVDEFIKKYPNAQKYGFTIKLLGDPRPISKGFKNPMALRTMHELKKLMNYLLKSGKIDENTHVVIEIARELNDANMRKAIETWQRQREKENDAFKEKIREIAEANPKMIINPEDSKIIAKYRLWMEQNQRCLYTGKTINCTDLFDGSRFNFEHTIPASMSFDNELKNLTIAEIDYNINIKGKHLPSECPNYENDAIINGKEYSSIKPRLKFIEVKVENLEKLLEEWKIKTRFASSKEIKDACILRRHLIKFELDYWRKKLDTFTCKEYKSGWRNSQLKDTQVITKYALPFLKTIFNRVEVQKGSITASFREIYKIQPKVEKKDREKHSHHAIDAAVLTLIPPASIRDQILMRYNELKDNDSNENYHERVINWDGFNANYILSIHNDVLINYQPKSNTLIPAIKKIRKRGIQQYVKFKDTDGKLNYKVDEEGKKIPLIAQGDSIRGQLHKDGLFGVVKIEDQLCLVERYPVSSFTSLHDCKKIVDKAVRGIVRSELEKRMESGKTFDQAKQEPIPFPTGKAFIKKVRCKVPVGRGYLTLQKAIPIRKHTFLSTNNEYKHFVYAQNEENTLCLYYEKTIDNKTIRAFKLVGLHELAKLKLKRIEDIRYENNYRAILVGRGKIKREIPMDEIIKVGTKVIFYTDNILELKNMSKQDLLKRIYRVYKFNEMGSPFIYLQNHLEARSNEKLGNGDNSFDPNKYQSRLCLVANSFICAIEGKNFEISPAGEIIFK

SEQ ID NO: 10471 - protein, 1089 aa, unidentified
  REGION 1..1089: note = Description of Unknown: Cas Enzyme sequence
VEKSRDTANYRLGIDLGTNSLGWAAIKLGEEGNPCGILDMGVRIFSDGRNPKDGSSLAVQRRLPRGQRRRRDRYLQRRAELMDALVALGLMPSEDDERKALEELDPYALRARALDHPLTPFELGRALFHLDQRRGFKSNRKSDGDDENEAKKTRAEIDELRRRIAESGARTLGEFLVRRQKKGKAVRARPGVGLYPDRALYEDEFDAIRENQEPHHTLRLDQWDSLKEVIFFQRPLKPVDPGWCLLEAGERRAARALPIAQEFRMLQEVNNLKLRVDTDPERSLNDEERGRALARLRSGKNIDLEKPTKDLRLPSGAVFNLSRGGRKTIKGDETTARLLRKKEKGKQEQSLFGDRWFAYSPEERNEIARFLINTDDPDIVRRKAIGDWGLDDAQADAVASVSLTSGYANLSEKAMRKVLPFLEEGRNFADAVVYAKYPHHSDFRNAEAHEQLPYYGVVLERDAVGADPNKDPEIDGEPARYGRIANPTVHIGLNQLRRVVNKLIEIYGKPEDIVVELARDLKQNREQRQHDQRRNKENRERNERFAADLKSAGYENTPYTRMKLRLWEEQGKAQALVCPYTGCTLSWEMVVTNQTEVDHILPFSQTLDDTMANKVVCIAAANREKGNRSPFEAFGHSPSGYDYDAILAYTTGFPDNKQWRFKPNAMERYENEEEFLGRQLNETRYLSRTARTYLAYLYDEKTEGRQRVRAIPGFMTARLRRGWGLEGILRVDASGEIIEEKKQRDDHRHHAIDAFVVANTTQGLLQRFSRAAASSHDKEERLDAIANDVPPWDGFNWRELKAALDRVVVSHKPDHGSRGQQGKTTGQLHNDTAYGLVKLISDGPSDVVRRKKLSDVKPKDLGSVRDPALQAALTELWNRVSAEGGKWAAFAERAANAGVRVNGRCQRVRSVRLLSKERVIPIKDRDGMLYKGYLPGGNEFADIWQMRDGSWQILVVPTFDANQPDFDIGKFRPATAKGKHKGKPDPAAKRLMRLHIDDMGALGEGEQQQIVRVRKITNAKDGVSIFLDPHNEADVPGRVTKSREQRRKGLDYEDIREHKYSAKQLREQGFRKVGVDESGRVLDPGPRQS

SEQ ID NO: 10472 - protein, 1170 aa, unidentified
  REGION 1..1170: note = Description of Unknown: Cas Enzyme sequence
MKKILGLDLGTNSIGWSIVGYEENINEDKTYKGIIDAGVRIFPEGVEPDTIGKGDKEKSKNSVRREFRQMRRQTYRKRLRKIKLLECLIRHKMCPITTDALKQWKVWNPEKKSYGRSFPDTPEMREWLSMNPYQLRAKAVGEDITRMEFGRILYHLIQRRGFYSSRKEKDSGALYKGNDTMIGIDQTREELEGKTLGQLLNEYTIPENEPYSPVTDDKGQVVKARGRYTLRKWYVEEFNKIWERQAEHLGLDKETDVRKKVRFIKGSPNNKRNVHKINYLIEKLGKDHVEFDNKVIISYEKMPLKEYLAGEIWYDDDGDLKYKSMDSLLFWQRPIRSQKNLLQPCRFESSKKPCSISHPDFEKYRAWQFINNIKFEQNSSNFHKRSLSREEADIVFKMMSDKTSLKFDAIKKKLDKEYETSNFDKDYKVPVCSIIAQLQKLFPKNIWAVDYHEIWHAFYFFDDNEKLFKHLKDRFQLIPDDPEAIAKINLSEKYSSLSLKAIRNILPFLEKGYILSTAIVLGGVKNVFGNKWDLYADHHEIIEKEICKLMSKTEKNKVGELIDKIKLFLINGSGWVDFGFTSDDKRLNKLYHPVYEVKEKEDTKEKLPEIENLRNPLVQQALNELRHIVNEIIDKHGNMDIIKVELSRDLRNNKKKREELQYRIRENEKANEEARKHLTEFGLAPSRDNVRKYRLYKEIEDKAGTVRCPYTNTAISLTALLGDRNLYQIEHIFPRSISLDDSFANITLCESNFNRMKGEKTPWQFYQENPDPAMWNADSWDEIVFRAYKYLPYNKARRFTNKGDLDKDKFVNRQLSDGRYISKKAKEVLSAICDDVQVLPGLLTSDLRRLWGLNNVLQPTETIDSGYVDFEENVLKPHWLVKDVKGKNKIVQPIYNRKPSVRAGETTIPGYVKQNWFYSPYLLNKLPAEGYSDGKYWTVLKLGEPLDWVRQRNIKPDQSMDNLILTGEIKNNKFSVRDRFNFALKKTLPYEDGWYWASLPVIKITFKDVSKKPNTNPDQIAYYGGIQNGRFTSYVFHCKTDLPDGNAWIILDLDAEKAEFYPVYNQKPEISTDEVLITGTINGNRVFTSDVDPDHSLITDKPSGKYWVCFPVEYINPELMPQVNKLPAVQKGEKIIEGNIWVDKQGEIRFDPKKNRDDQRHHAIDALAIA

SEQ ID NO: 10473 - protein, 1166 aa, unidentified
  REGION 1..1166: note = Description of Unknown: Cas Enzyme sequence
DTFIKADYDNKYSKELAAAVLGYEFNVGIIVNDNSLTDEDGKALKAKFADAKYEEKEEKLSDTLGERYYIIETLKKIYSWKVLHSILGDNKYLSYAMVDKYEKHSEQLKALKYLFHKYTSQDEYSEFFHQEKNKEGKYIVNYANYIKGIKRLSNETNKKYNTKQQLYQSIKEKLGERAADDEVYKKILVEMEQETFLEKINNVDNSAIPYQLNLMEMDKILTQQGVYYKELRDNKELLLKMLTSKIPYYVGPLNNNSNGNRNFAWMTKKDGKENEKVYPWNVKDVVDIDVTAEDFITRMTNYCTYLPNEKVLPKESLLYQRYMLLEELSQIRIDGRKLSKEDRKAIINDLFIGKGRVKVSDKDFKEYLNKVNYVKVNGKGYDVTGYQSDDGFACALSSYNKFRRILGHIDEQNEKMIEDIIYWITVFEDKDIVKRKINKQYADRLSAEQLKTIIEMLEDADERFAYCDYCPNFMQIINKDEKIKQIIDDNRPRYDGTKDLLDVIQDMHTSPANRRGIWQTMKAIEEIIEYMGEKPQQIYIEFAREDDPKAKNKRADSRKRAIDKALKKLKEDVVDEYNEKVYKELKQYEKRLDEEKVYLYFMQNGKSLYTGKELNLNEPENLEIDHIIPYSLSDDDSLDNKALVLKKENQNKGNKIVKEAFTQSFSDSEMMDYWKNLKKSGLISEKKYNNLQKNNVDDILTKGFINRQLVETRQIVKSVANLILDYYNEQIDVIEVKASLSTSVRKMLTYEKKDNNGFWIENKDNCMFYKNRDMNDYHHAHDAYLANIIGLYIQKNYPRLQKELNYSQYRRIWRKYYENTKNNNGVNWFATLGKFSSNNEEADWYGQDIIAYMRKIFCYRDVLISKKVEENTGAFYSETKYPREDKAGSKLVPLKQGNNMRGANNLKELDARKYGGYKGGEKAYFVLVKYCIEKALKKKVKKEYHMEFVEIPVYIARGIKNKDINLYDYVCDILNEANKNSVADVEILRNKVPKYQMIIGENGEEYYLVSATEVINSKQFVLGGANQQYNRLLNYIKYGKNDKWQYIQTELLDEQLIGLYNLLIAKIKDEYKGFSKEAVRIQENNSFDKLDVKDKKEFIAEMIKLVQPDSDYPYLGKYATGLSNRMGRKTGEKVGKKITLVDKSVTGLYERRTTFELEDDSSTKSC

SEQ ID NO: 10474 - protein, 1118 aa, unidentified
  REGION 1..1118: note = Description of Unknown: Cas Enzyme sequence
MAQYVFGLDIGIASVGWAVLGDARIVDLGVRCFDKAETAKEGDPLNLARRQARLLRRRLYRRAWRLTQLARLLKREGLIDTAKLFAQSPSFTDSAWELRRQGLDRLLTPLEWARAIYHLCKHRGFHWTSKAEEAKADSDAEGGRVKKGLKDTAARMAEKGYRSAAEMVLAEFPDAQRNKHGQYDKALSRVLLGEELALLFATQRRLGNPHTSERFEALILGNGNRRSGLFWQQKPALAGADLLKMLGKCTFEKTEFRAPKASFSAERHVWLTRLNNLRIVEDGRSRPMNDAERTAALLLPYQTESFKYATLKKALIKQGLWNDEVRFGGLAYPSRAQVESDKIKDPEDQFLVKLPAWHELRKAFNKAGQEALWQRISTPALDGNPELLDQIAWVLSVYKDGAEIEQQLRQLALPEPDACIAVLDKFSSLSLKALRRIVPLMQTGLRYDEAVAQIPEYGHHSQRIDPDAPKRLHLPPFYEGQRKYNGKNDRVGSMQFREDANIPRNPVVLRALNQARKVVNALIRQYGSPMAVHIEMARDLSRPLDERNKVKKAQEEFRDRNDRAYEDFERQMGYKPKGVLFQKWMLYREQFGQCAYSQQPLEIERVLDDPNYAQIDHALPYSRSYDDSKNNRVLVLTRQNQNKGNRTPYEYLTALDGGQEGEHWRAFAAWVQGNKSYRMAKRSRLLRKNYGAEEAKGFIDRNLNDTRYICKFFKNYVEEHLQLAERADGETNRRCVVVNGQLTAFLRARWGLTKVRSDSDRHHALDAAVVAACTHGMVKRLADYSRRKELELLQEGFPDPETGEILNPAAFDRARQHFPEPWAHFRHELQARLFTDDLAALREDMQRLGTYTAEDLNALRTLFVSRAPQRRNGGAVHKETIYAQPESLKTQGGVIEKVQLTSLTQKDLDNLLEPHRNERLYAAIRKRLEDHGGKADKAFGPDNPLHKPDKNGQPTGPVVRSVKLVRNKQSGIPIRGGLAKNDSMLRVDVFTKAGKFHLVPVYVHHRVTGLPNRAIVAFKDEDEWTLIDDSFAFLFSVYPNDFVRVQQKGKPAIDGYFSSAHRGTGNINLWLHDRNTANHKQGAIEGIGVKTALSLEKCNVDVLGHIYPAPPEVRRGLA

SEQ ID NO: 10475 - protein, 1097 aa, unidentified
  REGION 1..1097: note = Description of Unknown: Cas Enzyme sequence
  MOD_RES 915..918: note = Any amino acid
MQMLVKEAVSNMKNTLYGIGLDIGVASVGWAVVGLNGTGEPVGLHRLGVRIFDKAEQPKTGESLAAPRRMARGMRRRLRRKALRRADVYALLERSGLSTREALAQMFEAGGLEDIYALRTRALDEPVGKAEFSRILLHLAQRRGFKSNRRTASDGEDGRLLAAVNENRRRMAQGGWRTVGEMLYRHEAFALHKRNKADDYLSTVGRDMVAEEASILFERQRAMGCSWATPELQAEYLSILLRQRSFDEGPGGNSPYGGNQVEKMVGRCTFEPDEPRAAKAAYSFEYFSLLQKLNHIRLAENGETRPLTQPQRQQLLSLAHKTPDMSLARIRKELALPETVQFNGVRCRANETLEESEKKEKFACLPAYHKMRKALDGVVKGRISSLSISQRDAAATALSLYKNEDTLRAKLTEAGFQAPEIDALAGLTGFSKFGHLSLKACRKLIPHLEQGLTYDQACSAAGYDFKGHGAGERAFTLPAAAPEMEQITSPVVRRAVAQTIKVVNGIIREMDASPAWVRIELARELSKTFGERQEMDRSMRENAAQNERLMQELRDTFHLLSPTGQDLVKYRLWKEQDGVCAYSLRRLDVERLFEPGYVDVDHIVPYSLSFDDRRSNKVLVLSSENRQKGNRLPLQYLQGKRREDFIVWTNSSVRDYRKRQNLLREKLSGDEAEGFRQRNLQDTQHMARFLYNYISDHLAFAQSEALGKKRVFAVSGAVTSHLRKRWGLSKVRADGDLHHALDAAVIACTTDGMIRRISGYYGHIEGEYLQDADGAGSQHARTKERFPAPWPRFRDELIVRLSEQPGEHLLDINPEFYCEYGTEHIRPVFVSRMPRRKVTGPGHKETIKGAAAADEGLLTVRKALTELKLDKDGEIKDYYMPSSDTLLYEALKAQLRRFGGDGKKAFAEPFYKPKXXXXGTPGPLVRKVKTIEKATLTVPVHGGAASNDTMVRVDVFLVPGDGYYWVPVYVADTLKPELPNRAVVQGKPYSEWKEMREEDFIFSLYPNDLVYAEHKSGLKFTVQNADSTLEKTRTQTSAFVYFVGGSISTASITIRTHDNAYGIPSLGVKTLKTFHKYQVDVLGNVFPVHKETRQKFR

SEQ ID NO: 10476 - protein, 938 aa, unidentified
  REGION 1..938: note = Description of Unknown: Cas Enzyme sequence
MSDTTTQVHSLVDMIDNRTPGSRLRLGLDIGIASVGWALLEIDANGDPIRFLGMGSRIFDAFETRESKRGTVVRRTKRSLRRQIRRTVARKESLRKALIQLDLFPADELEAQREFDKDPWLLRARGLTEQLTPYELGRVLLHISDRRGFMSNRLEKADKDDSTKPVLDESNDAESEFVDDLDTPQDLDGLDEDINLEQAEKDAAGFDESLTVGQRGAARLAAFDPKSTAPRPIRRAEVRPPRQAIEDEMLRIWAKQQEFHPLLSDEAILFGKQGRREYPLDRTKRVGGPRVTRGLNGDQLGGVTRTGSMFEEVGLHGLLFFQEKFWWDPATIGYCTLLGKPHLRAQTADRRFQLFRILKVVNEATILNLVDRTTAPLDNNQRASLIARLMDKKEIKRSDLYGFFDLDETRYSLSLERGPSDVLKGHETDALLRPIFGASTWKQVDDTTKTDLADAVMNEDLSDEQFEKVIGALDLEVTPEQMIKLHKVAVKFPAGRAQYCPQAIDRLLPHLLQGMTEQKAKEAESLMHQSGTDRFTGEKYLPLPDLDDIRNPFVVRAISQVRKVVNELIRTHGVIDEMVVETTKEMNMSAKKKKEHDKLQATREKERTALANDFRSEHDGRDPKGQELQRLQLWKQQGEICLYTGKPISKAQALDGNITDIDHIAPQWRSLDNSLGNKTLCFAKANAEKGDRTPYEWLSSDVDKWADFVARAVKYGGSKTRRLVSEESPEERGGYAGSAIGSTGHISREVRAYLQIICPDPRVKTVNGSITSVIRRQLNLEELKYDADRARTDHRNHALDAAMICFATPAVIKAVAEKIKLKERNVETAKSDIALAKYMPLREQIATLYENIVVSRAPKRKLTSGFHAETQLSMRKDKDGNEIATKMIDTAALFDPKAKKADVDKVIGRIINEDAKQRLTQGIRVWEDGSPIKRVRIK

SEQ ID NO: 10477 - protein, 1071 aa, unidentified
  REGION 1..1071: note = Description of Unknown: Cas Enzyme sequence
MSTSRAVERILGLDIGVSSIGWCLLEAEEGVANRILGVGSRVFSPGVDGDFKNGRDEPKNQKRRQARQMRRQLWRRRRRLLKLLRVLVREGLLPAPAAYDPESIDSALKALDGSLSERDPLMRDRRGAQVFHYRLRARAATERVDPHELGRALYHLAQHRGFLSNRKAKKKDGEEDGEVKQSIGELAAKIQESGLPTLGAYFASIDPEHERIRKRWLGRNEFIRPEFEAIRAEQSKHHARVSADAWRAIDDAIFRQRPLRDQSHLIGKCSIEKSERRCPVAYPEAQRFRLLAALNHLRVMEMDGEIQRAARPLSIEERSELLETLWRESHLTFTKAKKLLGLKAKEAKFSIELGGEKDLIGNRTEATMRVYLGDRWDSFADDAKRRLIDDILEYEAEEKLRLRAIKHWKLTPEEAASVASLHLEGARLNLSLRAIRNMLPHLEAGLSVAEAKVLAYPNQAGVDAPWDLLPPIRPDRVWIEHCSGGREFNGVEIRNPAVERSLSELRKVVNGIVRKWGKPTEIRIELARDLKKPRQERKEETKRMREQGDRRDGALARMVREGFPHLADQNRRSDVEKVLLWEECNGICPYTGKSISFEDLFGQSPRFEVEHIIPYALCLEDGFGNKTLCEVNENRNNKRRLSPFDAYHGTARWDAMVSRVKQFKSRSAAKKLRLFQSETNGREVFGDFIDRQLNDTRYASRLACEYVGLLFGGQIDGARKRRVLASAGGATAIVRRKLGIEGVLGGGEKNRKDHRHHAVDAIAIALTGPREVSAIARASEAAIARGEASHRLKLDAPWETFSTDVQQAVDGIVVSHRVDHRLSGPMHLETNYSRPIKNLRREVTDAELRHLRCRLEELGPKDVDAIADPRVRDAVKQQLRQLGETDPKIAFKGGEHLPTMRHGDGRDVPIRKVRIKVRKTLDAVGVGGAARYVAPGSNHHMAVVDVLGPSGKVLARELTVVTLLEAFRRKSRGEPVVQQEWGPNRRLAFTLRSGDAVEIDESDATRAVAVVMSVSAKQIQLIRAADARPTSEIERAGKAGGRLALTPRLFLGLQPRKLALQPLGEVRLAHD

SEQ ID NO: 10478 - protein, 1291 aa, unidentified
  REGION 1..1291: note = Description of Unknown: Cas Enzyme sequence
MSKFILGLDIGTNSIGWVLLRENKVFDKGVIIFPIGTNVDKNGIETTKNMQRGTYRRASRNHNRFKLRRKNLKRLLTSLNMIPSFENTYKVKKKYQAAEFYKIRAKALDKKIPAEEIGRIFLLINKHRGFKSNSKTLSESKDDEGVVKEDINNLSASMKKNDARTLGEYFHKMYEKSAQSYNDDNWHNIDEPFDERAIDNDGIFWLLNNRGIRREGRFVGREMYATEFDLIWDEQKKHYPQLTGSKKEYDEICKLSLEEKRKHLKSFKSTNYWKIKNETIFFQRPLKSQKKFIGKCQFEKNKRTAPASSLLFQEFRIWKQLSDIRYSDKENDIYKQPLPQDWKQKIVDYLETNLILNLKEGRKKEDGSRNKDVLDIIGIENKKNFSFNFDADEEDKYFHGNKTLFAIYSACGEENYKKLKSENKLEKLWHILYMAKDDEWLKDTLIWKWQFDEPIAKRLIEMGLEEGFANYSSKVIEKILPHMKNGKDEHDALILANYLQAADEYKEVRVLSKKIKQLINNELRNPVVEKAVGETIRLVNTLLKTYDIDQEHFTIRVESTREFKKPKKERENIRRSNLEKEKRREEYANFLNEKKSKGELNFIRDIKKNDSIINKFELWLELGADKNDLEFKEFEKIVERKDREKHTLWLDCNRICPYTGKVIPLSKLFSPEIEIEHIIPYSWSLDDSFTNKTLTFHYINKEKANMSAYGYIRCKGELALKEYKSRVKSNRQFSKEKIEERFLNINPEQTFTNAQGRNASYIAVYVRKKLQEVCRDVQFTNGFATSELRKNDWRLGSLLDKVRYEEETGIDVDKYSREFANYKRDFDSYRRLKASSNDLLRTDWKYLTPEITAEYEAETKNPIYEWWQELQKFDAFRGAKGKKDRSDHRHHLLDAIVIGMCSPAIIQRLSTLNQLREIQGASLYDEKGDLTRERIDLPIPYNEIKETLESVLVYHKAEQRLITAKQNRIRKTKHSATDTSIIKQRTISPRGSLVGDNFYGKLKNPSHQGFSKDDVFVKRVNVNGVNFKDKNALDKIVDKNLKKILELRLEKYGDKGEKAFSEEALLSNPLLIYSTKKYPNGLPDNPLSKKGMPLPVIKKIRVVNKNSRNLIQLVAKDEENNIATSNRYAEADGNYLMALYERKETDKKGKVKIKRDFEIVSFFKAVERRRKGDKLFKDEKEQKDGTFLPLLKSCPYLKAGDFVVMYENDESEINWNSKKDLMERLFKVTELGLDFRSENEQYGTLKFVKHNILKTSKDSYAKEGPFLKKLHSGLKAIKVIVDRLGIIKSTI

SEQ ID NO: 10479 - protein, 1015 aa, unidentified
  REGION 1..1015: note = Description of Unknown: Cas Enzyme sequence
KEQIFPREAYIEEFDAIWNKQKYYYTQQLTDETFNKIRNEIIYYQRALKSQKGLVSICEFEGKFRKNKEGKTVFAGPKVAPRSSPLFQISKIWESINTIKLKGKRGQEFEITLAQKNELFNYLDNNEKLSEAELFKILKLSKEDGYAGNSMTKNGIKGNETKFAINKIIKGLPNIKNLLKFELKESTKYIIDYSTGEETDRFMIDANFEKEPLYQLWHCIYSISNDGDLINTLETKFNIPNEEAKQLAKLDFTKQGFSGKSAKVIRKTLPFLQSGFMYSYAMEYAGYNHSNSLTTAQNEARILLEKLPQLQKNSLRQPVVEKILNQMINVVNAIIQEYGKPDEIRVELARELKSSKDERNTADKNNRAREADNKKIAERLEKDYGVKANKRNIDKYKMYMELDGISLYTGKKVELAAFLRGNQVDVEHILPKSRIFDDSLQNKTICEQQENRNKGNMTAYDYMKTKSENDFGDYIERVESLFKLRKISKAKRDKLLTPAAKIPDDFIERQLRQTQYIAKKSTELLKEVCYNVYATSGQVTDYLRHQWGWDEVLMNLKIDMYKSKGYLDLIETYEVTENGQVKTKERIKGWTKRDDHRHHAIDALTIACTKQGIIQRLNKLNQEVIKREGETKTDALKAETSLKEFILNQKPFTTKQVEDKAANILVSFKAGKKAAATGTRKVKINGKKQIVQKGIIIPRGALSEESIYGKIKTIEKNVPTSKLFETPDAIVKHNIKMLVYERLNENNGDVKKTIASVKKLPIILNETTQLPLTYASVYKEEFVIKYNVNTIQQKDLPFVVDEKVKELLTIRLAEYNNNAKEAFKDLDANPVWFNKEKGIKIKTVRLKTGLGNLVPLHASSNGNTHGISNENNNLVDYVKPGNNHHLSIFKDENGKYHDIMTTFWEAVERKKQGLPIIRTEHPKGFKFVMSLQQNEMVIYNIPENTNEPISNKLFRVQKMSKKSDGSLDVMFRHHLETQLLDDGFTKLSKRFIYTRNLESLKPFTKYKTTILGKEI

SEQ ID NO: 10480 - protein, 1054 aa, unidentified
  REGION 1..1054: note = Description of Unknown: Cas Enzyme sequence
MGRILGLDVGSNSLGWAVVDESEGSIFGMGVRVFSAGVDNLNGEKEEAWNVKRRLKRQLRRQYERTRQRRRALRLYLIENGLLPDDADEFSDLLRADPYALRKKGLDQQLELYEIGRILDHINARRGFRSNRKASSDEESSGVIYKGSKEDDKPGIDAINEELHPMLRRVKTYAVVKQKVIDGDPEFAKSPRTAGELLASLDPREVRRRKRFLLREHLEIELDILLNTQARFHSLITKELIDRIHQLIFWQRPLKSVRKLVGNCRFEPGKKRCHKSHPEFQRFRLLQQLNQFEVYGPGRVLDDDRKLTAMERSALVRYLSEKKSIDTLKHGKELYKILDLPSKAEFRFKPERLDACTTMIKMKEVFGPDRLVLLSESELHEIWNVFNLAEDAEWLEDFAARSWGLTDDQAKIAAKVRLEDGYGSLSLRAIRKILPHLEAGHLYHEACRLAGYHHSRPEGDIAVSDVVPAMSNADIRNPIVLRSYSEMRRVVNMLIKRYGPFDSIRVELGRELKKPKFERVKIERRNKEFRDANELIRQKLRSDFGIDKPSRSDIDRYKLWEEQNHKCIYTGRAISQDMLFSGPVDVDHILPYSRTLDDGRSNKVLCLREINLAKGNMTPVEACDSGIINRNELRERVEALVRANKYTKSKSVKFFMSTEDMQKIYGEDFVERQLNDTRYVGRLTAAMLRFVCKDVVVTNGLLTSALRRRWGLDGVLPDLASEGRAWLDAKVHSAGAKSRADHRHHAIDALVVALTSRPLLAAVANLNARGFGADLEKHYADGRIRLPDEPLAGLKAMAKQRVDAIVVSHAVNRKRRGQLHEETIYGVAHDESGVPLTNEAGIPLYMIRKPVESLTASMIEDIVDPVIKELVLARLVSLGVDVSSKYTVPKTAFLEPLYMPTKAGKRGPRIKRVRIYKPSSNMVQLRVNGAFAEPGSNDHIRLYDFDDAGKRRTWKVLSLFESVSTSTAEPDAEPPVMTLRINEMYVNEVPSPGDSVDSWGAYRVQKIDKTVGKITFRHHAAASLDDNSSRLLAMPNTTRGVKIDVNCIGEVVFR

SEQ ID NO: 10481 - protein, 1088 aa, unidentified
  REGION 1..1088: note = Description of Unknown: Cas Enzyme sequence
MKNPADPTQNTVWSFDLGTGSLGEAVRNLDGTSFLHRASWLIPEKLAQRGPAAEAGTPASRYRAMKTREAHLAREARLRAICAGAGIEVLSAKRTARGPDKKFHVVQRADPRLTREFPAQGDETCYTSCLLRIKLLRGDTLEGWQVFKALHSAIQRRGYDDQLAWKNRPKRKTDVKDEEGDTARSAQAFLDALAIMAPDHDEFHLPCYLDAWRMDLWSPAQPDVLRLRVNHLAEPARNRAGTASLVAPRDLVVREARLLLDAAAKLFPALTDRADEILFGPGAVPYASYFPELRKKHDLRLGGAGDWDGILGQKVPRFDNRIIAKCALIPRLNACSASPRQLADTTYAPESLLAAEVTFLMKLKHARVLRGSGTPDALTASEVTRLFDSRHASGPANYGFSEKQWATALDALGLRRAPGHDDIAKPNLSGRSRFCRPALRIMRDLLLSGHTPLEQHTVELARLAGNIDVRRGLVPTDLTFLRRMGDTWTDLYIPDQQHDTLIALRENEGPVTAIRSLIGSCNNPIVRHRLEVLWERLRKLENGTADNPAFGVPGEIVLEFVRQDFMGEDAKRELQKFQNDRARSRASARIQTAALPTESRSAALKYELLAAQGGICLYTGQTLAPTDLDELRFEHIVPRAQGGPDAIVNYVVTTTTTNDAKGNRTPYEWFMAERRDQWDAYVARVKQHGTALRAKKVRLLTQPDAAEQVRRYTSLAETAYIAKLAQTLVALHFNWPIRSQEGARRITIVNGGLTARIRRKYQLNSLLNPCPEGHDPREWEEQCEKNRDDDRHHALDAMVISFIPGWARNPAMEGFFRLPTNITRETFAAELEKVMPRQLTYGKTPLAETFYGDRGAGEFREIVQRVPLVELALKPVAPGKTKFDLAYFKKQIRSVRDSNVIAALQSFEGDEVRWRLLCAEFRLPGKSGAKGPRVKKILVTVGLTDEYAEMSKDQSGAWRRGKKGHKGQIVYHDSTGLLAVRPIYAHGSVAAERKMIAALGGRSAFQGFYQSDCTIALTRPLEIGDYKLVVKNEAKQKRRVAPKAPLPAGHYLLNTIVTRSKDVELSTANNTRIATQLATLVAAGLHRV

SEQ ID NO: 10482 - protein, 1088 aa, unidentified
  REGION 1..1088: note = Description of Unknown: Cas Enzyme sequence
MISKDKSNRKYILGLDIGSTSVGWACIETSQNKPIRVLGTGVRLFDAGMSGEFEKGKEASNAIERRKSRLARRQTHRKAVRRWKVFKLLQDSGLFPPFGITSLRELSPHIEKLDRELGNRYGVGSDHVSSQLLTYRIRERAANQIVPLHDLGRAIYHLAKRRGFNSNLRGTPKNDEDQGQIKSQIKSLATELESRSKTLGEYFASENPVEKRIRTRWTGRDMFLKEFDRIWDVQSKHHKELSEELYRKLRKAIFFQRPLRSAKGLVGKCSILKNKRRLIAAHPLAQEVRMLQFINNVRVCQVGEVDRQLTNEERDRAVAKLSSTGRMTIKQFRDCLDLPKRAKLNFDNDDDTHAHGMGTTSVLKDILGDLWESFDNASQEKLIHDVLSFNKRDALIRHLIRKWQINQEHAELLSELTLEPGYANHCRAVLEALRDLLSKPDATTGMWLTYSEAKHKAFPDAKISERHAILPPVRNAVSNLTNPSVIRSLTEVRKVVNELIGRHGIPSIVRIELARDLKKSKKERKRIEDLIREQTKKRRSALARIKTEFTGYPEKDGYDRGIEMVLLAEECNWQCPYTGEEIQSVRDLLGDNSRFDIEHIFPRRYLDDSFSNKTLCLNHENRNVKKDQLPSIAYSRNPTRYQEILDRVRRFRSTAASRKLERFMAAEVPNDFVSRQLDETRYMSRAAADYLGLLFGGRVDEAGQQRVFTVTGSLTSILRGQWRLNQILGLQGEKNRADHRHHAVDAIVIACTDMATVQALQKAASDGWNQGSSRRYPQIDPPFRNLLDEARESILKTLVSHRPNRKLNGPLHADSLYSVKKNAVGKFDSKSRKPLSALTETQIEQIVDERVKRIVRAKYEELLAVNNSPKKAGELFAPIENHPFIDNADGSRTPIHSVRIWENRDSSTIKQKTLSVRGHTRYVISTGGSNYCSRFYSILDTNGQEIGWKDRVLSRLEAMQIFGKQRRKTSPIDTTSVGSPVSNETGDTNSSTFDENLFVFDLFVNDFVLMMNNQNKLVLYRVLSLSSGDIELRLHTDGRLSDAVKKSKERVRIRTGAITKRDFRKVYLSPAGMVVDAISGEIIIENLA

SEQ ID NO: 10483 - protein, 1249 aa, unidentified
  REGION 1..1249: note = Description of Unknown: Cas Enzyme sequence
MTVPFSVPPELVQQSAATWSSHEFYNSAVVLGIDIGIEGIGLYLRRGPEEIWAKSVQMELPEAEPLKNRRQMRAARHCRRNRKLRTRRLKALMEKHGLPWPDDKQMGNDGRSDPFILRHRALNQGLGSPLALAICIRHAVTHRGYDYSLGGDATEGDYLWGEKNSIDEAAKWLATATIDEAAANHLREIGPELEWKGMHSGSDEERERKQADLLASWEQLIAQRLDYSRDHSIARVLADHAKSDKHTNLRARARTWNFPRSAVEEHIRQILAHVRHATYLPERDGFLSALFLRPKSKEEKERAIFHYNRKTRAEMEHHWKKKTRDCPYREPLGLNVPGLDGKCAPLSDWPVRRWLILEFLATRRLIIEAPVVKEKTSGTARKRGSGLPHRPSANAIAGLLERAQADHAVRIANDKTGNALTRAEVRELLLADARNVMGIDKAKLASATKETDPNYSYFSQLWDLVCPSAAGMRGTSSLCLASAEELFSIATGLRQGAPAPDFHPEAIHRRLTECEYYLWKRRPRFEFGCFPQVEKLTGPYAALDKAYRTARKATPAASRISGLQCSGLLGRIFRECSDRLPEGCTAPDYCVIEVVGDPPRTSEQKKDILKEQSKRRADREAAFAEASKADSGDASRRRRIALHRQQGGICPFTGQELGDPLGSGPGGEGLEIEHLYPQSRGGLSVDDNLVLTTRKVNAAKGNRVPFAYSHDPGLSWDHMLASTRAMKWSARKREIFAWDAPRNPGDPPQPSFPDFANTTRVSQLARQLKAAVQMWMGVFDDADESTRRIGTPTGWHTAQARRTWLPPLSNGSTKLRDDNVHHLVDAAVISHIPPGTGLNSITCGGIFYSEMEQFTLPVPNTGETRTAWRPVTSVVPGLLPHERIAHWRPENLDYQTCPILKLSSPNKWRSLGDSTFWRQVRPDRATVAQRTPLNAKDYQDADALLADLRKMTPSDPDAAALWDRNLPSPPQVKDWLQKATAASKQEAAEIQRSAPPLLLRDGTPIRTVWKFDSKGSIGSGIGWTGEPGEDQRVHHLRSLTDKYDRIELWLGFNPKKKEWQYQTRLIPAASALKHLKRMGFKWWRDKSVKAPAFLQPKPEAPPDKWKSLREIICSPLFPFSVKVGSIARRDTFRLGLDATGTITQNASPVWAGWYGVSAIKSSGQVELKSIQFKDKSAIPLGHLDRDVLTHKPSASSVLATIVGLPQASVHAELTGLKPPKIQGNDSPPDPRRRKRRPASDPGQADLGLT

SEQ ID NO: 10484 - protein, 1086 aa, unidentified
  REGION 1..1086: note = Description of Unknown: Cas Enzyme sequence
MPTSPNREVVLAFDLGKGSIGEAVRYRNEFIHVASWLIPQDLAARGPATKAGTPASRYRAWRTRVAHRAREEALRKVCVASGIEVLSAKRVARDPANRKNWVIVSAADPRLTREFPEPGDDTCYNSALLRIQLLRGVSQAGWQVFKALHSAIQRRGYDASVPWKHKAARETEAQEDGETQQRADAYLNALRQMAPNQPECQLPCYLDAHRLGLWDANRPDEYTLRINHRASPARNRELPDNPPIVAPRELVIAETRALLTAAAKLFPKLAGREDEILFGRGGRPYGSYHDDIRRNQGLRLGGANDWDGILGQKVPRFDNRIIAKCALIPRLNVCKYTPRRDVKGSIIVDSLLAAEVTFLLKLKNIRVQRPDKSIGGLKAEEIRSLFSAADRPPEKLGYTKKQWQTKIAAFGCQPAGGHELIADPHCGGRSRFCRPALQILKALILSGEHPATAHARELATRVHGNTDPRRGLIASDLDFLSPARMGETWDGLHVADQQHSALLRLAAEKGPDAAIGALIGKINNPIVRHRLEAFRGRLQAIEADLKKRIGRGPDEIVIEFVRTDFMGPKAKLELAKFQSERTKAREEARAQADKLGAEGRASPLKYELWKAQGGICLFTGDCLAATDLETLEIEHIVPRAKGGPDAVINYVVTTKATNVLKADRTPYAWFEAAGFKGWDAYVKRIESCATALRPKKVRLLTSPDAVELAERYTALAETAYIARLAQTVAALHFGWPINSQPGERRITIVNGGLTARVRRNYRLNSLLNPCPPGQDPKEWEENADVEKNRKDDRHHALDAMVISFLPAWTRDPKKEKFFRLPEGVTPATFETELKRVLPRQLHYERAQLEATAFGRRNLNGSNYGVGRVGFLNLVVKVALNGARSLNVKPEGSGEADMIVDQAIRRDVQAFIDQRRKTLTLEEWDRWAAEYRRGGPDGPKVNKVLVTITNPDALDEYADLAKDGSGQLRRGKRHRGYWVLRIPRPTKKDPGKTGLEVRPVYAHADKHALRGRLLENHGTEILLELESGCLVQIGSPIEHTKTPLPAGTYRLNSLWTQGNMVVSSQSGQTSAPIGLAKFIDAGLRRVK

SEQ ID NO: 10485 - DNA, 27 bp, synthetic construct
  misc_feature 1..27: note = Description of Artificial Sequence: Synthetic oligonucleotide
  source 1..27: mol_type = other DNA
aaaaggtaatacgacatatattcaaac

SEQ ID NO: 10486 - DNA, 36 bp, synthetic construct
  misc_feature 1..36: note = Description of Artificial Sequence: Synthetic oligonucleotide
  source 1..36: mol_type = other DNA
aaaataccataccttgaacctgcagggaactacaac

SEQ ID NO: 10487 - DNA, 31 bp, synthetic construct
  misc_feature 1..31: note = Description of Artificial Sequence: Synthetic oligonucleotide
  source 1..31: mol_type = other DNA
aaactagacgacgggaatttgcggtcaagct

SEQ ID NO: 10488 - DNA, 39 bp, synthetic construct
  misc_feature 1..39: note = Description of Artificial Sequence: Synthetic oligonucleotide
  source 1..39: mol_type = other DNA
aaactgtggtttgcagggaatcgccgctctggtacaata

SEQ ID NO: 10489 - DNA, 36 bp, synthetic construct
  misc_feature 1..36: note = Description of Artificial Sequence: Synthetic oligonucleotide
  source 1..36: mol_type = other DNA
aaagcttatcaagaggattggtaactgattcccaac

SEQ ID NO: 10490 - DNA, 36 bp, synthetic construct
  misc_feature 1..36: note = Description of Artificial Sequence: Synthetic oligonucleotide
  source 1..36: mol_type = other DNA
aaagtatcagagattaattaaacggtcaactataac

SEQ ID NO: 10491 - DNA, 30 bp, synthetic construct
  misc_feature 1..30: note = Description of Artificial Sequence: Synthetic oligonucleotide
  source 1..30: mol_type = other DNA
aaagttacgaatttgaaagcaactcacaac

SEQ ID NO: 10492 - DNA, 29 bp, synthetic construct
  misc_feature 1..29: note = Description of Artificial Sequence: Synthetic oligonucleotide
  source 1..29: mol_type = other DNA
aactacaaaatttgaaagcaattcacaac

SEQ ID NO: 10493 - DNA, 32 bp, synthetic construct
  misc_feature 1..32: note = Description of Artificial Sequence: Synthetic oligonucleotide
  source 1..32: mol_type = other DNA
aagactaaccataatctacataactctcaaac

SEQ ID NO: 10494 - DNA, 36 bp, synthetic construct
  misc_feature 1..36: note = Description of Artificial Sequence: Synthetic oligonucleotide
  source 1..36: mol_type = other DNA
aagtatatcaaaggcgaataatgaaagattctcaac

SEQ ID NO: 10495 - DNA, 39 bp, synthetic construct
  misc_feature 1..39: note = Description of Artificial Sequence: Synthetic oligonucleotide
  source 1..39: mol_type = other DNA
aagtgtaaccaatcctgacccgcggtcaatccacaacta

SEQ ID NO: 10496 - DNA, 37 bp, synthetic construct
  misc_feature 1..37: note = Description of Artificial Sequence: Synthetic oligonucleotide
  source 1..37: mol_type = other DNA
aagtgtagcaatccggggtgagagagggaactacaac

SEQ ID NO: 10497 - DNA, 36 bp, synthetic construct
  misc_feature 1..36: note = Description of Artificial Sequence: Synthetic oligonucleotide
  source 1..36: mol_type = other DNA
aagtgtatcaaaggggattggtgattgattcccagc

SEQ ID NO: 10498 - DNA, 39 bp, synthetic construct
  misc_feature 1..39: note = Description of Artificial Sequence: Synthetic oligonucleotide
  source 1..39: mol_type = other DNA
aagttgtagttccctgattgttcttggtatggtataatc

SEQ ID NO: 10499 - DNA, 38 bp, synthetic construct
  misc_feature 1..38: note = Description of Artificial Sequence: Synthetic oligonucleotide
  source 1..38: mol_type = other DNA
aagtttgattaccatatgaaattacactactctcaaac

SEQ ID NO: 10500 - DNA, 36 bp, synthetic construct
  misc_feature 1..36: note = Description of Artificial Sequence: Synthetic oligonucleotide
  source 1..36: mol_type = other DNA
aataaagactcttgtaaaattgatttgtacttagac

SEQ ID NO: 10501 - DNA, 36 bp, synthetic construct
  misc_feature 1..36: note = Description of Artificial Sequence: Synthetic oligonucleotide
  source 1..36: mol_type = other DNA
aatacagtttaacaagaaaattggtcgatctgcaac

SEQ ID NO: 10502 - DNA, 36 bp, synthetic construct
  misc_feature 1..36: note = Description of Artificial Sequence: Synthetic oligonucleotide
  source 1..36: mol_type = other DNA
aatacagtttactaagaaaattggtcgatctgcaac

SEQ ID NO: 10503 - DNA, 36 bp, synthetic construct
  misc_feature 1..36: note = Description of Artificial Sequence: Synthetic oligonucleotide
  source 1..36: mol_type = other DNA
aataccagattgccctgtggagggcgagatcaaaac

SEQ ID NO: 10504 - DNA, 36 bp, synthetic construct
  misc_feature 1..36: note = Description of Artificial Sequence: Synthetic oligonucleotide
  source 1..36: mol_type = other DNA
aataccagattgctccggggggagcgagatcaaaac

SEQ ID NO: 10505 - DNA, 36 bp, synthetic construct
  misc_feature 1..36: note = Description of Artificial Sequence: Synthetic oligonucleotide
  source 1..36: mol_type = other DNA
aatagtgattctagtaaaatgtatttgtgcttagac

SEQ ID NO: 10506 - DNA, 36 bp, synthetic construct
  misc_feature 1..36: note = Description of Artificial Sequence: Synthetic oligonucleotide
  source 1..36: mol_type = other DNA
aatatactcaaacggcggttccctgtcaaccccagc

SEQ ID NO: 10507 - DNA, 36 bp, synthetic construct
  misc_feature 1..36: note = Description of Artificial Sequence: Synthetic oligonucleotide
  source 1..36: mol_type = other DNA
aatatagaaacttaggaaatgaggtttcgccagaac

SEQ ID NO: 10508 - DNA, 36 bp, synthetic construct
  misc_feature 1..36: note = Description of Artificial Sequence: Synthetic oligonucleotide
  source 1..36: mol_type = other DNA
aatatagcacacctcaaaaaataatcaaatcacaac

SEQ ID NO: 10509 - DNA, 36 bp, synthetic construct
  misc_feature 1..36: note = Description of Artificial Sequence: Synthetic oligonucleotide
  source 1..36: mol_type = other DNA
aatatagcatcaacctaaaactctacaagctccagc

SEQ ID NO: 10510 - DNA, 36 bp, synthetic construct
  misc_feature 1..36: note = Description of Artificial Sequence: Synthetic oligonucleotide
  source 1..36: mol_type = other DNA
aatatatcccttttccttttgtaatcaaaccacaac

SEQ ID NO: 10511 - DNA, 36 bp, synthetic construct
  misc_feature 1..36: note = Description of Artificial Sequence: Synthetic oligonucleotide
  source 1..36: mol_type = other DNA
aatatatcttaatccatttttttatcaaaccacaac

SEQ ID NO: 10512 - DNA, 36 bp, synthetic construct
  misc_feature 1..36: note = Description of Artificial Sequence: Synthetic oligonucleotide
  source 1..36: mol_type = other DNA
aatatatcttattccattttcttatcaaaccacaac

SEQ ID NO: 10513 - DNA, 36 bp, synthetic construct
  misc_feature 1..36: note = Description of Artificial Sequence: Synthetic oligonucleotide
  source 1..36: mol_type = other DNA
aatatcagaatgcccttgtgggggcaagatcaaaac

SEQ ID NO: 10514 - DNA, 36 bp, synthetic construct
  misc_feature 1..36: note = Description of Artificial Sequence: Synthetic oligonucleotide
  source 1..36: mol_type = other DNA
aatatcatttatccatttttttaatcaaaccacaac

SEQ ID NO: 10515 - DNA, 36 bp, synthetic construct
  misc_feature 1..36: note = Description of Artificial Sequence: Synthetic oligonucleotide
  source 1..36: mol_type = other DNA
aatatccttaaaccatccttgaaatcaaaccacagc

SEQ ID NO: 10516 - DNA, 36 bp, synthetic construct
  misc_feature 1..36: note = Description of Artificial Sequence: Synthetic oligonucleotide
  source 1..36: mol_type = other DNA
aatatccttatttctaatctttaatcaaaccacaac

SEQ ID NO: 10517 - DNA, 36 bp, synthetic construct
  misc_feature 1..36: note = Description of Artificial Sequence: Synthetic oligonucleotide
  source 1..36: mol_type = other DNA
aatatcgcattctctaatctttaatcaaaccacaac

SEQ ID NO: 10518 - DNA, 36 bp, synthetic construct
  misc_feature 1..36: note = Description of Artificial Sequence: Synthetic oligonucleotide
  source 1..36: mol_type = other DNA
aatatcggagattccatctaagaatcaaaccacaac

SEQ ID NO: 10519 - DNA, 36 bp, synthetic construct
  misc_feature 1..36: note = Description of Artificial Sequence: Synthetic oligonucleotide
  source 1..36: mol_type = other DNA
aatatcggttttcccatctttaaatcaaaccacaac

SEQ ID NO: 10520 - DNA, 36 bp, synthetic construct
  misc_feature 1..36: note = Description of Artificial Sequence: Synthetic oligonucleotide
  source 1..36: mol_type = other DNA
aatatcgtaaataccgtttagtcttcaaatcacagc

SEQ ID NO: 10521 - DNA, 36 bp, synthetic construct
  misc_feature 1..36: note = Description of Artificial Sequence: Synthetic oligonucleotide
  source 1..36: mol_type = other DNA
aatatcgtacttcctaatctttaatcaaaccacaac

SEQ ID NO: 10522 - DNA, 36 bp, synthetic construct
  misc_feature 1..36: note = Description of Artificial Sequence: Synthetic oligonucleotide
  source 1..36: mol_type = other DNA
aatatcgtattctctaatctttaatcaaaccacaac

SEQ ID NO: 10523 - DNA, 36 bp, synthetic construct
  misc_feature 1..36: note = Description of Artificial Sequence: Synthetic oligonucleotide
  source 1..36: mol_type = other DNA
aatatcgtatttcctaatctcttatcaaaccacaac

SEQ ID NO: 10524 - DNA, 36 bp, synthetic construct
  misc_feature 1..36: note = Description of Artificial Sequence: Synthetic oligonucleotide
  source 1..36: mol_type = other DNA
aatatcgtcaatcttttaaatcattcaaactgcaac

SEQ ID NO: 10525 - DNA, 36 bp, synthetic construct
  misc_feature 1..36: note = Description of Artificial Sequence: Synthetic oligonucleotide
  source 1..36: mol_type = other DNA
aatatcgtcaattccttaagtcgatcaaaccacaac

SEQ ID NO: 10526 - DNA, 36 bp, synthetic construct
  misc_feature 1..36: note = Description of Artificial Sequence: Synthetic oligonucleotide
  source 1..36: mol_type = other DNA
aatatcgtcaatttctttttgtcatcaatccacaac

SEQ ID NO: 10527 - DNA, 36 bp, synthetic construct
  misc_feature 1..36: note = Description of Artificial Sequence: Synthetic oligonucleotide
  source 1..36: mol_type = other DNA
aatatcgtcatttctaatctttaatcaaaccacaac

SEQ ID NO: 10528 - DNA, 36 bp, synthetic construct
  misc_feature 1..36: note = Description of Artificial Sequence: Synthetic oligonucleotide
  source 1..36: mol_type = other DNA
aatatcgtcttttctaatctttaatcaaaccacaac

SEQ ID NO: 10529 - DNA, 36 bp, synthetic construct
  misc_feature 1..36: note = Description of Artificial Sequence: Synthetic oligonucleotide
  source 1..36: mol_type = other DNA
aatatcgtgaatcctaatctttaatcaaaccacaac

SEQ ID NO: 10530 - DNA, 36 bp, synthetic construct
  misc_feature 1..36: note = Description of Artificial Sequence: Synthetic oligonucleotide
  source 1..36: mol_type = other DNA
aatatcgtgaattctaatctttaatcaaaccacaac

SEQ ID NO: 10531 - DNA, 36 bp, synthetic construct
  misc_feature 1..36: note = Description of Artificial Sequence: Synthetic oligonucleotide
  source 1..36: mol_type = other DNA
aatatcgtgacttctaatctttaatcaaaccacaac

SEQ ID NO: 10532 - DNA, 36 bp, synthetic construct
  misc_feature 1..36: note = Description of Artificial Sequence: Synthetic oligonucleotide
  source 1..36: mol_type = other DNA
aatatcgtgctttctaatctttaatcaaaccacaac

SEQ ID NO: 10533 - DNA, 36 bp, synthetic construct
  misc_feature 1..36: note = Description of Artificial Sequence: Synthetic oligonucleotide
  source 1..36: mol_type = other DNA
aatatcgtgtcttctaatctttaatcaaaccacaac

SEQ ID NO: 10534 - DNA, 36 bp, synthetic construct
  misc_feature 1..36: note = Description of Artificial Sequence: Synthetic oligonucleotide
  source 1..36: mol_type = other DNA
aatatcgtgttctctaatctttaatcaaaccacaac

SEQ ID NO: 10535 - DNA, 36 bp, synthetic construct
  misc_feature 1..36: note = Description of Artificial Sequence: Synthetic oligonucleotide
  source 1..36: mol_type = other DNA
aatatcgtgtttcctaatctttaatcaaaccacaac

SEQ ID NO: 10536 - DNA, 36 bp, synthetic construct
  misc_feature 1..36: note = Description of Artificial Sequence: Synthetic oligonucleotide
  source 1..36: mol_type = other DNA
aatatcgtgtttcctaattcttaatcaaaccacaac

SEQ ID NO: 10537 - DNA, 36 bp, synthetic construct
  misc_feature 1..36: note = Description of Artificial Sequence: Synthetic oligonucleotide
  source 1..36: mol_type = other DNA
aatatcgtgtttcctaattcttaatcaaactacaac

SEQ ID NO: 10538 - DNA, 36 bp, synthetic construct
  misc_feature 1..36: note = Description of Artificial Sequence: Synthetic oligonucleotide
  source 1..36: mol_type = other DNA
aatatcgtgttttccaatctttaatcaaaccacaac

SEQ ID NO: 10539 - DNA, 36 bp, synthetic construct
  misc_feature 1..36: note = Description of Artificial Sequence: Synthetic oligonucleotide
  source 1..36: mol_type = other DNA
aatatcgtgttttctaatctttaatcaaaccacaac

SEQ ID NO: 10540 - DNA, 37 bp, synthetic construct
  misc_feature 1..37: note = Description of Artificial Sequence: Synthetic oligonucleotide
  source 1..37: mol_type = other DNA
aatatcgtgttttctaatctttaatcaaaccacaaca

SEQ ID NO: 10541 - DNA, 35 bp, synthetic construct
  misc_feature 1..35: note = Description of Artificial Sequence: Synthetic oligonucleotide
  source 1..35: mol_type = other DNA
aatatcgttaatccattttttcaatcaaaccacaa

SEQ ID NO: 10542 - DNA, 36 bp, synthetic construct
  misc_feature 1..36: note = Description of Artificial Sequence: Synthetic oligonucleotide
  source 1..36: mol_type = other DNA
aatatcgttaatccattttttcaatcaaaccacaac

SEQ ID NO: 10543 - DNA, 36 bp, synthetic construct
  misc_feature 1..36: note = Description of Artificial Sequence: Synthetic oligonucleotide
  source 1..36: mol_type = other DNA
aatatcgttatctctaatctttaatcaaaccacaac

SEQ ID NO: 10544 - DNA, 36 bp, synthetic construct
  misc_feature 1..36: note = Description of Artificial Sequence: Synthetic oligonucleotide
  source 1..36: mol_type = other DNA
aatatcgttcattccaaaattaagtcaaaccacaac

SEQ ID NO: 10545 - DNA, 36 bp, synthetic construct
  misc_feature 1..36: note = Description of Artificial Sequence: Synthetic oligonucleotide
  source 1..36: mol_type = other DNA
aatatcgttttttctaatctttaatcaaaccacaac

SEQ ID NO: 10546 - DNA, 36 bp, synthetic construct
  misc_feature 1..36: note = Description of Artificial Sequence: Synthetic oligonucleotide
  source 1..36: mol_type = other DNA
aatatttatgtttccattttttaatcaaaccacaac

SEQ ID NO: 10547 - DNA, 36 bp, synthetic construct
  misc_feature 1..36: note = Description of Artificial Sequence: Synthetic oligonucleotide
  source 1..36: mol_type = other DNA
aatattttaccttattcttcggtgcctaataggaac

SEQ ID NO: 10548 - DNA, 36 bp, synthetic construct
  misc_feature 1..36: note = Description of Artificial Sequence: Synthetic oligonucleotide
  source 1..36: mol_type = other DNA
aatcaagtgtaccgtttgaactctacaagccccagc

SEQ ID NO: 10549 - DNA, 36 bp, synthetic construct
  misc_feature 1..36: note = Description of Artificial Sequence: Synthetic oligonucleotide
  source 1..36: mol_type = other DNA
aatccggttagaccacatatcccagtgatctaaaat

SEQ ID NO: 10550 - DNA, 36 bp, synthetic construct
  misc_feature 1..36: note = Description of Artificial Sequence: Synthetic oligonucleotide
  source 1..36: mol_type = other DNA
aatcctacacattctccctgggtgcgcaataggaac

SEQ ID NO: 10551 - DNA, 36 bp, synthetic construct
  misc_feature 1..36: note = Description of Artificial Sequence: Synthetic oligonucleotide
  source 1..36: mol_type = other DNA
aatctaacagaaccgtttggggggtgaagtcaaaac

SEQ ID NO: 10552 - DNA, 35 bp, synthetic construct
  misc_feature 1..35: note = Description of Artificial Sequence: Synthetic oligonucleotide
  source 1..35: mol_type = other DNA
aatctaagaaacccaatcttgtcaacaaaccacaa

SEQ ID NO: 10553 - DNA, 36 bp, synthetic construct
  misc_feature 1..36: note = Description of Artificial Sequence: Synthetic oligonucleotide
  source 1..36: mol_type = other DNA
aatctagaaacttaggaattgaggtttcgccagaac

SEQ ID NO: 10554 - DNA, 36 bp, synthetic construct
  misc_feature 1..36: note = Description of Artificial Sequence: Synthetic oligonucleotide
  source 1..36: mol_type = other DNA
aatctagtaatcctttttctttaatcaaaccacaac

SEQ ID NO: 10555 - DNA, 37 bp, synthetic construct
  misc_feature 1..37: note = Description of Artificial Sequence: Synthetic oligonucleotide
  source 1..37: mol_type = other DNA
aatcttaggcattcagaattcgaggtcaagccgcaac

SEQ ID NO: 10556 - DNA, 36 bp, synthetic construct
  misc_feature 1..36: note = Description of Artificial Sequence: Synthetic oligonucleotide
  source 1..36: mol_type = other DNA
aatgcgtctattggcgattatacatcaaaccacaac

SEQ ID NO: 10557 - DNA, 36 bp, synthetic construct
  misc_feature 1..36: note = Description of Artificial Sequence: Synthetic oligonucleotide
  source 1..36: mol_type = other DNA
aatgtaaaagaacaatacttgatgccaaattacaac

SEQ ID NO: 10558 - DNA, 36 bp, synthetic construct
  misc_feature 1..36: note = Description of Artificial Sequence: Synthetic oligonucleotide
  source 1..36: mol_type = other DNA
aatgtaatcaaattttggtttgagggaaaccgcagc

SEQ ID NO: 10559 - DNA, 36 bp, synthetic construct
  misc_feature 1..36: note = Description of Artificial Sequence: Synthetic oligonucleotide
  source 1..36: mol_type = other DNA
aatgtaccggaatcaaaaaactctgcaagccccagc

SEQ ID NO: 10560 - DNA, 36 bp, synthetic construct
  misc_feature 1..36: note = Description of Artificial Sequence: Synthetic oligonucleotide
  source 1..36: mol_type = other DNA
aatgtactcaaacgacggttcaagtcaagctccagc

SEQ ID NO: 10561 - DNA, 36 bp, synthetic construct
  misc_feature 1..36: note = Description of Artificial Sequence: Synthetic oligonucleotide
  source 1..36: mol_type = other DNA
aatgtactcaaacgacggttcttgtcaagctccagc

SEQ ID NO: 10562 - DNA, 36 bp, synthetic construct
  misc_feature 1..36: note = Description of Artificial Sequence: Synthetic oligonucleotide
  source 1..36: mol_type = other DNA
aatgtactcaagcggcggttgttgtcaagtcccagc

SEQ ID NO: 10563 - DNA, 36 bp, synthetic construct
  misc_feature 1..36: note = Description of Artificial Sequence: Synthetic oligonucleotide
  source 1..36: mol_type = other DNA
aatgtactgaatccgaaaaactctgcaagccccagc

SEQ ID NO: 10564 - DNA, 36 bp, synthetic construct
  misc_feature 1..36: note = Description of Artificial Sequence: Synthetic oligonucleotide
  source 1..36: mol_type = other DNA
aatgtagcacttcctgatctgcagtcaatccacaac

SEQ ID NO: 10565 - DNA, 36 bp, synthetic construct
  misc_feature 1..36: note = Description of Artificial Sequence: Synthetic oligonucleotide
  source 1..36: mol_type = other DNA
aatgtatccgagcggcggctccctccaaaccacagc

SEQ ID NO: 10566 - DNA, 36 bp, synthetic construct
  misc_feature 1..36: note = Description of Artificial Sequence: Synthetic oligonucleotide
  source 1..36: mol_type = other DNA
aatgtatctgagcggccattggctgccaatcacagc

SEQ ID NO: 10567 - DNA, 47 bp, synthetic construct
  misc_feature 1..47: note = Description of Artificial Sequence: Synthetic oligonucleotide
  source 1..47: mol_type = other DNA
aatgtcaaagagctactatcgtgttttcttttcaagcaattcacaac

SEQ ID NO: 10568 - DNA, 46 bp, synthetic construct
  misc_feature 1..46: note = Description of Artificial Sequence: Synthetic oligonucleotide
  source 1..46: mol_type = other DNA
aatgtcgcttatatgtcaaagatacaaatttgaaagcaatccacaa

SEQ ID NO: 10569 - DNA, 47 bp, synthetic construct
  misc_feature 1..47: note = Description of Artificial Sequence: Synthetic oligonucleotide
  source 1..47: mol_type = other DNA
aatgtctatgatatggcaaaggtactaatttttcagcaaatcacaac

SEQ ID NO: 10570 - DNA, 36 bp, synthetic construct
  misc_feature 1..36: note = Description of Artificial Sequence: Synthetic oligonucleotide
  source 1..36: mol_type = other DNA
aatgtctttagttccaattcctgatcaaaccacaac

SEQ ID NO: 10571 - DNA, 36 bp, synthetic construct
  misc_feature 1..36: note = Description of Artificial Sequence: Synthetic oligonucleotide
  source 1..36: mol_type = other DNA
aatgtctttctcctctcttaaaattcaaaccacaac

SEQ ID NO: 10572 - DNA, 36 bp, synthetic construct
  misc_feature 1..36: note = Description of Artificial Sequence: Synthetic oligonucleotide
  source 1..36: mol_type = other DNA
aatgttatttatcaatctttgaaatcaaatcacaac

SEQ ID NO: 10573 - DNA, 47 bp, synthetic construct
  misc_feature 1..47: note = Description of Artificial Sequence: Synthetic oligonucleotide
  source 1..47: mol_type = other DNA
aatgtttatgaccaatgtaaagatacaatttgaaagctaatcacaac

SEQ ID NO: 10574 - DNA, 37 bp, synthetic construct
  misc_feature 1..37: note = Description of Artificial Sequence: Synthetic oligonucleotide
  source 1..37: mol_type = other DNA
aattacacaaacaaaatatttaattgtcgattgtaag

SEQ ID NO: 10575 - DNA, 25 bp, synthetic construct
  misc_feature 1..25: note = Description of Artificial Sequence: Synthetic oligonucleotide
  source 1..25: mol_type = other DNA
aattagattaacaaggctctcaaac

SEQ ID NO: 10576 - DNA, 30 bp, synthetic construct
  misc_feature 1..30: note = Description of Artificial Sequence: Synthetic oligonucleotide
  source 1..30: mol_type = other DNA
aattagtacctttgcaatagcatgaacatc

SEQ ID NO: 10577 - DNA, 36 bp, synthetic construct
  misc_feature 1..36: note = Description of Artificial Sequence: Synthetic oligonucleotide
  source 1..36: mol_type = other DNA
aattagtcactatataagattacatcactctcaaac

SEQ ID NO: 10578 - DNA, 37 bp, synthetic construct
  misc_feature 1..37: note = Description of Artificial Sequence: Synthetic oligonucleotide
  source 1..37: mol_type = other DNA
aattatacagtattcttgcttttagtgggagtataac

SEQ ID NO: 10579 - DNA, 36 bp, synthetic construct
  misc_feature 1..36: note = Description of Artificial Sequence: Synthetic oligonucleotide
  source 1..36: mol_type = other DNA
aattcagcttaccaagaaatggaatcagcccgcaac

SEQ ID NO: 10580 - DNA, 36 bp, synthetic construct
  misc_feature 1..36: note = Description of Artificial Sequence: Synthetic oligonucleotide
  source 1..36: mol_type = other DNA
aattcagcttaccaagaaatggaatctccccgcaac

SEQ ID NO: 10581 - DNA, 36 bp, synthetic construct
  misc_feature 1..36: note = Description of Artificial Sequence: Synthetic oligonucleotide
  source 1..36: mol_type = other DNA
aattcagtttactcggaaaacaggtcgatctgcaac

SEQ ID NO: 10582 - DNA, 40 bp, synthetic construct
  misc_feature 1..40: note = Description of Artificial Sequence: Synthetic oligonucleotide
  source 1..40: mol_type = other DNA
aattgcttttgttctttgaaagattgatatttgctacaac

SEQ ID NO: 10583 - DNA, 36 bp, synthetic construct
  misc_feature 1..36: note = Description of Artificial Sequence: Synthetic oligonucleotide
  source 1..36: mol_type = other DNA
aatttaaaagaactttacctgtaatcaaaccacaac

SEQ ID NO: 10584 - DNA, 36 bp, synthetic construct
  misc_feature 1..36: note = Description of Artificial Sequence: Synthetic oligonucleotide
  source 1..36: mol_type = other DNA
aatttaacaaatccttttttaaaagcaattcacaac

SEQ ID NO: 10585 - DNA, 36 bp, synthetic construct
  misc_feature 1..36: note = Description of Artificial Sequence: Synthetic oligonucleotide
  source 1..36: mol_type = other DNA
aatttagaaaatcatgttttggtgtcaagctgtaac

SEQ ID NO: 10586 - DNA, 36 bp, synthetic construct
  misc_feature 1..36: note = Description of Artificial Sequence: Synthetic oligonucleotide
  source 1..36: mol_type = other DNA
aatttaggacatttcctttcagaaccaaactacaac

SEQ ID NO: 10587 - DNA, 36 bp, synthetic construct
  misc_feature 1..36: note = Description of Artificial Sequence: Synthetic oligonucleotide
  source 1..36: mol_type = other DNA
aatttagtttactcgaaaaattggtcggtctgcaac

SEQ ID NO: 10588 - DNA, 36 bp, synthetic construct
  misc_feature 1..36: note = Description of Artificial Sequence: Synthetic oligonucleotide
  source 1..36: mol_type = other DNA
aattttggaacagtcagaacagcacagctctaaaac

SEQ ID NO: 10589 - DNA, 36 bp, synthetic construct
  misc_feature 1..36: note = Description of Artificial Sequence: Synthetic oligonucleotide
  source 1..36: mol_type = other DNA
acaataccataccttgaaccatcagggagctacaac

SEQ ID NO: 10590 - DNA, 36 bp, synthetic construct
  misc_feature 1..36: note = Description of Artificial Sequence: Synthetic oligonucleotide
  source 1..36: mol_type = other DNA
acactactaccacttgggattacactactctcaaac

SEQ ID NO: 10591 - DNA, 36 bp, synthetic construct
  misc_feature 1..36: note = Description of Artificial Sequence: Synthetic oligonucleotide
  source 1..36: mol_type = other DNA
acattcaccccctcagttttggaatcaaggcaaagc

SEQ ID NO: 10592 - DNA, 36 bp, synthetic construct
  misc_feature 1..36: note = Description of Artificial Sequence: Synthetic oligonucleotide
  source 1..36: mol_type = other DNA
accatagcacaacgatgcaaaaagggaagctatggc

SEQ ID NO: 10593 - DNA, 36 bp, synthetic construct
  misc_feature 1..36: note = Description of Artificial Sequence: Synthetic oligonucleotide
  source 1..36: mol_type = other DNA
accatagccgctcagagatcgcggtccaacggcaac

SEQ ID NO: 10594 - DNA, 28 bp, synthetic construct
  misc_feature 1..28: note = Description of Artificial Sequence: Synthetic oligonucleotide
  source 1..28: mol_type = other DNA
accatctaggataacactactctcaaac

SEQ ID NO: 10595 - DNA, 28 bp, synthetic construct
  misc_feature 1..28: note = Description of Artificial Sequence: Synthetic oligonucleotide
  source 1..28: mol_type = other DNA
accattcgaaacaacacagctctaaaac

SEQ ID NO: 10596 - DNA, 31 bp, synthetic construct
  misc_feature 1..31: note = Description of Artificial Sequence: Synthetic oligonucleotide
  source 1..31: mol_type = other DNA
accctggatataaactacatcattcttaaac

SEQ ID NO: 10597 - DNA, 29 bp, synthetic construct
  misc_feature 1..29: note = Description of Artificial Sequence: Synthetic oligonucleotide
  source 1..29: mol_type = other DNA
accgaccaatttttcgagtaaacttatta

SEQ ID NO: 10598 - DNA, 26 bp, synthetic construct
  misc_feature 1..26: note = Description of Artificial Sequence: Synthetic oligonucleotide
  source 1..26: mol_type = other DNA
accgcgttttctgatctgctaagctc

SEQ ID NO: 10599 - DNA, 29 bp, synthetic construct
  misc_feature 1..29: note = Description of Artificial Sequence: Synthetic oligonucleotide
  source 1..29: mol_type = other DNA
acctctacagaattacactactctcaaac

SEQ ID NO: 10600 - DNA, 23 bp, synthetic construct
  misc_feature 1..23: note = Description of Artificial Sequence: Synthetic oligonucleotide
  source 1..23: mol_type = other DNA
acgattctcttatctgctaaaat

SEQ ID NO: 10601 - DNA, 36 bp, synthetic construct
  misc_feature 1..36: note = Description of Artificial Sequence: Synthetic oligonucleotide
  source 1..36: mol_type = other DNA
actaaccgactgccccggtgggggctaggtcaaaac

SEQ ID NO: 10602 - DNA, 31 bp, synthetic construct
  misc_feature 1..31: note = Description of Artificial Sequence: Synthetic oligonucleotide
  source 1..31: mol_type = other DNA
actaccagtcagaatgtcactgctccaaaac

SEQ ID NO: 10603 - DNA, 36 bp, synthetic construct
  misc_feature 1..36: note = Description of Artificial Sequence: Synthetic oligonucleotide
  source 1..36: mol_type = other DNA
actatagcgattcaaaatccgtggtccagccgcaac

SEQ ID NO: 10604 - DNA, 36 bp, synthetic construct
  misc_feature 1..36: note = Description of Artificial Sequence: Synthetic oligonucleotide
  source 1..36: mol_type = other DNA
actatatcatagcggtacgggaatggaaactatgac

SEQ ID NO: 10605 - DNA, 47 bp, synthetic construct
  misc_feature 1..47: note = Description of Artificial Sequence: Synthetic oligonucleotide
  source 1..47: mol_type = other DNA
actatcaaagaactttctcatactctctaaaaaaagcaattcacaac

SEQ ID NO: 10606 - DNA, 47 bp, synthetic construct
  misc_feature 1..47: note = Description of Artificial Sequence: Synthetic oligonucleotide
  source 1..47: mol_type = other DNA
actatgtatgatcaggtaaaagtacaaatttgaaagcaattcacaac

SEQ ID NO: 10607 - DNA, 36 bp, synthetic construct
  misc_feature 1..36: note = Description of Artificial Sequence: Synthetic oligonucleotide
  source 1..36: mol_type = other DNA
actctaacaagtctcgattaacactcaagtcaaaac

SEQ ID NO: 10608 - DNA, 36 bp, synthetic construct
  misc_feature 1..36: note = Description of Artificial Sequence: Synthetic oligonucleotide
  source 1..36: mol_type = other DNA
actctaacagttcaggggctgtggtctagccggaac

SEQ ID NO: 10609 - DNA, 25 bp, synthetic construct
  misc_feature 1..25: note = Description of Artificial Sequence: Synthetic oligonucleotide
  source 1..25: mol_type = other DNA
actctaataatccctgatatacttg

SEQ ID NO: 10610 - DNA, 46 bp, synthetic construct
  misc_feature 1..46: note = Description of Artificial Sequence: Synthetic oligonucleotide
  source 1..46: mol_type = other DNA
actctacaaaaaatcgtcaaactcacatttgaaagcaaaccacaac

SEQ ID NO: 10611 - DNA, 36 bp, synthetic construct
  misc_feature 1..36: note = Description of Artificial Sequence: Synthetic oligonucleotide
  source 1..36: mol_type = other DNA
actctagcagggtcgatttggacaggcaactatagc

SEQ ID NO: 10612 - DNA, 36 bp, synthetic construct
  misc_feature 1..36: note = Description of Artificial Sequence: Synthetic oligonucleotide
  source 1..36: mol_type = other DNA
actctagcagggtcggtttggacaggcaactatagc

SEQ ID NO: 10613 - DNA, 36 bp, synthetic construct
  misc_feature 1..36: note = Description of Artificial Sequence: Synthetic oligonucleotide
  source 1..36: mol_type = other DNA
actctagcggtctgctgatcgagggccaaccgcaac

SEQ ID NO: 10614 - DNA, 36 bp, synthetic construct
  misc_feature 1..36: note = Description of Artificial Sequence: Synthetic oligonucleotide
  source 1..36: mol_type = other DNA
actctgctccccccgaatttggaatcaaggcaaagc

SEQ ID NO: 10615 - DNA, 36 bp, synthetic construct
  misc_feature 1..36: note = Description of Artificial Sequence: Synthetic oligonucleotide
  source 1..36: mol_type = other DNA
actgaaagcgatagtcaaagagcatcaaatcacaac

SEQ ID NO: 10616 - DNA, 36 bp, synthetic construct
  misc_feature 1..36: note = Description of Artificial Sequence: Synthetic oligonucleotide
  source 1..36: mol_type = other DNA
actgaaccacaaatccaaaacgcatcaaatcacaac

SEQ ID NO: 10617 - DNA, 46 bp, synthetic construct
  misc_feature 1..46: note = Description of Artificial Sequence: Synthetic oligonucleotide
  source 1..46: mol_type = other DNA
actgcgaatcctaagtaaaaatacaattttgaaagcaattcacaac

SEQ ID NO: 10618 - DNA, 46 bp, synthetic construct
  misc_feature 1..46: note = Description of Artificial Sequence: Synthetic oligonucleotide
  source 1..46: mol_type = other DNA
actgcgaatgctaagtaaaaatacaattctgaaagcaattcacaac

SEQ ID NO: 10619 - DNA, 46 bp, synthetic construct
  misc_feature 1..46: note = Description of Artificial Sequence: Synthetic oligonucleotide
  source 1..46: mol_type = other DNA
actgcgaatgctaagtgaaaatacaattttgaaagcaattcacaac

SEQ ID NO: 10620 - DNA, 46 bp, synthetic construct
  misc_feature 1..46: note = Description of Artificial Sequence: Synthetic oligonucleotide
  source 1..46: mol_type = other DNA
actgcgaattatcacttaagataaatgtttgaaagcaattcacaac

SEQ ID NO: 10621 - DNA, 47 bp, synthetic construct
  misc_feature 1..47: note = Description of Artificial Sequence: Synthetic oligonucleotide
  source 1..47: mol_type = other DNA
actgcgttgctgcttcgcggtgtacttttaggtcgataagcgacaac

SEQ ID NO: 10622 - DNA, 38 bp, synthetic construct
  misc_feature 1..38: note = Description of Artificial Sequence: Synthetic oligonucleotide
  source 1..38: mol_type = other DNA
actggatgcaatctatcaaaaaacacaatctgaaagca

SEQ ID NO: 10623 - DNA, 36 bp, synthetic construct
  misc_feature 1..36: note = Description of Artificial Sequence: Synthetic oligonucleotide
  source 1..36: mol_type = other DNA
actggggcttgtaggtttttggatctttgatacact

SEQ ID NO: 10624 - DNA, 47 bp, synthetic construct
  misc_feature 1..47: note = Description of Artificial Sequence: Synthetic oligonucleotide
  source 1..47: mol_type = other DNA
actggtttcaatattagaaagaacaaaatctgaaagcaaatcacaac

SEQ ID NO: 10625 - DNA, 36 bp, synthetic construct
  misc_feature 1..36: note = Description of Artificial Sequence: Synthetic oligonucleotide
  source 1..36: mol_type = other DNA
actgtaaacggggaaagattcaggtcaagtcacaac

SEQ ID NO: 10626 - DNA, 46 bp, synthetic construct
  misc_feature 1..46: note = Description of Artificial Sequence: Synthetic oligonucleotide
  source 1..46: mol_type = other DNA
actgtaaccataaaactcgaaaaacaatctgaaagcagatcacagc

SEQ ID NO: 10627 - DNA, 46 bp, synthetic construct
  misc_feature 1..46: note = Description of Artificial Sequence: Synthetic oligonucleotide
  source 1..46: mol_type = other DNA
actgtaacccgacctaaagatagtttttttggaagcaattcacaac

SEQ ID NO: 10628 - DNA, 36 bp, synthetic construct
  misc_feature 1..36: note = Description of Artificial Sequence: Synthetic oligonucleotide
  source 1..36: mol_type = other DNA
actgtacccgattctcaaagagcatcaaatcacaac

SEQ ID NO: 10629 - DNA, 47 bp, synthetic construct
  misc_feature 1..47: note = Description of Artificial Sequence: Synthetic oligonucleotide
  source 1..47: mol_type = other DNA
actgtacgcaatctatcaaagaacacaatctgaaagcaaatcacaac

SEQ ID NO: 10630 - DNA, 36 bp, synthetic construct
  misc_feature 1..36: note = Description of Artificial Sequence: Synthetic oligonucleotide
  source 1..36: mol_type = other DNA
actgtactcgttcccggcctgcgatcaatccacaac

SEQ ID NO: 10631 - DNA, 36 bp, synthetic construct
  misc_feature 1..36: note = Description of Artificial Sequence: Synthetic oligonucleotide
  source 1..36: mol_type = other DNA
actgtactgtgccttattttggattcaaggcaaaac

SEQ ID NO: 10632 - DNA, 36 bp, synthetic construct
  misc_feature 1..36: note = Description of Artificial Sequence: Synthetic oligonucleotide
  source 1..36: mol_type = other DNA
actgtacttgcctgttaaacaaagatacagtataat

SEQ ID NO: 10633 - DNA, 36 bp, synthetic construct
  misc_feature 1..36: note = Description of Artificial Sequence: Synthetic oligonucleotide
  source 1..36: mol_type = other DNA
actgtagcatatcgagagccggccgcaatccgcagc

SEQ ID NO: 10634 - DNA, 36 bp, synthetic construct
  misc_feature 1..36: note = Description of Artificial Sequence: Synthetic oligonucleotide
  source 1..36: mol_type = other DNA
actgtagttggccgggaatcgtcgctctggtacaat

SEQ ID NO: 10635 - DNA, 36 bp, synthetic construct
  misc_feature 1..36: note = Description of Artificial Sequence: Synthetic oligonucleotide
  source 1..36: mol_type = other DNA
actgtagttggctgggaatcgccgcttgggtataat

SEQ ID NO: 10636 - DNA, 36 bp, synthetic construct
  misc_feature 1..36: note = Description of Artificial Sequence: Synthetic oligonucleotide
  source 1..36: mol_type = other DNA
actgtagttggtcgggaaccgccgctctggtacaat

SEQ ID NO: 10637 - DNA, 36 bp, synthetic construct
  misc_feature 1..36: note = Description of Artificial Sequence: Synthetic oligonucleotide
  source 1..36: mol_type = other DNA
actgtagttggtcgggaatcgccgctctggtacaat

SEQ ID NO: 10638 - DNA, 37 bp, synthetic construct
  misc_feature 1..37: note = Description of Artificial Sequence: Synthetic oligonucleotide
  source 1..37: mol_type = other DNA
actgtagttggtcgggaatcgccgctctggtacaatg

SEQ ID NO: 10639 - DNA, 36 bp, synthetic construct
  misc_feature 1..36: note = Description of Artificial Sequence: Synthetic oligonucleotide
  source 1..36: mol_type = other DNA
actgtagttggtcgggaatcgtcgctctggtacaat

SEQ ID NO: 10640 - DNA, 45 bp, synthetic construct
  misc_feature 1..45: note = Description of Artificial Sequence: Synthetic oligonucleotide
  source 1..45: mol_type = other DNA
actgtatttcaatgagctaagatacaattttgaaagcaattcaca

SEQ ID NO: 10641 - DNA, 47 bp, synthetic construct
  misc_feature 1..47: note = Description of Artificial Sequence: Synthetic oligonucleotide
  source 1..47: mol_type = other DNA
actgtatttgcataagcaaagttactaaatttaaagcaaataacaac

SEQ ID NO: 10642 - DNA, 47 bp, synthetic construct
  misc_feature 1..47: note = Description of Artificial Sequence: Synthetic oligonucleotide
  source 1..47: mol_type = other DNA
actgtgaaagaactaagctactaaaaaatttgaaagcaaatcacaac

SEQ ID NO: 10643 - DNA, 46 bp, synthetic construct
  misc_feature 1..46: note = Description of Artificial Sequence: Synthetic oligonucleotide
  source 1..46: mol_type = other DNA
actgtgaatcaagttctaaatttaataactgaaagcaaatcacaac

SEQ ID NO: 10644 - DNA, 46 bp, synthetic construct
  misc_feature 1..46: note = Description of Artificial Sequence: Synthetic oligonucleotide
  source 1..46: mol_type = other DNA
actgtgaatcctcaataaaattaaagaactgaaagcaattcacaac

SEQ ID NO: 10645 - DNA, 47 bp, synthetic construct
  misc_feature 1..47: note = Description of Artificial Sequence: Synthetic oligonucleotide
  source 1..47: mol_type = other DNA
actgtgaatcctcacgtaaaaatatcaatttgaaatcaattcacaac

SEQ ID NO: 10646 - DNA, 32 bp, synthetic construct
  misc_feature 1..32: note = Description of Artificial Sequence: Synthetic oligonucleotide
  source 1..32: mol_type = other DNA
actgtgaatgctaagtaaaaatacaattctga

SEQ ID NO: 10647 - DNA, 47 bp, synthetic construct
  misc_feature 1..47: note = Description of Artificial Sequence: Synthetic oligonucleotide
  source 1..47: mol_type = other DNA
actgtgaattatagtgcaaaaataacaaaattgaagcaaatcacaac

SEQ ID NO: 10648 - DNA, 36 bp, synthetic construct
  misc_feature 1..36: note = Description of Artificial Sequence: Synthetic oligonucleotide
  source 1..36: mol_type = other DNA
actgtgaccaacttctcaggggggtgaagtcgaaac

SEQ ID NO: 10649 - DNA, 46 bp, synthetic construct
  misc_feature 1..46: note = Description of Artificial Sequence: Synthetic oligonucleotide
  source 1..46: mol_type = other DNA
actgtgagtgctaagtaaaaatacaattttgaaagcaattcacaac

SEQ ID NO: 10650 - DNA, 46 bp, synthetic construct
  misc_feature 1..46: note = Description of Artificial Sequence: Synthetic oligonucleotide
  source 1..46: mol_type = other DNA
actgtgattgatcctctaaaataaagaactgaaagcaattcacaac

SEQ ID NO: 10651 - DNA, 46 bp, synthetic construct
  misc_feature 1..46: note = Description of Artificial Sequence: Synthetic oligonucleotide
  source 1..46: mol_type = other DNA
actgtgctcaatatttcaaagatacaaattgaaagcaattcacaac

SEQ ID NO: 10652 - DNA, 36 bp, synthetic construct
  misc_feature 1..36: note = Description of Artificial Sequence: Synthetic oligonucleotide
  source 1..36: mol_type = other DNA
actgtggttggcggggaatcgccgctcaggtacaat

SEQ ID NO: 10653 - DNA, 36 bp, synthetic construct
  misc_feature 1..36: note = Description of Artificial Sequence: Synthetic oligonucleotide
  source 1..36: mol_type = other DNA
actgtggttggtcgggaatcgccgctctggtacaat

SEQ ID NO: 10654 - DNA, 46 bp, synthetic construct
  misc_feature 1..46: note = Description of Artificial Sequence: Synthetic oligonucleotide
  source 1..46: mol_type = other DNA
actgttaaagagctaagctacaacaaatttgaaagctaatcacaac

SEQ ID NO: 10655 - DNA, 47 bp, synthetic construct
  misc_feature 1..47: note = Description of Artificial Sequence: Synthetic oligonucleotide
  source 1..47: mol_type = other DNA
actgttcacgatgtcaaagatacaaacttttgaaagcaaatcacaac

SEQ ID NO: 10656 - DNA, 47 bp, synthetic construct
  misc_feature 1..47: note = Description of Artificial Sequence: Synthetic oligonucleotide
  source 1..47: mol_type = other DNA
actgttcacggcggcgaagatacaaacttttgaaagcaattcacaac

SEQ ID NO: 10657 - DNA, 36 bp, synthetic construct
  misc_feature 1..36: note = Description of Artificial Sequence: Synthetic oligonucleotide
  source 1..36: mol_type = other DNA
actgttcccgattctcaaagagcatcaaatcacaac

SEQ ID NO: 10658 - DNA, 46 bp, synthetic construct
  misc_feature 1..46: note = Description of Artificial Sequence: Synthetic oligonucleotide
  source 1..46: mol_type = other DNA
actgttgcaaatatattaaaagaacaaattgaaagcaattcacaac

SEQ ID NO: 10659 - DNA, 36 bp, synthetic construct
  misc_feature 1..36: note = Description of Artificial Sequence: Synthetic oligonucleotide
  source 1..36: mol_type = other DNA
actgttgcaatctaataattgaaagccaatcacaac

SEQ ID NO: 10660 - DNA, 47 bp, synthetic construct
  misc_feature 1..47: note = Description of Artificial Sequence: Synthetic oligonucleotide
  source 1..47: mol_type = other DNA
actgttgtgacctatgacaaagatacaaaaagaaagcaattcacaac

SEQ ID NO: 10661 - DNA, 46 bp, synthetic construct
  misc_feature 1..46: note = Description of Artificial Sequence: Synthetic oligonucleotide
  source 1..46: mol_type = other DNA
actgttgttcacctcgctaaaatacaaactgaaagcgaatcacaac

SEQ ID NO: 10662 - DNA, 47 bp, synthetic construct
  misc_feature 1..47: note = Description of Artificial Sequence: Synthetic oligonucleotide
  source 1..47: mol_type = other DNA
actgttgttgatactacaaaggtagtagttttcaagcaaatcacaac

SEQ ID NO: 10663 - DNA, 47 bp, synthetic construct
  misc_feature 1..47: note = Description of Artificial Sequence: Synthetic oligonucleotide
  source 1..47: mol_type = other DNA
actgttgtttatactgcgaagcagaaacttttcaagcaattcacaac

SEQ ID NO: 10664 - DNA, 47 bp, synthetic construct
  misc_feature 1..47: note = Description of Artificial Sequence: Synthetic oligonucleotide
  source 1..47: mol_type = other DNA
actgtttacaatactactaagaactcaatttgaaagcaaatcacaac

SEQ ID NO: 10665 - DNA, 47 bp, synthetic construct
  misc_feature 1..47: note = Description of Artificial Sequence: Synthetic oligonucleotide
  source 1..47: mol_type = other DNA
actgtttatgatatttctttcgtactaatttgagaggtattcacaac

SEQ ID NO: 10666 - DNA, 36 bp, synthetic construct
  misc_feature 1..36: note = Description of Artificial Sequence: Synthetic oligonucleotide
  source 1..36: mol_type = other DNA
actgtttcacatttcaatagagcatcaaatcacaac

SEQ ID NO: 10667 - DNA, 47 bp, synthetic construct
  misc_feature 1..47: note = Description of Artificial Sequence: Synthetic oligonucleotide
  source 1..47: mol_type = other DNA
actgtttccaatggttcaaagatactaaaatgaaagcaaatcacaac

SEQ ID NO: 10668 - DNA, 47 bp, synthetic construct
  misc_feature 1..47: note = Description of Artificial Sequence: Synthetic oligonucleotide
  source 1..47: mol_type = other DNA
actgtttccaatggttcaaagatactaatttgaaagcaaatcacaac

SEQ ID NO: 10669 - DNA, 47 bp, synthetic construct
  misc_feature 1..47: note = Description of Artificial Sequence: Synthetic oligonucleotide
  source 1..47: mol_type = other DNA
actgtttccaatggttcaaagatacttaaatgaaagcagaccacaac

SEQ ID NO: 10670 - DNA, 47 bp, synthetic construct
  misc_feature 1..47: note = Description of Artificial Sequence: Synthetic oligonucleotide
  source 1..47: mol_type = other DNA
actgtttctttcgacccaaagatactaatttgaaagcaaatcacaac

SEQ ID NO: 10671 - DNA, 46 bp, synthetic construct
  misc_feature 1..46: note = Description of Artificial Sequence: Synthetic oligonucleotide
  source 1..46: mol_type = other DNA
actgttttcaatacttcaaagatacaatttgtaaggaattcacaac

SEQ ID NO: 10672 - DNA, 46 bp, synthetic construct
  misc_feature 1..46: note = Description of Artificial Sequence: Synthetic oligonucleotide
  source 1..46: mol_type = other DNA
actgttttcagtcttacaaaaatacgatttgaaaccaattcacaac

SEQ ID NO: 10673 - DNA, 36 bp, synthetic construct
  misc_feature 1..36: note = Description of Artificial Sequence: Synthetic oligonucleotide
  source 1..36: mol_type = other DNA
actgttttccattctcaaagagcatcaaatcacaac

SEQ ID NO: 10674 - DNA, 47 bp, synthetic construct
  misc_feature 1..47: note = Description of Artificial Sequence: Synthetic oligonucleotide
  source 1..47: mol_type = other DNA
actgtttttgtcgacgctaaattacaaaattgaaagcaattcacaac

SEQ ID NO: 10675 - DNA, 37 bp, synthetic construct
  misc_feature 1..37: note = Description of Artificial Sequence: Synthetic oligonucleotide
  source 1..37: mol_type = other DNA
acttaacatatgtgtaaattatatgccaactaaagcc

SEQ ID NO: 10676 - DNA, 36 bp, synthetic construct
  misc_feature 1..36: note = Description of Artificial Sequence: Synthetic oligonucleotide
  source 1..36: mol_type = other DNA
actttaaacctcttctaaatcctactagagtataat

SEQ ID NO: 10677 - DNA, 37 bp, synthetic construct
  misc_feature 1..37: note = Description of Artificial Sequence: Synthetic oligonucleotide
  source 1..37: mol_type = other DNA
actttagaaaatcaggtttcggtgtcaagtcgcaaca

SEQ ID NO: 10678 - DNA, 36 bp, synthetic construct
  misc_feature 1..36: note = Description of Artificial Sequence: Synthetic oligonucleotide
  source 1..36: mol_type = other DNA
actttagcagatagagaattgcagtcaagccgtaac

SEQ ID NO: 10679 - DNA, 36 bp, synthetic construct
  misc_feature 1..36: note = Description of Artificial Sequence: Synthetic oligonucleotide
  source 1..36: mol_type = other DNA
actttagccgatagggaatcgcggtccaaccgcaac

SEQ ID NO: 10680 - DNA, 36 bp, synthetic construct
  misc_feature 1..36: note = Description of Artificial Sequence: Synthetic oligonucleotide
  source 1..36: mol_type = other DNA
actttagcggactggtgattgagggccaaccgcaac

SEQ ID NO: 10681 - DNA, 36 bp, synthetic construct
  misc_feature 1..36: note = Description of Artificial Sequence: Synthetic oligonucleotide
  source 1..36: mol_type = other DNA
actttcaaagatctgctctagtagccaattcacaac

SEQ ID NO: 10682 - DNA, 36 bp, synthetic construct
  misc_feature 1..36: note = Description of Artificial Sequence: Synthetic oligonucleotide
  source 1..36: mol_type = other DNA
actttgaactctgcagatttggaatcaaggcaaagc

SEQ ID NO: 10683 - DNA, 28 bp, synthetic construct
  misc_feature 1..28: note = Description of Artificial Sequence: Synthetic oligonucleotide
  source 1..28: mol_type = other DNA
acttttggaaatcaggttttggcgtcaa

SEQ ID NO: 10684 - DNA, 36 bp, synthetic construct
  misc_feature 1..36: note = Description of Artificial Sequence: Synthetic oligonucleotide
  source 1..36: mol_type = other DNA
agaataaccgatcccggcctgaaagcaacccgcaac

SEQ ID NO: 10685 - DNA, 36 bp, synthetic construct
  misc_feature 1..36: note = Description of Artificial Sequence: Synthetic oligonucleotide
  source 1..36: mol_type = other DNA
agaatagccgctcagagatcgcggtcaaacggcaac

SEQ ID NO: 10686 - DNA, 36 bp, synthetic construct
  misc_feature 1..36: note = Description of Artificial Sequence: Synthetic oligonucleotide
  source 1..36: mol_type = other DNA
agaatagccgctcagagatcgcggtccagcggcaac

SEQ ID NO: 10687 - DNA, 36 bp, synthetic construct
  misc_feature 1..36: note = Description of Artificial Sequence: Synthetic oligonucleotide
  source 1..36: mol_type = other DNA
agaatagccgttcagagatcggggtccagcggcaac

SEQ ID NO: 10688 - DNA, 36 bp, synthetic construct
  misc_feature 1..36: note = Description of Artificial Sequence: Synthetic oligonucleotide
  source 1..36: mol_type = other DNA
agaatagcgcttcagagatcgtggtccagcggcaac

SEQ ID NO: 10689 - DNA, 36 bp, synthetic construct
  misc_feature 1..36: note = Description of Artificial Sequence: Synthetic oligonucleotide
  source 1..36: mol_type = other DNA
agaatagcgtttcagagatcgcggtccagcggcaac

SEQ ID NO: 10690 - DNA, 36 bp, synthetic construct
  misc_feature 1..36: note = Description of Artificial Sequence: Synthetic oligonucleotide
  source 1..36: mol_type = other DNA
agactactgattggggatttgttgtcaagctggaac

SEQ ID NO: 10691 - DNA, 36 bp, synthetic construct
  misc_feature 1..36: note = Description of Artificial Sequence: Synthetic oligonucleotide
  source 1..36: mol_type = other DNA
agagtagcaaacctagggacggccgcaaaccgcagc

SEQ ID NO: 10692 - DNA, 36 bp, synthetic construct
  misc_feature 1..36: note = Description of Artificial Sequence: Synthetic oligonucleotide
  source 1..36: mol_type = other DNA
agagtagcaaatcgagagacgggcgcaatccgcagc

SEQ ID NO: 10693 - DNA, 37 bp, synthetic construct
  misc_feature 1..37: note = Description of Artificial Sequence: Synthetic oligonucleotide
  source 1..37: mol_type = other DNA
agatatatcttattcaattttttaatcaaaccacaac

SEQ ID NO: 10694 - DNA, 27 bp, synthetic construct
  misc_feature 1..27: note = Description of Artificial Sequence: Synthetic oligonucleotide
  source 1..27: mol_type = other DNA
agattagcagatcaggaaatgcgctcg

SEQ ID NO: 10695 - DNA, 36 bp, synthetic construct
  misc_feature 1..36: note = Description of Artificial Sequence: Synthetic oligonucleotide
  source 1..36: mol_type = other DNA
agattagcagcccttgaacggggggcaatcccaaac

SEQ ID NO: 10696 - DNA, 36 bp, synthetic construct
  misc_feature 1..36: note = Description of Artificial Sequence: Synthetic oligonucleotide
  source 1..36: mol_type = other DNA
agattagcccattcgaatcaggagggcaaccacggc

SEQ ID NO: 10697 - DNA, 36 bp, synthetic construct
  misc_feature 1..36: note = Description of Artificial Sequence: Synthetic oligonucleotide
  source 1..36: mol_type = other DNA
agcatagcaaataggagattggagtcaagccgtaac

SEQ ID NO: 10698 - DNA, 36 bp, synthetic construct
  misc_feature 1..36: note = Description of Artificial Sequence: Synthetic oligonucleotide
  source 1..36: mol_type = other DNA
agcatagccgctcagagattgcggtccagcggcaac

SEQ ID NO: 10699 - DNA, 36 bp, synthetic construct
  misc_feature 1..36: note = Description of Artificial Sequence: Synthetic oligonucleotide
  source 1..36: mol_type = other DNA
agcatagcgactccgccgggggggtgaagtcagaac

SEQ ID NO: 10700 - DNA, 36 bp, synthetic construct
  misc_feature 1..36: note = Description of Artificial Sequence: Synthetic oligonucleotide
  source 1..36: mol_type = other DNA
agcatatcatatcaggattcgttagggaactgtaac

SEQ ID NO: 10701 - DNA, 38 bp, synthetic construct
  misc_feature 1..38: note = Description of Artificial Sequence: Synthetic oligonucleotide
  source 1..38: mol_type = other DNA
agccgtggttgccctcccaatttccctctgctaatcta

SEQ ID NO: 10702 - DNA, 36 bp, synthetic construct
  misc_feature 1..36: note = Description of Artificial Sequence: Synthetic oligonucleotide
  source 1..36: mol_type = other DNA
agcctacacgatgggagtcggcagggaaaccacggc

SEQ ID NO: 10703 - DNA, 36 bp, synthetic construct
  misc_feature 1..36: note = Description of Artificial Sequence: Synthetic oligonucleotide
  source 1..36: mol_type = other DNA
agcctacacgatgggagtcggtagggaaaccacggc

SEQ ID NO: 10704 - DNA, 36 bp, synthetic construct
  misc_feature 1..36: note = Description of Artificial Sequence: Synthetic oligonucleotide
  source 1..36: mol_type = other DNA
agcctaccaaatgggagtcggtagggaaaccacggc

SEQ ID NO: 10705 - DNA, 37 bp, synthetic construct
  misc_feature 1..37: note = Description of Artificial Sequence: Synthetic oligonucleotide
  source 1..37: mol_type = other DNA
agcctaccaattgggagtcggtagggaaaccacggcg

SEQ ID NO: 10706 - DNA, 36 bp, synthetic construct
  misc_feature 1..36: note = Description of Artificial Sequence: Synthetic oligonucleotide
  source 1..36: mol_type = other DNA
agcctaccacaggaaaatcggtagggaaaccacggc

SEQ ID NO: 10707 - DNA, 36 bp, synthetic construct
  misc_feature 1..36: note = Description of Artificial Sequence: Synthetic oligonucleotide
  source 1..36: mol_type = other DNA
agcctaccacaggcaaatcggtagggaaaccacggc

SEQ ID NO: 10708 - DNA, 36 bp, synthetic construct
  misc_feature 1..36: note = Description of Artificial Sequence: Synthetic oligonucleotide
  source 1..36: mol_type = other DNA
agcctaccacagggaaatcggtagggaagccacggc

SEQ ID NO: 10709 - DNA, 36 bp, synthetic construct
  misc_feature 1..36: note = Description of Artificial Sequence: Synthetic oligonucleotide
  source 1..36: mol_type = other DNA
agcctaccacctggaaatcggtagggaaaccacggc

SEQ ID NO: 10710 - DNA, 36 bp, synthetic construct
  misc_feature 1..36: note = Description of Artificial Sequence: Synthetic oligonucleotide
  source 1..36: mol_type = other DNA
agcctaccacggggaaatcggtagggaagccacggc

SEQ ID NO: 10711 - DNA, 36 bp, synthetic construct
  misc_feature 1..36: note = Description of Artificial Sequence: Synthetic oligonucleotide
  source 1..36: mol_type = other DNA
agcctaccactggaagatcggtagggaaaccacggc

SEQ ID NO: 10712 - DNA, 36 bp, synthetic construct
  misc_feature 1..36: note = Description of Artificial Sequence: Synthetic oligonucleotide
  source 1..36: mol_type = other DNA
agcctaccagttgggagtcggtagggaaaccacggc

SEQ ID NO: 10713 - DNA, 37 bp, synthetic construct
  misc_feature 1..37: note = Description of Artificial Sequence: Synthetic oligonucleotide
  source 1..37: mol_type = other DNA
agcctaccatcggggagtcggtagggaaaccacggcg

SEQ ID NO: 10714 - DNA, 36 bp, synthetic construct
  misc_feature 1..36: note = Description of Artificial Sequence: Synthetic oligonucleotide
  source 1..36: mol_type = other DNA
agcctaccatgggggagccggtagggaaaccacggc

SEQ ID NO: 10715 - DNA, 36 bp, synthetic construct
  misc_feature 1..36: note = Description of Artificial Sequence: Synthetic oligonucleotide
  source 1..36: mol_type = other DNA
agcctacccaagggaaatcggtagggaaaccacggc

SEQ ID NO: 10716 - DNA, 36 bp, synthetic construct
  misc_feature 1..36: note = Description of Artificial Sequence: Synthetic oligonucleotide
  source 1..36: mol_type = other DNA
agcctacccgatgggagtcggtagggaaaccacggc

SEQ ID NO: 10717 - DNA, 36 bp, synthetic construct
  misc_feature 1..36: note = Description of Artificial Sequence: Synthetic oligonucleotide
  source 1..36: mol_type = other DNA
agcctacctaccgaatgatcgcgggccaaccgcaac

SEQ ID NO: 10718 - DNA, 36 bp, synthetic construct
  misc_feature 1..36: note = Description of Artificial Sequence: Synthetic oligonucleotide
  source 1..36: mol_type = other DNA
agcctacctaccgaatgattgagggccaaccgcaac

SEQ ID NO: 10719 - DNA, 36 bp, synthetic construct
  misc_feature 1..36: note = Description of Artificial Sequence: Synthetic oligonucleotide
  source 1..36: mol_type = other DNA
agcctacctaccgagtgatcgagggccaaccgcaac

SEQ ID NO: 10720 - DNA, 36 bp, synthetic construct
  misc_feature 1..36: note = Description of Artificial Sequence: Synthetic oligonucleotide
  source 1..36: mol_type = other DNA
agcctacctcttgggagtcggtagggaaaccacggc

SEQ ID NO: 10721 - DNA, 36 bp, synthetic construct
  misc_feature 1..36: note = Description of Artificial Sequence: Synthetic oligonucleotide
  source 1..36: mol_type = other DNA
agcctacctctttgaaatcaggagggcaaccacggc

SEQ ID NO: 10722 - DNA, 36 bp, synthetic construct
  misc_feature 1..36: note = Description of Artificial Sequence: Synthetic oligonucleotide
  source 1..36: mol_type = other DNA
agcctaccttagggaaatcggcagggaaaccacggc

SEQ ID NO: 10723 - DNA, 36 bp, synthetic construct
  misc_feature 1..36: note = Description of Artificial Sequence: Synthetic oligonucleotide
  source 1..36: mol_type = other DNA
agcctactacggggaaatcagtagggaaaccacggc

SEQ ID NO: 10724 - DNA, 36 bp, synthetic construct
  misc_feature 1..36: note = Description of Artificial Sequence: Synthetic oligonucleotide
  source 1..36: mol_type = other DNA
agcctactcgatgggagtcggtagggaaaccacggc

SEQ ID NO: 10725 - DNA, 36 bp, synthetic construct
  misc_feature 1..36: note = Description of Artificial Sequence: Synthetic oligonucleotide
  source 1..36: mol_type = other DNA
agcctagcacttcagagaaagcggtccagcggcaac

SEQ ID NO: 10726 - DNA, 36 bp, synthetic construct
  misc_feature 1..36: note = Description of Artificial Sequence: Synthetic oligonucleotide
  source 1..36: mol_type = other DNA
agcctagcagatcagagaagacggtccagccgcaac

SEQ ID NO: 10727 - DNA, 36 bp, synthetic construct
  misc_feature 1..36: note = Description of Artificial Sequence: Synthetic oligonucleotide
  source 1..36: mol_type = other DNA
agcctagcaggagcgaatccggagggaaaccacggc

SEQ ID NO: 10728 - DNA, 36 bp, synthetic construct
  misc_feature 1..36: note = Description of Artificial Sequence: Synthetic oligonucleotide
  source 1..36: mol_type = other DNA
agcctagcagttcagaaaacgcggtccaacggcaac

SEQ ID NO: 10729 - DNA, 36 bp, synthetic construct
  misc_feature 1..36: note = Description of Artificial Sequence: Synthetic oligonucleotide
  source 1..36: mol_type = other DNA
agcctagcagttcagaaatcgaaggccagccgcaac

SEQ ID NO: 10730 - DNA, 36 bp, synthetic construct
  misc_feature 1..36: note = Description of Artificial Sequence: Synthetic oligonucleotide
  source 1..36: mol_type = other DNA
agcctagcagttcagaaatcgaaggccagcggcaac

SEQ ID NO: 10731 - DNA, 36 bp, synthetic construct
  misc_feature 1..36: note = Description of Artificial Sequence: Synthetic oligonucleotide
  source 1..36: mol_type = other DNA
agcctagcagttcagaaatcgaaggccagcggcagc

SEQ ID NO: 10732 - DNA, 36 bp, synthetic construct
  misc_feature 1..36: note = Description of Artificial Sequence: Synthetic oligonucleotide
  source 1..36: mol_type = other DNA
agcctagcagttcagaaatcgcggtccagctgcaac

SEQ ID NO: 10733 - DNA, 36 bp, synthetic construct
  misc_feature 1..36: note = Description of Artificial Sequence: Synthetic oligonucleotide
  source 1..36: mol_type = other DNA
agcctagcagttcagagaagccggtccagcggcaac

SEQ ID NO: 10734 - DNA, 36 bp, synthetic construct
  misc_feature 1..36: note = Description of Artificial Sequence: Synthetic oligonucleotide
  source 1..36: mol_type = other DNA
agcctagcagttcagagaaggcggtccagcagcaac

SEQ ID NO: 10735 - DNA, 36 bp, synthetic construct
  misc_feature 1..36: note = Description of Artificial Sequence: Synthetic oligonucleotide
  source 1..36: mol_type = other DNA
agcctagccgatgggggaatgggggccaaccgcaac

SEQ ID NO: 10736 - DNA, 36 bp, synthetic construct
  misc_feature 1..36: note = Description of Artificial Sequence: Synthetic oligonucleotide
  source 1..36: mol_type = other DNA
agcctagcgctctgggaaatgagccctggccgcaac

SEQ ID NO: 10737 - DNA, 36 bp, synthetic construct
  misc_feature 1..36: note = Description of Artificial Sequence: Synthetic oligonucleotide
  source 1..36: mol_type = other DNA
agcctagtcgatgagagaacgcggtccaaccgcaac

SEQ ID NO: 10738 - DNA, 36 bp, synthetic construct
  misc_feature 1..36: note = Description of Artificial Sequence: Synthetic oligonucleotide
  source 1..36: mol_type = other DNA
agcctatcagttcagaaaacgcgggccaacggcaac

SEQ ID NO: 10739 - DNA, 36 bp, synthetic construct
  misc_feature 1..36: note = Description of Artificial Sequence: Synthetic oligonucleotide
  source 1..36: mol_type = other DNA
agcctatcgacttggaagctgcagggtcaaccagac

SEQ ID NO: 10740 - DNA, 36 bp, synthetic construct
  misc_feature 1..36: note = Description of Artificial Sequence: Synthetic oligonucleotide
  source 1..36: mol_type = other DNA
agcgaagtagatcaggaaatgcgctctcgccggaac

SEQ ID NO: 10741 - DNA, 36 bp, synthetic construct
  misc_feature 1..36: note = Description of Artificial Sequence: Synthetic oligonucleotide
  source 1..36: mol_type = other DNA
agcgtagcacttgggagtgtggcggggagctaagac

SEQ ID NO: 10742 - DNA, 36 bp, synthetic construct
  misc_feature 1..36: note = Description of Artificial Sequence: Synthetic oligonucleotide
  source 1..36: mol_type = other DNA
agcgtagcagatcaggaaatgcgctctagccggaac

SEQ ID NO: 10743 - DNA, 36 bp, synthetic construct
  misc_feature 1..36: note = Description of Artificial Sequence: Synthetic oligonucleotide
  source 1..36: mol_type = other DNA
agcgtagcagatgaggaaatgaggtcaagccgcaac

SEQ ID NO: 10744 - DNA, 36 bp, synthetic construct
  misc_feature 1..36: note = Description of Artificial Sequence: Synthetic oligonucleotide
  source 1..36: mol_type = other DNA
agcgtagcagttcagaaaacgcggtccagcggcaac

SEQ ID NO: 10745 - DNA, 35 bp, synthetic construct
  misc_feature 1..35: note = Description of Artificial Sequence: Synthetic oligonucleotide
  source 1..35: mol_type = other DNA
agcgtagccgattgggaattgcgctcaggccggaa

SEQ ID NO: 10746 - DNA, 36 bp, synthetic construct
  misc_feature 1..36: note = Description of Artificial Sequence: Synthetic oligonucleotide
  source 1..36: mol_type = other DNA
agcgtatcaccttggggaagggcgcgtactcaagac

SEQ ID NO: 10747 - DNA, 36 bp, synthetic construct
  misc_feature 1..36: note = Description of Artificial Sequence: Synthetic oligonucleotide
  source 1..36: mol_type = other DNA
agcgtatcaccttggggaagggcgcgtgctcaagac

SEQ ID NO: 10748 - DNA, 36 bp, synthetic construct
  misc_feature 1..36: note = Description of Artificial Sequence: Synthetic oligonucleotide
  source 1..36: mol_type = other DNA
agcgtggcccttcgacgattccctgcaagccacagc

SEQ ID NO: 10749 - DNA, 36 bp, synthetic construct
  misc_feature 1..36: note = Description of Artificial Sequence: Synthetic oligonucleotide
  source 1..36: mol_type = other DNA
agcgtggccgacttctcaggggggtgaagtcgaaac

SEQ ID NO: 10750 - DNA, 36 bp, synthetic construct
  misc_feature 1..36: note = Description of Artificial Sequence: Synthetic oligonucleotide
  source 1..36: mol_type = other DNA
agcgtgtccgacctctcagaggggggaagtcgaaac

SEQ ID NO: 10751 - DNA, 37 bp, synthetic construct
  misc_feature 1..37: note = Description of Artificial Sequence: Synthetic oligonucleotide
  source 1..37: mol_type = other DNA
agctgcggattgacagcgagtagtgatcagttacctt

SEQ ID NO: 10752 - DNA, 36 bp, synthetic construct
  misc_feature 1..36: note = Description of Artificial Sequence: Synthetic oligonucleotide
  source 1..36: mol_type = other DNA
agcttaaatcatctggccctgcaagcaacccgcaac

SEQ ID NO: 10753 - DNA, 36 bp, synthetic construct
  misc_feature 1..36: note = Description of Artificial Sequence: Synthetic oligonucleotide
  source 1..36: mol_type = other DNA
agcttaaatcatctggctttgtacgcaacccgcaac

SEQ ID NO: 10754 - DNA, 36 bp, synthetic construct
  misc_feature 1..36: note = Description of Artificial Sequence: Synthetic oligonucleotide
  source 1..36: mol_type = other DNA
agcttagatcatccggacttgagcgcaacccgcaac

SEQ ID NO: 10755 - DNA, 36 bp, synthetic construct
  misc_feature 1..36: note = Description of Artificial Sequence: Synthetic oligonucleotide
  source 1..36: mol_type = other DNA
agcttagcagcttaggaaacgcgttcaatccgcaac

SEQ ID NO: 10756 - DNA, 36 bp, synthetic construct
  misc_feature 1..36: note = Description of Artificial Sequence: Synthetic oligonucleotide
  source 1..36: mol_type = other DNA
agcttagcagttcagaaaacgcggtccagccgcaac

SEQ ID NO: 10757 - DNA, 36 bp, synthetic construct
  misc_feature 1..36: note = Description of Artificial Sequence: Synthetic oligonucleotide
  source 1..36: mol_type = other DNA
agcttagcagttcagaaaacgcggtccagcggcaac

SEQ ID NO: 10758 - DNA, 36 bp, synthetic construct
  misc_feature 1..36: note = Description of Artificial Sequence: Synthetic oligonucleotide
  source 1..36: mol_type = other DNA
agcttagcagttcagaaaacgtggtccagccgcaac

SEQ ID NO: 10759 - DNA, 36 bp, synthetic construct
  misc_feature 1..36: note = Description of Artificial Sequence: Synthetic oligonucleotide
  source 1..36: mol_type = other DNA
agcttagcagttcagaaatcgcggtccagcagcaac

SEQ ID NO: 10760 - DNA, 36 bp, synthetic construct
  misc_feature 1..36: note = Description of Artificial Sequence: Synthetic oligonucleotide
  source 1..36: mol_type = other DNA
agcttagcagttcagaattcgaggtccagccgcaac

SEQ ID NO: 10761 - DNA, 36 bp, synthetic construct
  misc_feature 1..36: note = Description of Artificial Sequence: Synthetic oligonucleotide
  source 1..36: mol_type = other DNA
agcttagcatgctggtgtggaaagggaagctaagac

SEQ ID NO: 10762 - DNA, 36 bp, synthetic construct
  misc_feature 1..36: note = Description of Artificial Sequence: Synthetic oligonucleotide
  source 1..36: mol_type = other DNA
agcttagccgatgagagaacgcggtccaaccgaaac

SEQ ID NO: 10763 - DNA, 36 bp, synthetic construct
  misc_feature 1..36: note = Description of Artificial Sequence: Synthetic oligonucleotide
  source 1..36: mol_type = other DNA
agcttagccgcttggagatcgtgggccaaccgcaac

SEQ ID NO: 10764 - DNA, 36 bp, synthetic construct
  misc_feature 1..36: note = Description of Artificial Sequence: Synthetic oligonucleotide
  source 1..36: mol_type = other DNA
agcttagctgttcagaaatcgcaggccaaccgcaac

SEQ ID NO: 10765 - DNA, 36 bp, synthetic construct
  misc_feature 1..36: note = Description of Artificial Sequence: Synthetic oligonucleotide
  source 1..36: mol_type = other DNA
agcttatcagagattaattagacggtcaactataac

SEQ ID NO: 10766 - DNA, 36 bp, synthetic construct
  misc_feature 1..36: note = Description of Artificial Sequence: Synthetic oligonucleotide
  source 1..36: mol_type = other DNA
agcttcgcatcccttggacggggggcaatctcaaac

SEQ ID NO: 10767 - DNA, 36 bp, synthetic construct
  misc_feature 1..36: note = Description of Artificial Sequence: Synthetic oligonucleotide
  source 1..36: mol_type = other DNA
agcttcgcggttcagaaatcgcaggccaaccgcaac

SEQ ID NO: 10768 - DNA, 36 bp, synthetic construct
  misc_feature 1..36: note = Description of Artificial Sequence: Synthetic oligonucleotide
  source 1..36: mol_type = other DNA
aggatacatccctcggaatttgaatcaaggcaaagc

SEQ ID NO: 10769 - DNA, 36 bp, synthetic construct
  misc_feature 1..36: note = Description of Artificial Sequence: Synthetic oligonucleotide
  source 1..36: mol_type = other DNA
aggatcgactcctcggcttttgaatcaaggcaaagc

SEQ ID NO: 10770 - DNA, 36 bp, synthetic construct
  misc_feature 1..36: note = Description of Artificial Sequence: Synthetic oligonucleotide
  source 1..36: mol_type = other DNA
agggtctcccccccggtttttgaatcaaggcaaagc

SEQ ID NO: 10771 - DNA, 29 bp, synthetic construct
  misc_feature 1..29: note = Description of Artificial Sequence: Synthetic oligonucleotide
  source 1..29: mol_type = other DNA
aggtacggaatctgaaagctaatcacaac

SEQ ID NO: 10772 - DNA, 37 bp, synthetic construct
  misc_feature 1..37: note = Description of Artificial Sequence: Synthetic oligonucleotide
  source 1..37: mol_type = other DNA
aggtgaagctataactgaaagaacatagctctcaaac

SEQ ID NO: 10773 - DNA, 36 bp, synthetic construct
  misc_feature 1..36: note = Description of Artificial Sequence: Synthetic oligonucleotide
  source 1..36: mol_type = other DNA
aggttagcagatcaggaattgcactccctcaggaac

SEQ ID NO: 10774 - DNA, 36 bp, synthetic construct
  misc_feature 1..36: note = Description of Artificial Sequence: Synthetic oligonucleotide
  source 1..36: mol_type = other DNA
aggttagccgactggagatcgggggccaaccgcaac

SEQ ID NO: 10775 - DNA, 31 bp, synthetic construct
  misc_feature 1..31: note = Description of Artificial Sequence: Synthetic oligonucleotide
  source 1..31: mol_type = other DNA
aggttgaccgggaaaattaatcagctataat

SEQ ID NO: 10776 - DNA, 32 bp, synthetic construct
  misc_feature 1..32: note = Description of Artificial Sequence: Synthetic oligonucleotide
  source 1..32: mol_type = other DNA
aggtttgataacaaaaggaaattaaatatatt

SEQ ID NO: 10777 - DNA, 36 bp, synthetic construct
  misc_feature 1..36: note = Description of Artificial Sequence: Synthetic oligonucleotide
  source 1..36: mol_type = other DNA
agtagaaggaagtaataatacggcagtcttccaatc

SEQ ID NO: 10778 - DNA, 36 bp, synthetic construct
  misc_feature 1..36: note = Description of Artificial Sequence: Synthetic oligonucleotide
  source 1..36: mol_type = other DNA
agtataacccttcggaatggggctgggggctataac

SEQ ID NO: 10779 - DNA, 36 bp, synthetic construct
  misc_feature 1..36: note = Description of Artificial Sequence: Synthetic oligonucleotide
  source 1..36: mol_type = other DNA
agtataaccgctcagagatcgcggtccagcggcagc

SEQ ID NO: 10780 - DNA, 36 bp, synthetic construct
  misc_feature 1..36: note = Description of Artificial Sequence: Synthetic oligonucleotide
  source 1..36: mol_type = other DNA
agtatacctgagcggagattctccccaaaccacagc

SEQ ID NO: 10781 - DNA, 36 bp, synthetic construct
  misc_feature 1..36: note = Description of Artificial Sequence: Synthetic oligonucleotide
  source 1..36: mol_type = other DNA
agtatacctgagcggcgattttcttccaaccccagc

SEQ ID NO: 10782 - DNA, 36 bp, synthetic construct
  misc_feature 1..36: note = Description of Artificial Sequence: Synthetic oligonucleotide
  source 1..36: mol_type = other DNA
agtatagacgatcccgacttggagtcaatccgcaac

SEQ ID NO: 10783 - DNA, 36 bp, synthetic construct
  misc_feature 1..36: note = Description of Artificial Sequence: Synthetic oligonucleotide
  source 1..36: mol_type = other DNA
agtatagcacaccggagaaccgaagggaactatgac

SEQ ID NO: 10784 - DNA, 36 bp, synthetic construct
  misc_feature 1..36: note = Description of Artificial Sequence: Synthetic oligonucleotide
  source 1..36: mol_type = other DNA
agtatagcacagccgtgtgggaatggaagctatgac

SEQ ID NO: 10785 - DNA, 36 bp, synthetic construct
  misc_feature 1..36: note = Description of Artificial Sequence: Synthetic oligonucleotide
  source 1..36: mol_type = other DNA
agtatagcacatccgagtgagaaagggggctataac

SEQ ID NO: 10786 - DNA, 36 bp, synthetic construct
  misc_feature 1..36: note = Description of Artificial Sequence: Synthetic oligonucleotide
  source 1..36: mol_type = other DNA
agtatagcagaacaagaagcggccgcaatccgcagc

SEQ ID NO: 10787 - DNA, 36 bp, synthetic construct
  misc_feature 1..36: note = Description of Artificial Sequence: Synthetic oligonucleotide
  source 1..36: mol_type = other DNA
agtatagcatatctgatttggaaaggaagctataac

SEQ ID NO: 10788 - DNA, 26 bp, synthetic construct
  misc_feature 1..26: note = Description of Artificial Sequence: Synthetic oligonucleotide
  source 1..26: mol_type = other DNA
agtatagcattccggggtgagagagg

SEQ ID NO: 10789 - DNA, 36 bp, synthetic construct
  misc_feature 1..36: note = Description of Artificial Sequence: Synthetic oligonucleotide
  source 1..36: mol_type = other DNA
agtatagcggtctggtgattgagggccaaccgcaac

SEQ ID NO: 10790 - DNA, 37 bp, synthetic construct
  misc_feature 1..37: note = Description of Artificial Sequence: Synthetic oligonucleotide
  source 1..37: mol_type = other DNA
agtatagcgtatccgagtgagaagggaagctataacg

SEQ ID NO: 10791 - DNA, 36 bp, synthetic construct
  misc_feature 1..36: note = Description of Artificial Sequence: Synthetic oligonucleotide
  source 1..36: mol_type = other DNA
agtatagcgtatttgtgtgagaacaggtgctataac

SEQ ID NO: 10792 - DNA, 36 bp, synthetic construct
  misc_feature 1..36: note = Description of Artificial Sequence: Synthetic oligonucleotide
  source 1..36: mol_type = other DNA
agtatagctaatcagaaagtgcggtcaagccgcaac

SEQ ID NO: 10793 - DNA, 36 bp, synthetic construct
  misc_feature 1..36: note = Description of Artificial Sequence: Synthetic oligonucleotide
  source 1..36: mol_type = other DNA
agtatagctcatctaaaaaagcggtcaacctgcaac

SEQ ID NO: 10794 - DNA, 36 bp, synthetic construct
  misc_feature 1..36: note = Description of Artificial Sequence: Synthetic oligonucleotide
  source 1..36: mol_type = other DNA
agtatatcaactgggaatttgattgactaccaaggc

SEQ ID NO: 10795 - DNA, 36 bp, synthetic construct
  misc_feature 1..36: note = Description of Artificial Sequence: Synthetic oligonucleotide
  source 1..36: mol_type = other DNA
agtatatcaagtattccgacggtggggtatcggaac

SEQ ID NO: 10796 - DNA, 36 bp, synthetic construct
  misc_feature 1..36: note = Description of Artificial Sequence: Synthetic oligonucleotide
  source 1..36: mol_type = other DNA
agtatatcacatgggaaattgtggaccaactagaac

SEQ ID NO: 10797 - DNA, 36 bp, synthetic construct
  misc_feature 1..36: note = Description of Artificial Sequence: Synthetic oligonucleotide
  source 1..36: mol_type = other DNA
agtatatcaggcattccgatggtggggtatcggaac

SEQ ID NO: 10798 - DNA, 36 bp, synthetic construct
  misc_feature 1..36: note = Description of Artificial Sequence: Synthetic oligonucleotide
  source 1..36: mol_type = other DNA
agtatatcatatctcgggtaggggtatcaatatgac

SEQ ID NO: 10799 - DNA, 36 bp, synthetic construct
  misc_feature 1..36: note = Description of Artificial Sequence: Synthetic oligonucleotide
  source 1..36: mol_type = other DNA
agtatatccgagcagcgattccctgcaaaccatagc

SEQ ID NO: 10800 - DNA, 36 bp, synthetic construct
  misc_feature 1..36: note = Description of Artificial Sequence: Synthetic oligonucleotide
  source 1..36: mol_type = other DNA
agtatatccgagcgacgattccccgcaagctacagc

SEQ ID NO: 10801 - DNA, 47 bp, synthetic construct
  misc_feature 1..47: note = Description of Artificial Sequence: Synthetic oligonucleotide
  source 1..47: mol_type = other DNA
agtatctatcacctctaagctacgaatttttgaaagcaaatcacaac

SEQ ID NO: 10802 - DNA, 36 bp, synthetic construct
  misc_feature 1..36: note = Description of Artificial Sequence: Synthetic oligonucleotide
  source 1..36: mol_type = other DNA
agtatgcccccaccgatttaggaatcaaggcaaagc

SEQ ID NO: 10803 - DNA, 36 bp, synthetic construct
  misc_feature 1..36: note = Description of Artificial Sequence: Synthetic oligonucleotide
  source 1..36: mol_type = other DNA
agtatgtaaaagaacttttctcaatcaaaccacaac

SEQ ID NO: 10804 - DNA, 36 bp, synthetic construct
  misc_feature 1..36: note = Description of Artificial Sequence: Synthetic oligonucleotide
  source 1..36: mol_type = other DNA
agtatgtaaaagagctttctgcgatcaaaccacaac

SEQ ID NO: 10805 - DNA, 36 bp, synthetic construct
  misc_feature 1..36: note = Description of Artificial Sequence: Synthetic oligonucleotide
  source 1..36: mol_type = other DNA
agtcattgaaacctgatttcaaggggcaaccctaac

SEQ ID NO: 10806 - DNA, 37 bp, synthetic construct
  misc_feature 1..37: note = Description of Artificial Sequence: Synthetic oligonucleotide
  source 1..37: mol_type = other DNA
agtcggggcaggacgccttctcaggttcaagtacgct

SEQ ID NO: 10807 - DNA, 36 bp, synthetic construct
  misc_feature 1..36: note = Description of Artificial Sequence: Synthetic oligonucleotide
  source 1..36: mol_type = other DNA
agtctaacacatcgggaaatgagagccagccggaac

SEQ ID NO: 10808 - DNA, 36 bp, synthetic construct
  misc_feature 1..36: note = Description of Artificial Sequence: Synthetic oligonucleotide
  source 1..36: mol_type = other DNA
agtctaactcattgggaaatgcgcactggccggaac

SEQ ID NO: 10809 - DNA, 36 bp, synthetic construct
  misc_feature 1..36: note = Description of Artificial Sequence: Synthetic oligonucleotide
  source 1..36: mol_type = other DNA
agtctaccataaatcatcctgcggtagaatcaaaac

SEQ ID NO: 10810 - DNA, 36 bp, synthetic construct
  misc_feature 1..36: note = Description of Artificial Sequence: Synthetic oligonucleotide
  source 1..36: mol_type = other DNA
agtctaccgaacagagaaatggccgtagaccccaac

SEQ ID NO: 10811 - DNA, 36 bp, synthetic construct
  misc_feature 1..36: note = Description of Artificial Sequence: Synthetic oligonucleotide
  source 1..36: mol_type = other DNA
agtctaccggtaggggatatgtgcgctaaccggaac

SEQ ID NO: 10812 - DNA, 36 bp, synthetic construct
  misc_feature 1..36: note = Description of Artificial Sequence: Synthetic oligonucleotide
  source 1..36: mol_type = other DNA
agtctagacgattgggaaatgcgctctggccggaac

SEQ ID NO: 10813 - DNA, 36 bp, synthetic construct
  misc_feature 1..36: note = Description of Artificial Sequence: Synthetic oligonucleotide
  source 1..36: mol_type = other DNA
agtctagacgattgggatatgagctctggccggaac

SEQ ID NO: 10814 - DNA, 36 bp, synthetic construct
  misc_feature 1..36: note = Description of Artificial Sequence: Synthetic oligonucleotide
  source 1..36: mol_type = other DNA
agtctagacgattgggatatgcgctctgaccggaac

SEQ ID NO: 10815 - DNA, 36 bp, synthetic construct
  misc_feature 1..36: note = Description of Artificial Sequence: Synthetic oligonucleotide
  source 1..36: mol_type = other DNA
agtctagacgattgggatatgcgctctggccggaac

SEQ ID NO: 10816 - DNA, 37 bp, synthetic construct
  misc_feature 1..37: note = Description of Artificial Sequence: Synthetic oligonucleotide
  source 1..37: mol_type = other DNA
agtctagacgattgggatatgcgctctggccggaact

SEQ ID NO: 10817 - DNA, 36 bp, synthetic construct
  misc_feature 1..36: note = Description of Artificial Sequence: Synthetic oligonucleotide
  source 1..36: mol_type = other DNA
agtctagatcactgggatatgcgcactggccggaac

SEQ ID NO: 10818 - DNA, 36 bp, synthetic construct
  misc_feature 1..36: note = Description of Artificial Sequence: Synthetic oligonucleotide
  source 1..36: mol_type = other DNA
agtctagatcatcgggatatgtgatctggccggaac

SEQ ID NO: 10819 - DNA, 36 bp, synthetic construct
  misc_feature 1..36: note = Description of Artificial Sequence: Synthetic oligonucleotide
  source 1..36: mol_type = other DNA
agtctagcaagtcgggaatcgcgctccgtcggcaac

SEQ ID NO: 10820 - DNA, 36 bp, synthetic construct
  misc_feature 1..36: note = Description of Artificial Sequence: Synthetic oligonucleotide
  source 1..36: mol_type = other DNA
agtctagcacatgggaataggcggtgctaagacaac

SEQ ID NO: 10821 - DNA, 37 bp, synthetic construct
  misc_feature 1..37: note = Description of Artificial Sequence: Synthetic oligonucleotide
  source 1..37: mol_type = other DNA
agtctagcactcaggaataggcggcgctagaacaacc

SEQ ID NO: 10822 - DNA, 36 bp, synthetic construct
  misc_feature 1..36: note = Description of Artificial Sequence: Synthetic oligonucleotide
  source 1..36: mol_type = other DNA
agtctagcagattgggatttgcgctctggccggaac

SEQ ID NO: 10823 - DNA, 36 bp, synthetic construct
  misc_feature 1..36: note = Description of Artificial Sequence: Synthetic oligonucleotide
  source 1..36: mol_type = other DNA
agtctagcagccgtgaaactgtgcggcatccggaac

SEQ ID NO: 10824 - DNA, 36 bp, synthetic construct
  misc_feature 1..36: note = Description of Artificial Sequence: Synthetic oligonucleotide
  source 1..36: mol_type = other DNA
agtctagcagggggaaagccgggggggaaccacggc

SEQ ID NO: 10825 - DNA, 36 bp, synthetic construct
  misc_feature 1..36: note = Description of Artificial Sequence: Synthetic oligonucleotide
  source 1..36: mol_type = other DNA
agtctagcagtctggtgagtgaggaccaaccgcaac

SEQ ID NO: 10826 - DNA, 36 bp, synthetic construct
  misc_feature 1..36: note = Description of Artificial Sequence: Synthetic oligonucleotide
  source 1..36: mol_type = other DNA
agtctagctaattgggatgtgtgctctgaccggaac

SEQ ID NO: 10827 - DNA, 36 bp, synthetic construct
  misc_feature 1..36: note = Description of Artificial Sequence: Synthetic oligonucleotide
  source 1..36: mol_type = other DNA
agtctagctgattgggaaatgcgctctggccggaac

SEQ ID NO: 10828 - DNA, 36 bp, synthetic construct
  misc_feature 1..36: note = Description of Artificial Sequence: Synthetic oligonucleotide
  source 1..36: mol_type = other DNA
agtctaggcgattgggaaatgcgctctgaccggaac

SEQ ID NO: 10829 - DNA, 36 bp, synthetic construct
  misc_feature 1..36: note = Description of Artificial Sequence: Synthetic oligonucleotide
  source 1..36: mol_type = other DNA
agtctaggcgattgggatatgagctctggccggaac

SEQ ID NO: 10830 - DNA, 36 bp, synthetic construct
  misc_feature 1..36: note = Description of Artificial Sequence: Synthetic oligonucleotide
  source 1..36: mol_type = other DNA
agtctaggcgattgggatatgcgctctggccggaac

SEQ ID NO: 10831 - DNA, 36 bp, synthetic construct
  misc_feature 1..36: note = Description of Artificial Sequence: Synthetic oligonucleotide
  source 1..36: mol_type = other DNA
agtctagtcgattgggaaatgcgctctgaccggaac

SEQ ID NO: 10832 - DNA, 33 bp, synthetic construct
  misc_feature 1..33: note = Description of Artificial Sequence: Synthetic oligonucleotide
  source 1..33: mol_type = other DNA
agtctagttcaaagggatatgtgcactagccgg

SEQ ID NO: 10833 - DNA, 36 bp, synthetic construct
  misc_feature 1..36: note = Description of Artificial Sequence: Synthetic oligonucleotide
  source 1..36: mol_type = other DNA
agtctatcaagcattccgatggtggggtatcggaac

SEQ ID NO: 10834 - DNA, 36 bp, synthetic construct
  misc_feature 1..36: note = Description of Artificial Sequence: Synthetic oligonucleotide
  source 1..36: mol_type = other DNA
agtctatcaggtgttccgctggtgaggtatcggaac

SEQ ID NO: 10835 - DNA, 36 bp, synthetic construct
  misc_feature 1..36: note = Description of Artificial Sequence: Synthetic oligonucleotide
  source 1..36: mol_type = other DNA
agtctatcccatggctgcgtcccagccggccccagc

SEQ ID NO: 10836 - DNA, 36 bp, synthetic construct
  misc_feature 1..36: note = Description of Artificial Sequence: Synthetic oligonucleotide
  source 1..36: mol_type = other DNA
agtctatcgctctgggaaatgagccctggccgcaac

SEQ ID NO: 10837 - DNA, 36 bp, synthetic construct
  misc_feature 1..36: note = Description of Artificial Sequence: Synthetic oligonucleotide
  source 1..36: mol_type = other DNA
agtctatctgagcgacgcttcgcggcagttcacagc

SEQ ID NO: 10838 - DNA, 36 bp, synthetic construct
  misc_feature 1..36: note = Description of Artificial Sequence: Synthetic oligonucleotide
  source 1..36: mol_type = other DNA
agtctatctgagcgacgcttcgcggccgttcacagc

SEQ ID NO: 10839 - DNA, 36 bp, synthetic construct
  misc_feature 1..36: note = Description of Artificial Sequence: Synthetic oligonucleotide
  source 1..36: mol_type = other DNA
agtctattcactggggatttgcagtcaagccggaac

SEQ ID NO: 10840 - DNA, 36 bp, synthetic construct
  misc_feature 1..36: note = Description of Artificial Sequence: Synthetic oligonucleotide
  source 1..36: mol_type = other DNA
agtctattcgattgggatatgcgctctggccggaac

SEQ ID NO: 10841 - DNA, 36 bp, synthetic construct
  misc_feature 1..36: note = Description of Artificial Sequence: Synthetic oligonucleotide
  source 1..36: mol_type = other DNA
agtctgccagcctaaaagaaggattcaaggcaaagc

SEQ ID NO: 10842 - DNA, 38 bp, synthetic construct
  misc_feature 1..38: note = Description of Artificial Sequence: Synthetic oligonucleotide
  source 1..38: mol_type = other DNA
agtctgccgccgccgggattggaatcaaggcaaagcca

SEQ ID NO: 10843 - DNA, 36 bp, synthetic construct
  misc_feature 1..36: note = Description of Artificial Sequence: Synthetic oligonucleotide
  source 1..36: mol_type = other DNA
agtctgccttcgtcagaagtggaatcaaggcaaagc

SEQ ID NO: 10844 - DNA, 36 bp, synthetic construct
  misc_feature 1..36: note = Description of Artificial Sequence: Synthetic oligonucleotide
  source 1..36: mol_type = other DNA
agtctgcgcgccccggaattggaatcaaggcaaagc

SEQ ID NO: 10845 - DNA, 36 bp, synthetic construct
  misc_feature 1..36: note = Description of Artificial Sequence: Synthetic oligonucleotide
  source 1..36: mol_type = other DNA
agtctgctcaaagcatgtttggtgtcaagctgaaac

SEQ ID NO: 10846 - DNA, 36 bp, synthetic construct
  misc_feature 1..36: note = Description of Artificial Sequence: Synthetic oligonucleotide
  source 1..36: mol_type = other DNA
agtctggatgtcccggaattggaatcaaggcaaagc

SEQ ID NO: 10847 - DNA, 36 bp, synthetic construct
  misc_feature 1..36: note = Description of Artificial Sequence: Synthetic oligonucleotide
  source 1..36: mol_type = other DNA
agtgaaacttaccggtgcctgcccgcaaaccacaac

SEQ ID NO: 10848 - DNA, 36 bp, synthetic construct
  misc_feature 1..36: note = Description of Artificial Sequence: Synthetic oligonucleotide
  source 1..36: mol_type = other DNA
agtgaagatagtacgttttttcaatcaatcgacaac

SEQ ID NO: 10849 - DNA, 47 bp, synthetic construct
  misc_feature 1..47: note = Description of Artificial Sequence: Synthetic oligonucleotide
  source 1..47: mol_type = other DNA
agtgatagcaatgtcaaagatactcaaaattgaaagcaaatcacaac

SEQ ID NO: 10850 - DNA, 47 bp, synthetic construct
  misc_feature 1..47: note = Description of Artificial Sequence: Synthetic oligonucleotide
  source 1..47: mol_type = other DNA
agtgatagcgatgtcaaagatacccaaaattgaaagcaaatcacaac

SEQ ID NO: 10851 - DNA, 47 bp, synthetic construct
  misc_feature 1..47: note = Description of Artificial Sequence: Synthetic oligonucleotide
  misc_difference 47: note = n is a, c, g or t
  source 1..47: mol_type = other DNA
agtgatagcgatgtcaaagatacccaaaattgaaagcaaatcacaan

SEQ ID NO: 10852 - DNA, 26 bp, synthetic construct
  misc_feature 1..26: note = Description of Artificial Sequence: Synthetic oligonucleotide
  source 1..26: mol_type = other DNA
agtgcaaattcgtaggggaatcaaac

SEQ ID NO: 10853 - DNA, 47 bp, synthetic construct
  misc_feature 1..47: note = Description of Artificial Sequence: Synthetic oligonucleotide
  source 1..47: mol_type = other DNA
agtggattcagtacgccaaagatcaatggttgaaagcaaatcacaac

SEQ ID NO: 10854 - DNA, 36 bp, synthetic construct
  misc_feature 1..36: note = Description of Artificial Sequence: Synthetic oligonucleotide
  source 1..36: mol_type = other DNA
agtgtaacaaaccctgatctgagatcaatccacgac

SEQ ID NO: 10855 - DNA, 36 bp, synthetic construct
  misc_feature 1..36: note = Description of Artificial Sequence: Synthetic oligonucleotide
  source 1..36: mol_type = other DNA
agtgtaacagacctacgcttggaagcaactcacaac

SEQ ID NO: 10856 - DNA, 36 bp, synthetic construct
  misc_feature 1..36: note = Description of Artificial Sequence: Synthetic oligonucleotide
  source 1..36: mol_type = other DNA
agtgtaacagacctagactagggagcaactcacaac

SEQ ID NO: 10857 - DNA, 36 bp, synthetic construct
  misc_feature 1..36: note = Description of Artificial Sequence: Synthetic oligonucleotide
  source 1..36: mol_type = other DNA
agtgtaacagatccgtccccgagagcagtccgcaac

SEQ ID NO: 10858 - DNA, 37 bp, synthetic construct
  misc_feature 1..37: note = Description of Artificial Sequence: Synthetic oligonucleotide
  source 1..37: mol_type = other DNA
agtgtaaccaaacatcgattcctttcaaaccacaaca

SEQ ID NO: 10859 - DNA, 36 bp, synthetic construct
  misc_feature 1..36: note = Description of Artificial Sequence: Synthetic oligonucleotide
  source 1..36: mol_type = other DNA
agtgtaaccaaactcagcccgcgaccaatccgcaac

SEQ ID NO: 10860 - DNA, 36 bp, synthetic construct
  misc_feature 1..36: note = Description of Artificial Sequence: Synthetic oligonucleotide
  source 1..36: mol_type = other DNA
agtgtaaccaacaccggcctgagaccaatccgcaac

SEQ ID NO: 10861 - DNA, 37 bp, synthetic construct
  misc_feature 1..37: note = Description of Artificial Sequence: Synthetic oligonucleotide
  source 1..37: mol_type = other DNA
agtgtaaccaaccaaggcctatctgcaaatcacaaca

SEQ ID NO: 10862 - DNA, 36 bp, synthetic construct
  misc_feature 1..36: note = Description of Artificial Sequence: Synthetic oligonucleotide
  source 1..36: mol_type = other DNA
agtgtaaccaaccccagcccgcggtcaatccacaac

SEQ ID NO: 10863 - DNA, 36 bp, synthetic construct
  misc_feature 1..36: note = Description of Artificial Sequence: Synthetic oligonucleotide
  source 1..36: mol_type = other DNA
agtgtaaccaaccccgctccgtaaccaatccgcaac

SEQ ID NO: 10864 - DNA, 36 bp, synthetic construct
  misc_feature 1..36: note = Description of Artificial Sequence: Synthetic oligonucleotide
  source 1..36: mol_type = other DNA
agtgtaaccaatcagagcctgcgagcaatccgcgac

SEQ ID NO: 10865 - DNA, 36 bp, synthetic construct
  misc_feature 1..36: note = Description of Artificial Sequence: Synthetic oligonucleotide
  source 1..36: mol_type = other DNA
agtgtaaccaatcccagcccgcggtcaatccacaac

SEQ ID NO: 10866 - DNA, 36 bp, synthetic construct
  misc_feature 1..36: note = Description of Artificial Sequence: Synthetic oligonucleotide
  source 1..36: mol_type = other DNA
agtgtaaccaatcccggcccgcggtcaatccacaac

SEQ ID NO: 10867 - DNA, 36 bp, synthetic construct
  misc_feature 1..36: note = Description of Artificial Sequence: Synthetic oligonucleotide
  source 1..36: mol_type = other DNA
agtgtaaccaatcccggcccgtgagcaatccgcaac

SEQ ID NO: 10868 - DNA, 36 bp, synthetic construct
  misc_feature 1..36: note = Description of Artificial Sequence: Synthetic oligonucleotide
  source 1..36: mol_type = other DNA
agtgtaaccaatcccggcctgggagcaatccgcaac

SEQ ID NO: 10869 - DNA, 36 bp, synthetic construct
  misc_feature 1..36: note = Description of Artificial Sequence: Synthetic oligonucleotide
  source 1..36: mol_type = other DNA
agtgtaaccaatcttggcctgagaccaatccgcaac

SEQ ID NO: 10870 - DNA, 36 bp, synthetic construct
  misc_feature 1..36: note = Description of Artificial Sequence: Synthetic oligonucleotide
  source 1..36: mol_type = other DNA
agtgtaaccagccccggcccgagatcaatccacagc

SEQ ID NO: 10871 - DNA, 36 bp, synthetic construct
  misc_feature 1..36: note = Description of Artificial Sequence: Synthetic oligonucleotide
  source 1..36: mol_type = other DNA
agtgtaaccagccctgctccggagtcaatccacaac

SEQ ID NO: 10872 - DNA, 36 bp, synthetic construct
  misc_feature 1..36: note = Description of Artificial Sequence: Synthetic oligonucleotide
  source 1..36: mol_type = other DNA
agtgtaaccgaaccgagacggggagcaaaccacaac

SEQ ID NO: 10873 - DNA, 36 bp, synthetic construct
  misc_feature 1..36: note = Description of Artificial Sequence: Synthetic oligonucleotide
  source 1..36: mol_type = other DNA
agtgtaaccgaccaaggcctatccgcaattcacaac

SEQ ID NO: 10874 - DNA, 36 bp, synthetic construct
  misc_feature 1..36: note = Description of Artificial Sequence: Synthetic oligonucleotide
  source 1..36: mol_type = other DNA
agtgtaaccgaccaaggtctatctgcaaatcacaac

SEQ ID NO: 10875 - DNA, 36 bp, synthetic construct
  misc_feature 1..36: note = Description of Artificial Sequence: Synthetic oligonucleotide
  source 1..36: mol_type = other DNA
agtgtaaccgaccccggcctgcgagcaatccgcaac

SEQ ID NO: 10876 - DNA, 36 bp, synthetic construct
  misc_feature 1..36: note = Description of Artificial Sequence: Synthetic oligonucleotide
  source 1..36: mol_type = other DNA
agtgtaaccgactaaggtctaccgacaaatcacaac

SEQ ID NO: 10877 - DNA, 36 bp, synthetic construct
  misc_feature 1..36: note = Description of Artificial Sequence: Synthetic oligonucleotide
  source 1..36: mol_type = other DNA
agtgtaaccgactaaggtctatccgcaaatcacaac

SEQ ID NO: 10878 - DNA, 36 bp, synthetic construct
  misc_feature 1..36: note = Description of Artificial Sequence: Synthetic oligonucleotide
  source 1..36: mol_type = other DNA
agtgtaaccgactaaggtctatctgcaaatcacaac

SEQ ID NO: 10879 - DNA, 36 bp, synthetic construct
  misc_feature 1..36: note = Description of Artificial Sequence: Synthetic oligonucleotide
  source 1..36: mol_type = other DNA
agtgtaaccgagcgacgctccccgccaaaccacggc

SEQ ID NO: 10880 - DNA, 36 bp, synthetic construct
  misc_feature 1..36: note = Description of Artificial Sequence: Synthetic oligonucleotide
  source 1..36: mol_type = other DNA
agtgtaaccgagcgacgcttcccgacaaaccacggc

SEQ ID NO: 10881 - DNA, 36 bp, synthetic construct
  misc_feature 1..36: note = Description of Artificial Sequence: Synthetic oligonucleotide
  source 1..36: mol_type = other DNA
agtgtaaccgatcagggtccgtaggccacccacaac

SEQ ID NO: 10882 - DNA, 36 bp, synthetic construct
  misc_feature 1..36: note = Description of Artificial Sequence: Synthetic oligonucleotide
  source 1..36: mol_type = other DNA
agtgtaaccgatccccgcctgcgagcaagccgcaac

SEQ ID NO: 10883 - DNA, 37 bp, synthetic construct
  misc_feature 1..37: note = Description of Artificial Sequence: Synthetic oligonucleotide
  source 1..37: mol_type = other DNA
agtgtaaccgatcccgatccggaatcaacccacaacc

SEQ ID NO: 10884 - DNA, 36 bp, synthetic construct
  misc_feature 1..36: note = Description of Artificial Sequence: Synthetic oligonucleotide
  source 1..36: mol_type = other DNA
agtgtaaccgatccctgcctgctggcaatccgcaac

SEQ ID NO: 10885 - DNA, 36 bp, synthetic construct
  misc_feature 1..36: note = Description of Artificial Sequence: Synthetic oligonucleotide
  source 1..36: mol_type = other DNA
agtgtaaccgatccgaatccgggagcaaaccccaac

SEQ ID NO: 10886 - DNA, 37 bp, synthetic construct
  misc_feature 1..37: note = Description of Artificial Sequence: Synthetic oligonucleotide
  source 1..37: mol_type = other DNA
agtgtaacggatcagagcccgggagcgattcacaact

SEQ ID NO: 10887 - DNA, 36 bp, synthetic construct
  misc_feature 1..36: note = Description of Artificial Sequence: Synthetic oligonucleotide
  source 1..36: mol_type = other DNA
agtgtaactaatcccgacctgatgtcaatccacaac

SEQ ID NO: 10888 - DNA, 36 bp, synthetic construct
  misc_feature 1..36: note = Description of Artificial Sequence: Synthetic oligonucleotide
  source 1..36: mol_type = other DNA
agtgtaactaatcccgacctgatgtcaattcacaac

SEQ ID NO: 10889 - DNA, 36 bp, synthetic construct
  misc_feature 1..36: note = Description of Artificial Sequence: Synthetic oligonucleotide
  source 1..36: mol_type = other DNA
agtgtaactgactggcgcctgcccgcaacccacaac

SEQ ID NO: 10890 - DNA, 36 bp, synthetic construct
  misc_feature 1..36: note = Description of Artificial Sequence: Synthetic oligonucleotide
  source 1..36: mol_type = other DNA
agtgtaactgactggcgcctgtccgcaacccacaac

SEQ ID NO: 10891 - DNA, 36 bp, synthetic construct
  misc_feature 1..36: note = Description of Artificial Sequence: Synthetic oligonucleotide
  source 1..36: mol_type = other DNA
agtgtaactgatcccagcccgcagtcaattcacaac

SEQ ID NO: 10892 - DNA, 36 bp, synthetic construct
  misc_feature 1..36: note = Description of Artificial Sequence: Synthetic oligonucleotide
  source 1..36: mol_type = other DNA
agtgtaactgatcccggcctgcggtcaatccacaac

SEQ ID NO: 10893 - DNA, 36 bp, synthetic construct
  misc_feature 1..36: note = Description of Artificial Sequence: Synthetic oligonucleotide
  source 1..36: mol_type = other DNA
agtgtaatcaggcggccttccccgtcagaccacggc

SEQ ID NO: 10894 - DNA, 36 bp, synthetic construct
  misc_feature 1..36: note = Description of Artificial Sequence: Synthetic oligonucleotide
  source 1..36: mol_type = other DNA
agtgtaatcaggtagcggttcctgtcaaatcacaac

SEQ ID NO: 10895 - DNA, 36 bp, synthetic construct
  misc_feature 1..36: note = Description of Artificial Sequence: Synthetic oligonucleotide
  source 1..36: mol_type = other DNA
agtgtaatcgaccccagcctgcgagcaagccgcaac

SEQ ID NO: 10896 - DNA, 36 bp, synthetic construct
  misc_feature 1..36: note = Description of Artificial Sequence: Synthetic oligonucleotide
  source 1..36: mol_type = other DNA
agtgtaatcgaccccagcctgcgagcaatccgcaac

SEQ ID NO: 10897 - DNA, 36 bp, synthetic construct
  misc_feature 1..36: note = Description of Artificial Sequence: Synthetic oligonucleotide
  source 1..36: mol_type = other DNA
agtgtaatcgaccccagcctgtgagcaaaccgcaac

SEQ ID NO: 10898 - DNA, 36 bp, synthetic construct
  misc_feature 1..36: note = Description of Artificial Sequence: Synthetic oligonucleotide
  source 1..36: mol_type = other DNA
agtgtaatcgaccccggcctgcgagcaagccgcaac

SEQ ID NO: 10899 - DNA, 36 bp, synthetic construct
  misc_feature 1..36: note = Description of Artificial Sequence: Synthetic oligonucleotide
  source 1..36: mol_type = other DNA
agtgtaatcgaccccggcctgcgagcaaggcgcaac

SEQ ID NO: 10900 - DNA, 36 bp, synthetic construct
  misc_feature 1..36: note = Description of Artificial Sequence: Synthetic oligonucleotide
  source 1..36: mol_type = other DNA
agtgtaatcgagcgacgcgtccggcgaaaccacggc

SEQ ID NO: 10901 - DNA, 36 bp, synthetic construct
  misc_feature 1..36: note = Description of Artificial Sequence: Synthetic oligonucleotide
  source 1..36: mol_type = other DNA
agtgtaatcgagcgacgctccccgcgaaaccacggc

SEQ ID NO: 10902 - DNA, 36 bp, synthetic construct
  misc_feature 1..36: note = Description of Artificial Sequence: Synthetic oligonucleotide
  source 1..36: mol_type = other DNA
agtgtaatcgagcggcctctccggtcagaccacggc

SEQ ID NO: 10903 - DNA, 36 bp, synthetic construct
  misc_feature 1..36: note = Description of Artificial Sequence: Synthetic oligonucleotide
  source 1..36: mol_type = other DNA
agtgtaatcgagcggcggttgtcggcgggccacagc

SEQ ID NO: 10904 - DNA, 36 bp, synthetic construct
  misc_feature 1..36: note = Description of Artificial Sequence: Synthetic oligonucleotide
  source 1..36: mol_type = other DNA
agtgtaatcgatcagggcctgcgggcaatccacaac

SEQ ID NO: 10905 - DNA, 36 bp, synthetic construct
  misc_feature 1..36: note = Description of Artificial Sequence: Synthetic oligonucleotide
  source 1..36: mol_type = other DNA
agtgtaatcgatcccgcctcgcgagcaagccgcaac

SEQ ID NO: 10906 - DNA, 37 bp, synthetic construct
  misc_feature 1..37: note = Description of Artificial Sequence: Synthetic oligonucleotide
  source 1..37: mol_type = other DNA
agtgtaatcgatcccggcccgcaagcaacccgcaaca

SEQ ID NO: 10907 - DNA, 36 bp, synthetic construct
  misc_feature 1..36: note = Description of Artificial Sequence: Synthetic oligonucleotide
  source 1..36: mol_type = other DNA
agtgtaatcgatcccggcccgcgagcaacgcacaac

SEQ ID NO: 10908 - DNA, 36 bp, synthetic construct
  misc_feature 1..36: note = Description of Artificial Sequence: Synthetic oligonucleotide
  source 1..36: mol_type = other DNA
agtgtacatgagcggtgattcccggccatccccagc

SEQ ID NO: 10909 - DNA, 36 bp, synthetic construct
  misc_feature 1..36: note = Description of Artificial Sequence: Synthetic oligonucleotide
  source 1..36: mol_type = other DNA
agtgtaccagagcagcgattcctttcaagccataac

SEQ ID NO: 10910 - DNA, 37 bp, synthetic construct
  misc_feature 1..37: note = Description of Artificial Sequence: Synthetic oligonucleotide
  source 1..37: mol_type = other DNA
agtgtaccagagcgacgattccccgcaagccacagcc

SEQ ID NO: 10911 - DNA, 36 bp, synthetic construct
  misc_feature 1..36: note = Description of Artificial Sequence: Synthetic oligonucleotide
  source 1..36: mol_type = other DNA
agtgtaccagagcggcgattccccgcaagccacagc

SEQ ID NO: 10912 - DNA, 36 bp, synthetic construct
  misc_feature 1..36: note = Description of Artificial Sequence: Synthetic oligonucleotide
  source 1..36: mol_type = other DNA
agtgtacccgagcggcgattcccttcaagccacagc

SEQ ID NO: 10913 - DNA, 36 bp, synthetic construct
  misc_feature 1..36: note = Description of Artificial Sequence: Synthetic oligonucleotide
  source 1..36: mol_type = other DNA
agtgtacccgatcccgacccgcgaccaatccgcaac

SEQ ID NO: 10914 - DNA, 36 bp, synthetic construct
  misc_feature 1..36: note = Description of Artificial Sequence: Synthetic oligonucleotide
  source 1..36: mol_type = other DNA
agtgtacctaagcggggattttctgcaagccacagc

SEQ ID NO: 10915 - DNA, 36 bp, synthetic construct
  misc_feature 1..36: note = Description of Artificial Sequence: Synthetic oligonucleotide
  source 1..36: mol_type = other DNA
agtgtacctcagaagcgattcccggcaaaccatagc

SEQ ID NO: 10916 - DNA, 36 bp, synthetic construct
  misc_feature 1..36: note = Description of Artificial Sequence: Synthetic oligonucleotide
  source 1..36: mol_type = other DNA
agtgtacctcagcagcggttcccggcaaaccatagc

SEQ ID NO: 10917 - DNA, 36 bp, synthetic construct
  misc_feature 1..36: note = Description of Artificial Sequence: Synthetic oligonucleotide
  source 1..36: mol_type = other DNA
agtgtacctcagcggcgcttcccggcaaaccatagc

SEQ ID NO: 10918 - DNA, 36 bp, synthetic construct
  misc_feature 1..36: note = Description of Artificial Sequence: Synthetic oligonucleotide
  source 1..36: mol_type = other DNA
agtgtacctgagccgcgattctcgaccatccccagc

SEQ ID NO: 10919 - DNA, 36 bp, synthetic construct
  misc_feature 1..36: note = Description of Artificial Sequence: Synthetic oligonucleotide
  source 1..36: mol_type = other DNA
agtgtacctgagcggcgacccccggccaaccccagc

SEQ ID NO: 10920 - DNA, 36 bp, synthetic construct
  misc_feature 1..36: note = Description of Artificial Sequence: Synthetic oligonucleotide
  source 1..36: mol_type = other DNA
agtgtacctgagcggcgactcccttcaagccacagc

SEQ ID NO: 10921 - DNA, 36 bp, synthetic construct
  misc_feature 1..36: note = Description of Artificial Sequence: Synthetic oligonucleotide
  source 1..36: mol_type = other DNA
agtgtacctgagcggcgatccccggccaaccccagc

SEQ ID NO: 10922 - DNA, 36 bp, synthetic construct
  misc_feature 1..36: note = Description of Artificial Sequence: Synthetic oligonucleotide
  source 1..36: mol_type = other DNA
agtgtacctgagcggcgattccccgcaagccacagc

SEQ ID NO: 10923 - DNA, 36 bp, synthetic construct
  misc_feature 1..36: note = Description of Artificial Sequence: Synthetic oligonucleotide
  source 1..36: mol_type = other DNA
agtgtacctgagcggcgattcccgtcaagccacagc

SEQ ID NO: 10924 - DNA, 36 bp, synthetic construct
  misc_feature 1..36: note = Description of Artificial Sequence: Synthetic oligonucleotide
  source 1..36: mol_type = other DNA
agtgtacctgagcggcgattcctgtcaagccacaac

SEQ ID NO: 10925 - DNA, 36 bp, synthetic construct
  misc_feature 1..36: note = Description of Artificial Sequence: Synthetic oligonucleotide
  source 1..36: mol_type = other DNA
agtgtacctgagcggcgattctccgcaagccccagc

SEQ ID NO: 10926 - DNA, 36 bp, synthetic construct
  misc_feature 1..36: note = Description of Artificial Sequence: Synthetic oligonucleotide
  source 1..36: mol_type = other DNA
agtgtacctgagcggcgattctcgaccatccccagc

SEQ ID NO: 10927 - DNA, 36 bp, synthetic construct
  misc_feature 1..36: note = Description of Artificial Sequence: Synthetic oligonucleotide
  source 1..36: mol_type = other DNA
agtgtacctgagcggcgattggttgcaagccccagc

SEQ ID NO: 10928 - DNA, 36 bp, synthetic construct
  misc_feature 1..36: note = Description of Artificial Sequence: Synthetic oligonucleotide
  source 1..36: mol_type = other DNA
agtgtacgtgagcggcgattcccggccatccccagc

SEQ ID NO: 10929 - DNA, 36 bp, synthetic construct
  misc_feature 1..36: note = Description of Artificial Sequence: Synthetic oligonucleotide
  source 1..36: mol_type = other DNA
agtgtacgtgagcggtgaatcccggccatccccagc

SEQ ID NO: 10930 - DNA, 36 bp, synthetic construct
  misc_feature 1..36: note = Description of Artificial Sequence: Synthetic oligonucleotide
  source 1..36: mol_type = other DNA
agtgtacgtgagcggtgattcccggccatccccagc

SEQ ID NO: 10931 - DNA, 36 bp, synthetic construct
  misc_feature 1..36: note = Description of Artificial Sequence: Synthetic oligonucleotide
  source 1..36: mol_type = other DNA
agtgtactcgagcggcggttgtccgcgggccacagc

SEQ ID NO: 10932 - DNA, 36 bp, synthetic construct
  misc_feature 1..36: note = Description of Artificial Sequence: Synthetic oligonucleotide
  source 1..36: mol_type = other DNA
agtgtactcgttcccggcctgcgatcaatccacaac

SEQ ID NO: 10933 - DNA, 35 bp, synthetic construct
  misc_feature 1..35: note = Description of Artificial Sequence: Synthetic oligonucleotide
  source 1..35: mol_type = other DNA
agtgtacttaagcggcgattgcccgtcatccacag

SEQ ID NO: 10934 - DNA, 36 bp, synthetic construct
  misc_feature 1..36: note = Description of Artificial Sequence: Synthetic oligonucleotide
  source 1..36: mol_type = other DNA
agtgtacttaagcggcgattgcccgtcatccacagc

SEQ ID NO: 10935 - DNA, 36 bp, synthetic construct
  misc_feature 1..36: note = Description of Artificial Sequence: Synthetic oligonucleotide
  source 1..36: mol_type = other DNA
agtgtacttaagcggtgattttctgcaagccccagc

SEQ ID NO: 10936 - DNA, 36 bp, synthetic construct
  misc_feature 1..36: note = Description of Artificial Sequence: Synthetic oligonucleotide
  source 1..36: mol_type = other DNA
agtgtacttaggaaacggttcttcttcaacaacaac

SEQ ID NO: 10937 - DNA, 36 bp, synthetic construct
  misc_feature 1..36: note = Description of Artificial Sequence: Synthetic oligonucleotide
  source 1..36: mol_type = other DNA
agtgtacttgagcggagattgcgggccaactccagc

SEQ ID NO: 10938 - DNA, 36 bp, synthetic construct
  misc_feature 1..36: note = Description of Artificial Sequence: Synthetic oligonucleotide
  source 1..36: mol_type = other DNA
agtgtacttgagcggcaattctcggccaaccccagc

SEQ ID NO: 10939 - DNA, 36 bp, synthetic construct
  misc_feature 1..36: note = Description of Artificial Sequence: Synthetic oligonucleotide
  source 1..36: mol_type = other DNA
agtgtacttgagcggcccctcacgtcagaccacggc

SEQ ID NO: 10940 - DNA, 36 bp, synthetic construct
  misc_feature 1..36: note = Description of Artificial Sequence: Synthetic oligonucleotide
  source 1..36: mol_type = other DNA
agtgtacttgagcggcccttcccgcgagaccacggc

SEQ ID NO: 10941 - DNA, 36 bp, synthetic construct
  misc_feature 1..36: note = Description of Artificial Sequence: Synthetic oligonucleotide
  source 1..36: mol_type = other DNA
agtgtacttgagcggcgactcccggccatccccagc

SEQ ID NO: 10942 - DNA, 36 bp, synthetic construct
  misc_feature 1..36: note = Description of Artificial Sequence: Synthetic oligonucleotide
  source 1..36: mol_type = other DNA
agtgtacttgagcggcgatcctcggtcatccccagc

SEQ ID NO: 10943 - DNA, 36 bp, synthetic construct
  misc_feature 1..36: note = Description of Artificial Sequence: Synthetic oligonucleotide
  source 1..36: mol_type = other DNA
agtgtacttgagcggcgattcccggccatccccagc

SEQ ID NO: 10944 - DNA, 36 bp, synthetic construct
  misc_feature 1..36: note = Description of Artificial Sequence: Synthetic oligonucleotide
  source 1..36: mol_type = other DNA
agtgtacttgagcggtgaatcccggccatccccagc

SEQ ID NO: 10945 - DNA, 36 bp, synthetic construct
  misc_feature 1..36: note = Description of Artificial Sequence: Synthetic oligonucleotide
  source 1..36: mol_type = other DNA
agtgtacttgagcggtgaatcccggccatccctagc

SEQ ID NO: 10946 - DNA, 36 bp, synthetic construct
  misc_feature 1..36: note = Description of Artificial Sequence: Synthetic oligonucleotide
  source 1..36: mol_type = other DNA
agtgtacttgagcggtgattctcggccaaccccagc

SEQ ID NO: 10947 - DNA, 36 bp, synthetic construct
  misc_feature 1..36: note = Description of Artificial Sequence: Synthetic oligonucleotide
  source 1..36: mol_type = other DNA
agtgtacttgagcggtgattcttggccatccccagc

SEQ ID NO: 10948 - DNA, 36 bp, synthetic construct
  misc_feature 1..36: note = Description of Artificial Sequence: Synthetic oligonucleotide
  source 1..36: mol_type = other DNA
agtgtacttgagctgagattctttgcaagccacaac

SEQ ID NO: 10949 - DNA, 36 bp, synthetic construct
  misc_feature 1..36: note = Description of Artificial Sequence: Synthetic oligonucleotide
  source 1..36: mol_type = other DNA
agtgtagcaaaacgagaagcgggcgcaatccgcagc

SEQ ID NO: 10950 - DNA, 36 bp, synthetic construct
  misc_feature 1..36: note = Description of Artificial Sequence: Synthetic oligonucleotide
  source 1..36: mol_type = other DNA
agtgtagcaaaccgagagatggccgcaatccgcagc

SEQ ID NO: 10951 - DNA, 36 bp, synthetic construct
  misc_feature 1..36: note = Description of Artificial Sequence: Synthetic oligonucleotide
  source 1..36: mol_type = other DNA
agtgtagcaaaccgggagacgggcgcaatccgcagc

SEQ ID NO: 10952 - DNA, 36 bp, synthetic construct
  misc_feature 1..36: note = Description of Artificial Sequence: Synthetic oligonucleotide
  source 1..36: mol_type = other DNA
agtgtagcaaacctaggaacggccgcaaaccgcagc

SEQ ID NO: 10953 - DNA, 36 bp, synthetic construct
  misc_feature 1..36: note = Description of Artificial Sequence: Synthetic oligonucleotide
  source 1..36: mol_type = other DNA
agtgtagcaaatcgagagacggccgcaatccgcagc

SEQ ID NO: 10954 - DNA, 36 bp, synthetic construct
  misc_feature 1..36: note = Description of Artificial Sequence: Synthetic oligonucleotide
  source 1..36: mol_type = other DNA
agtgtagcaaatcgaggagcggccgcaatccgcagc

SEQ ID NO: 10955 - DNA, 37 bp, synthetic construct
  misc_feature 1..37: note = Description of Artificial Sequence: Synthetic oligonucleotide
  source 1..37: mol_type = other DNA
agtgtagcagatactgatcggcacggcagccgtaact

SEQ ID NO: 10956 - DNA, 36 bp, synthetic construct
  misc_feature 1..36: note = Description of Artificial Sequence: Synthetic oligonucleotide
  source 1..36: mol_type = other DNA
agtgtagcagatcttgatcggtatggcagccgtaac

SEQ ID NO: 10957 - DNA, 36 bp, synthetic construct
  misc_feature 1..36: note = Description of Artificial Sequence: Synthetic oligonucleotide
  source 1..36: mol_type = other DNA
agtgtagcagatgctgatcggtatggcagccgtaac

SEQ ID NO: 10958 - DNA, 36 bp, synthetic construct
  misc_feature 1..36: note = Description of Artificial Sequence: Synthetic oligonucleotide
  source 1..36: mol_type = other DNA
agtgtagcagattgggatttgcgctcgggccggaac

SEQ ID NO: 10959 - DNA, 36 bp, synthetic construct
  misc_feature 1..36: note = Description of Artificial Sequence: Synthetic oligonucleotide
  source 1..36: mol_type = other DNA
agtgtagccattcagaaatcgcggtccagcggcaac

SEQ ID NO: 10960 - DNA, 36 bp, synthetic construct
  misc_feature 1..36: note = Description of Artificial Sequence: Synthetic oligonucleotide
  source 1..36: mol_type = other DNA
agtgtagccgaccaaggcttaactgcaattcacaac

SEQ ID NO: 10961 - DNA, 36 bp, synthetic construct
  misc_feature 1..36: note = Description of Artificial Sequence: Synthetic oligonucleotide
  source 1..36: mol_type = other DNA
agtgtagccgatgggaaaccgcggtccagccgcaac

SEQ ID NO: 10962 - DNA, 36 bp, synthetic construct
  misc_feature 1..36: note = Description of Artificial Sequence: Synthetic oligonucleotide
  source 1..36: mol_type = other DNA
agtgtagccgatgggaaaccgtggtccagccgcaac

SEQ ID NO: 10963 - DNA, 36 bp, synthetic construct
  misc_feature 1..36: note = Description of Artificial Sequence: Synthetic oligonucleotide
  source 1..36: mol_type = other DNA
agtgtagccgatggggaaacgagggccaaccgcaac

SEQ ID NO: 10964 - DNA, 36 bp, synthetic construct
  misc_feature 1..36: note = Description of Artificial Sequence: Synthetic oligonucleotide
  source 1..36: mol_type = other DNA
agtgtagcgaaacgaaagacggtcgcaagccgcagc

SEQ ID NO: 10965 - DNA, 37 bp, synthetic construct
  misc_feature 1..37: note = Description of Artificial Sequence: Synthetic oligonucleotide
  source 1..37: mol_type = other DNA
agtgtagcgagacctgatgcggccgcaaaccgcaaca

SEQ ID NO: 10966 - DNA, 36 bp, synthetic construct
  misc_feature 1..36: note = Description of Artificial Sequence: Synthetic oligonucleotide
  source 1..36: mol_type = other DNA
agtgtagcgatgcccgatgcggccgcaaaccgcagc

SEQ ID NO: 10967 - DNA, 37 bp, synthetic construct
  misc_feature 1..37: note = Description of Artificial Sequence: Synthetic oligonucleotide
  source 1..37: mol_type = other DNA
agtgtagcgcatccggggtgagagagggagctacaac

SEQ ID NO: 10968 - DNA, 36 bp, synthetic construct
  misc_feature 1..36: note = Description of Artificial Sequence: Synthetic oligonucleotide
  source 1..36: mol_type = other DNA
agtgtagctatccggggtgagagagggagctacaac

SEQ ID NO: 10969 - DNA, 36 bp, synthetic construct
  misc_feature 1..36: note = Description of Artificial Sequence: Synthetic oligonucleotide
  source 1..36: mol_type = other DNA
agtgtagctatccggggtgagagtgggagctacaac

SEQ ID NO: 10970 - DNA, 36 bp, synthetic construct
  misc_feature 1..36: note = Description of Artificial Sequence: Synthetic oligonucleotide
  source 1..36: mol_type = other DNA
agtgtagctattcagaaatccgggtcaatccgcaac

SEQ ID NO: 10971 - DNA, 36 bp, synthetic construct
  misc_feature 1..36: note = Description of Artificial Sequence: Synthetic oligonucleotide
  source 1..36: mol_type = other DNA
agtgtagctattcagaaatcttggtcaatccgcaac

SEQ ID NO: 10972 - DNA, 36 bp, synthetic construct
  misc_feature 1..36: note = Description of Artificial Sequence: Synthetic oligonucleotide
  source 1..36: mol_type = other DNA
agtgtagctgatcgatgcctgcccgggattcacaac

SEQ ID NO: 10973 - DNA, 36 bp, synthetic construct
  misc_feature 1..36: note = Description of Artificial Sequence: Synthetic oligonucleotide
  source 1..36: mol_type = other DNA
agtgtagtcgatcccagcccgcgatcaatccgcaac

SEQ ID NO: 10974 - DNA, 37 bp, synthetic construct
  misc_feature 1..37: note = Description of Artificial Sequence: Synthetic oligonucleotide
  source 1..37: mol_type = other DNA
agtgtagttcatccggggtgagagagggagctacaac

SEQ ID NO: 10975 - DNA, 36 bp, synthetic construct
  misc_feature 1..36: note = Description of Artificial Sequence: Synthetic oligonucleotide
  source 1..36: mol_type = other DNA
agtgtagttgagtggcgcttctcagcctcccccagc

SEQ ID NO: 10976 - DNA, 36 bp, synthetic construct
  misc_feature 1..36: note = Description of Artificial Sequence: Synthetic oligonucleotide
  source 1..36: mol_type = other DNA
agtgtatcaaagataggaatctcggccagccaaagc

SEQ ID NO: 10977 - DNA, 36 bp, synthetic construct
  misc_feature 1..36: note = Description of Artificial Sequence: Synthetic oligonucleotide
  source 1..36: mol_type = other DNA
agtgtatcaaagcgacgactccctgtaaacctcagc

SEQ ID NO: 10978 - DNA, 36 bp, synthetic construct
  misc_feature 1..36: note = Description of Artificial Sequence: Synthetic oligonucleotide
  source 1..36: mol_type = other DNA
agtgtatcaaagcgacgagtccccgtaaaccacagc

SEQ ID NO: 10979 - DNA, 36 bp, synthetic construct
  misc_feature 1..36: note = Description of Artificial Sequence: Synthetic oligonucleotide
  source 1..36: mol_type = other DNA
agtgtatcaagcattccgatggtggggtgtcggaac

SEQ ID NO: 10980 - DNA, 36 bp, synthetic construct
  misc_feature 1..36: note = Description of Artificial Sequence: Synthetic oligonucleotide
  source 1..36: mol_type = other DNA
agtgtatcaagtattccgatggtggggtgtcggaac

SEQ ID NO: 10981 - DNA, 36 bp, synthetic construct
  misc_feature 1..36: note = Description of Artificial Sequence: Synthetic oligonucleotide
  source 1..36: mol_type = other DNA
agtgtatcagaccagagcttggaaccaacctacaac

SEQ ID NO: 10982 - DNA, 36 bp, synthetic construct
  misc_feature 1..36: note = Description of Artificial Sequence: Synthetic oligonucleotide
  source 1..36: mol_type = other DNA
agtgtatcagagcgacgcttccggccaaaccacggc

SEQ ID NO: 10983 - DNA, 36 bp, synthetic construct
  misc_feature 1..36: note = Description of Artificial Sequence: Synthetic oligonucleotide
  source 1..36: mol_type = other DNA
agtgtatcagagcggagattcccggccagccaaagc

SEQ ID NO: 10984 - DNA, 36 bp, synthetic construct
  misc_feature 1..36: note = Description of Artificial Sequence: Synthetic oligonucleotide
  source 1..36: mol_type = other DNA
agtgtatcagagcggccagtccctgccaatcacagc

SEQ ID NO: 10985 - DNA, 36 bp, synthetic construct
  misc_feature 1..36: note = Description of Artificial Sequence: Synthetic oligonucleotide
  source 1..36: mol_type = other DNA
agtgtatcagatcagaaccggggagccttccccaac

SEQ ID NO: 10986 - DNA, 36 bp, synthetic construct
  misc_feature 1..36: note = Description of Artificial Sequence: Synthetic oligonucleotide
  source 1..36: mol_type = other DNA
agtgtatcaggcattccgatggtggggtgtcggaac

SEQ ID NO: 10987 - DNA, 36 bp, synthetic construct
  misc_feature 1..36: note = Description of Artificial Sequence: Synthetic oligonucleotide
  source 1..36: mol_type = other DNA
agtgtatccaagcagcgcttccccgcgaaccacagc

SEQ ID NO: 10988 - DNA, 36 bp, synthetic construct
  misc_feature 1..36: note = Description of Artificial Sequence: Synthetic oligonucleotide
  source 1..36: mol_type = other DNA
agtgtatccaagcggcctttgcccgccaatcacaac

SEQ ID NO: 10989 - DNA, 36 bp, synthetic construct
  misc_feature 1..36: note = Description of Artificial Sequence: Synthetic oligonucleotide
  source 1..36: mol_type = other DNA
agtgtatccaagcggcgactcccggccaatcccaac

SEQ ID NO: 10990 - DNA, 36 bp, synthetic construct
  misc_feature 1..36: note = Description of Artificial Sequence: Synthetic oligonucleotide
  source 1..36: mol_type = other DNA
agtgtatccgacctcagcccgcgagcaatccgcaac

SEQ ID NO: 10991 - DNA, 36 bp, synthetic construct
  misc_feature 1..36: note = Description of Artificial Sequence: Synthetic oligonucleotide
  source 1..36: mol_type = other DNA
agtgtatccgagcgacgattccccgcaagccacagc

SEQ ID NO: 10992 - DNA, 36 bp, synthetic construct
  misc_feature 1..36: note = Description of Artificial Sequence: Synthetic oligonucleotide
  source 1..36: mol_type = other DNA
agtgtatccgagcgacgattccctgcaagccacagc

SEQ ID NO: 10993 - DNA, 36 bp, synthetic construct
  misc_feature 1..36: note = Description of Artificial Sequence: Synthetic oligonucleotide
  source 1..36: mol_type = other DNA
agtgtatccgagcgacgattccctgcgaactacagc

SEQ ID NO: 10994 - DNA, 36 bp, synthetic construct
  misc_feature 1..36: note = Description of Artificial Sequence: Synthetic oligonucleotide
  source 1..36: mol_type = other DNA
agtgtatccgagcgacgattccctgcgagccacagc

SEQ ID NO: 10995 - DNA, 36 bp, synthetic construct
  misc_feature 1..36: note = Description of Artificial Sequence: Synthetic oligonucleotide
  source 1..36: mol_type = other DNA
agtgtatccgagcgacgcttcccggcaaaccacagc

SEQ ID NO: 10996 - DNA, 36 bp, synthetic construct
  misc_feature 1..36: note = Description of Artificial Sequence: Synthetic oligonucleotide
  source 1..36: mol_type = other DNA
agtgtatccgagcgacgcttccctgcgaactacagc

SEQ ID NO: 10997 - DNA, 36 bp, synthetic construct
  misc_feature 1..36: note = Description of Artificial Sequence: Synthetic oligonucleotide
  source 1..36: mol_type = other DNA
agtgtatccgagcgacggttccctgcaagccacagc

SEQ ID NO: 10998 - DNA, 36 bp, synthetic construct
  misc_feature 1..36: note = Description of Artificial Sequence: Synthetic oligonucleotide
  source 1..36: mol_type = other DNA
agtgtatccgatcccagcccgcaagcaagccgcaac

SEQ ID NO: 10999 - DNA, 36 bp, synthetic construct
  misc_feature 1..36: note = Description of Artificial Sequence: Synthetic oligonucleotide
  source 1..36: mol_type = other DNA
agtgtatcgaaccgaggagcggccgcaaaccgcagc

SEQ ID NO: 11000 - DNA, 36 bp, synthetic construct
  misc_feature 1..36: note = Description of Artificial Sequence: Synthetic oligonucleotide
  source 1..36: mol_type = other DNA
agtgtatcgaagcagcgattgtttgcctactacaac

SEQ ID NO: 11001 - DNA, 37 bp, synthetic construct
  misc_feature 1..37: note = Description of Artificial Sequence: Synthetic oligonucleotide
  source 1..37: mol_type = other DNA
agtgtatcgaagccgcgactcccggcaagccatagcg

SEQ ID NO: 11002 - DNA, 36 bp, synthetic construct
  misc_feature 1..36: note = Description of Artificial Sequence: Synthetic oligonucleotide
  source 1..36: mol_type = other DNA
agtgtatcgaagccgtgattctcggcaagccatagc

SEQ ID NO: 11003 - DNA, 36 bp, synthetic construct
  misc_feature 1..36: note = Description of Artificial Sequence: Synthetic oligonucleotide
  source 1..36: mol_type = other DNA
agtgtatcgaagccgtgattctcggcaggccatagc

SEQ ID NO: 11004 - DNA, 36 bp, synthetic construct
  misc_feature 1..36: note = Description of Artificial Sequence: Synthetic oligonucleotide
  source 1..36: mol_type = other DNA
agtgtatcgaagtggccattcccagccagccatagc

SEQ ID NO: 11005 - DNA, 36 bp, synthetic construct
  misc_feature 1..36: note = Description of Artificial Sequence: Synthetic oligonucleotide
  source 1..36: mol_type = other DNA
agtgtatctcagaagcgattcccggcaaaccatagc

SEQ ID NO: 11006 - DNA, 36 bp, synthetic construct
  misc_feature 1..36: note = Description of Artificial Sequence: Synthetic oligonucleotide
  source 1..36: mol_type = other DNA
agtgtatctcagaagcggttcccggcaaaccatagc

SEQ ID NO: 11007 - DNA, 36 bp, synthetic construct
  misc_feature 1..36: note = Description of Artificial Sequence: Synthetic oligonucleotide
  source 1..36: mol_type = other DNA
agtgtatctcagaagcggttcccggcaagccatagc

SEQ ID NO: 11008 - DNA, 36 bp, synthetic construct
  misc_feature 1..36: note = Description of Artificial Sequence: Synthetic oligonucleotide
  source 1..36: mol_type = other DNA
agtgtatctcagcagcggttcccggcaaaccatagc

SEQ ID NO: 11009 - DNA, 36 bp, synthetic construct
  misc_feature 1..36: note = Description of Artificial Sequence: Synthetic oligonucleotide
  source 1..36: mol_type = other DNA
agtgtatctcagcggcgcttcccggcaaaccatagc

SEQ ID NO: 11010 - DNA, 37 bp, synthetic construct
  misc_feature 1..37: note = Description of Artificial Sequence: Synthetic oligonucleotide
  source 1..37: mol_type = other DNA
agtgtatctcagcggcgcttcccggcaaaccatagcg

SEQ ID NO: 11011 - DNA, 36 bp, synthetic construct
  misc_feature 1..36: note = Description of Artificial Sequence: Synthetic oligonucleotide
  source 1..36: mol_type = other DNA
agtgtatctcaggagcggttcccgccaaaccctagc

SEQ ID NO: 11012 - DNA, 36 bp, synthetic construct
  misc_feature 1..36: note = Description of Artificial Sequence: Synthetic oligonucleotide
  source 1..36: mol_type = other DNA
agtgtatctgaagaaggtctgaccgagcgccccaac

SEQ ID NO: 11013 - DNA, 36 bp, synthetic construct
  misc_feature 1..36: note = Description of Artificial Sequence: Synthetic oligonucleotide
  source 1..36: mol_type = other DNA
agtgtatctgagcgacgcttcccggcaaaccacagc

SEQ ID NO: 11014 - DNA, 36 bp, synthetic construct
  misc_feature 1..36: note = Description of Artificial Sequence: Synthetic oligonucleotide
  source 1..36: mol_type = other DNA
agtgtatctgagcgacgcttcccggcaggccccagc

SEQ ID NO: 11015 - DNA, 36 bp, synthetic construct
  misc_feature 1..36: note = Description of Artificial Sequence: Synthetic oligonucleotide
  source 1..36: mol_type = other DNA
agtgtatctgagcgccccctgaccgccaatcacagc

SEQ ID NO: 11016 - DNA, 36 bp, synthetic construct
  misc_feature 1..36: note = Description of Artificial Sequence: Synthetic oligonucleotide
  source 1..36: mol_type = other DNA
agtgtatctgagcggccattggctgccaaccacagc

SEQ ID NO: 11017 - DNA, 36 bp, synthetic construct
  misc_feature 1..36: note = Description of Artificial Sequence: Synthetic oligonucleotide
  source 1..36: mol_type = other DNA
agtgtatctgatcccgctctgaaagccaatcgcaac

SEQ ID NO: 11018 - DNA, 36 bp, synthetic construct
  misc_feature 1..36: note = Description of Artificial Sequence: Synthetic oligonucleotide
  source 1..36: mol_type = other DNA
agtgtatctgggcggcgcctcccggcgaaccacaac

SEQ ID NO: 11019 - DNA, 36 bp, synthetic construct
  misc_feature 1..36: note = Description of Artificial Sequence: Synthetic oligonucleotide
  source 1..36: mol_type = other DNA
agtgtattcaagcggaaactgaagtcaaacaacagc

SEQ ID NO: 11020 - DNA, 36 bp, synthetic construct
  misc_feature 1..36: note = Description of Artificial Sequence: Synthetic oligonucleotide
  source 1..36: mol_type = other DNA
agtgtattcagccccgccctgaaagcaatccgcaac

SEQ ID NO: 11021 - DNA, 36 bp, synthetic construct
  misc_feature 1..36: note = Description of Artificial Sequence: Synthetic oligonucleotide
  source 1..36: mol_type = other DNA
agtgtattcgaccccggcctgtgagcaatccgcaac

SEQ ID NO: 11022 - DNA, 36 bp, synthetic construct
  misc_feature 1..36: note = Description of Artificial Sequence: Synthetic oligonucleotide
  source 1..36: mol_type = other DNA
agtgtattcgagcggcggttgtgggccaaccacaac

SEQ ID NO: 11023 - DNA, 36 bp, synthetic construct
  misc_feature 1..36: note = Description of Artificial Sequence: Synthetic oligonucleotide
  source 1..36: mol_type = other DNA
agtgtattcgagcggcggttgtgggccaaccacagc

SEQ ID NO: 11024 - DNA, 36 bp, synthetic construct
  misc_feature 1..36: note = Description of Artificial Sequence: Synthetic oligonucleotide
  source 1..36: mol_type = other DNA
agtgtattcgataggagcctgcccggtcaacccaac

SEQ ID NO: 11025 - DNA, 36 bp, synthetic construct
  misc_feature 1..36: note = Description of Artificial Sequence: Synthetic oligonucleotide
  source 1..36: mol_type = other DNA
agtgtattcgatcccagcccgcgagcagcccgcaac

SEQ ID NO: 11026 - DNA, 36 bp, synthetic construct
  misc_feature 1..36: note = Description of Artificial Sequence: Synthetic oligonucleotide
  source 1..36: mol_type = other DNA
agtgtcaataatacctttttctaatcaatccacaac

SEQ ID NO: 11027 - DNA, 47 bp, synthetic construct
  misc_feature 1..47: note = Description of Artificial Sequence: Synthetic oligonucleotide
  source 1..47: mol_type = other DNA
agtgtgtttagttatttcaaagatacaatctggaatcaattcacaac

SEQ ID NO: 11028 - DNA, 46 bp, synthetic construct
  misc_feature 1..46: note = Description of Artificial Sequence: Synthetic oligonucleotide
  source 1..46: mol_type = other DNA
agtgttgtcaaagatcgttgttctgaaattgaaagcaaatcacaac

SEQ ID NO: 11029 - DNA, 47 bp, synthetic construct
  misc_feature 1..47: note = Description of Artificial Sequence: Synthetic oligonucleotide
  source 1..47: mol_type = other DNA
agtgtttatgcctctgcaaagatactaattttttagcaaatcacaac

SEQ ID NO: 11030 - DNA, 37 bp, synthetic construct
  misc_feature 1..37: note = Description of Artificial Sequence: Synthetic oligonucleotide
  source 1..37: mol_type = other DNA
agttccgataccccaccatcggaatgcctgataaaat

SEQ ID NO: 11031 - DNA, 37 bp, synthetic construct
  misc_feature 1..37: note = Description of Artificial Sequence: Synthetic oligonucleotide
  source 1..37: mol_type = other DNA
agttccggtcagagcacaaatcccaatctgctagact

SEQ ID NO: 11032 - DNA, 37 bp, synthetic construct
  misc_feature 1..37: note = Description of Artificial Sequence: Synthetic oligonucleotide
  source 1..37: mol_type = other DNA
agttccggtcagagcgcacatcccgttttgctagact

SEQ ID NO: 11033 - DNA, 37 bp, synthetic construct
  misc_feature 1..37: note = Description of Artificial Sequence: Synthetic oligonucleotide
  source 1..37: mol_type = other DNA
agttgcattatatctttcttctacatcaaaccacaac

SEQ ID NO: 11034 - DNA, 37 bp, synthetic construct
  misc_feature 1..37: note = Description of Artificial Sequence: Synthetic oligonucleotide
  source 1..37: mol_type = other DNA
agttgcgacttgctttcaggccggggttgattacact

SEQ ID NO: 11035 - DNA, 37 bp, synthetic construct
  misc_feature 1..37: note = Description of Artificial Sequence: Synthetic oligonucleotide
  source 1..37: mol_type = other DNA
agttgcggttggcccacgaatcctgatctgctaaact

SEQ ID NO: 11036 - DNA, 31 bp, synthetic construct
  misc_feature 1..31: note = Description of Artificial Sequence: Synthetic oligonucleotide
  source 1..31: mol_type = other DNA
agttggtctttcttgtccagagtgctagacc

SEQ ID NO: 11037 - DNA, 37 bp, synthetic construct
  misc_feature 1..37: note = Description of Artificial Sequence: Synthetic oligonucleotide
  source 1..37: mol_type = other DNA
agttgtagctccctttctcatttcgcagtgctacaat

SEQ ID NO: 11038 - DNA, 36 bp, synthetic construct
  misc_feature 1..36: note = Description of Artificial Sequence: Synthetic oligonucleotide
  source 1..36: mol_type = other DNA
agttgtatcttatcttattcatcatcaaaccacaac

SEQ ID NO: 11039 - DNA, 37 bp, synthetic construct
  misc_feature 1..37: note = Description of Artificial Sequence: Synthetic oligonucleotide
  source 1..37: mol_type = other DNA
agttgtcctagccccgcctattcccatgtgctagact

SEQ ID NO: 11040 - DNA, 37 bp, synthetic construct
  misc_feature 1..37: note = Description of Artificial Sequence: Synthetic oligonucleotide
  source 1..37: mol_type = other DNA
agttgtgaactgcctacagattagtaccattaacatc

SEQ ID NO: 11041 - DNA, 47 bp, synthetic construct
  misc_feature 1..47: note = Description of Artificial Sequence: Synthetic oligonucleotide
  source 1..47: mol_type = other DNA
agttgtgaattgcttacaatttgtatctttgaaatattgaatgcagc

SEQ ID NO: 11042 - DNA, 47 bp, synthetic construct
  misc_feature 1..47: note = Description of Artificial Sequence: Synthetic oligonucleotide
  source 1..47: mol_type = other DNA
agttgtgaattgctttcaaattattatctttacggataattcgcaat

SEQ ID NO: 11043 - DNA, 47 bp, synthetic construct
  misc_feature 1..47: note = Description of Artificial Sequence: Synthetic oligonucleotide
  source 1..47: mol_type = other DNA
agttgtgaattgctttcaaattgtatctttgacatattgaacacagt

SEQ ID NO: 11044 - DNA, 47 bp, synthetic construct
  misc_feature 1..47: note = Description of Artificial Sequence: Synthetic oligonucleotide
  source 1..47: mol_type = other DNA
agttgtgaattgctttcaagtttttatgatctttggtctttgacatc

SEQ ID NO: 11045 - DNA, 47 bp, synthetic construct
  misc_feature 1..47: note = Description of Artificial Sequence: Synthetic oligonucleotide
  source 1..47: mol_type = other DNA
agttgtgaattgctttcgatttgtatctttgaaatattgaacacagc

SEQ ID NO: 11046 - DNA, 47 bp, synthetic construct
  misc_feature 1..47: note = Description of Artificial Sequence: Synthetic oligonucleotide
  source 1..47: mol_type = other DNA
agttgtgaattgcttttgaattgtatctttgaaatattgagcacaac

SEQ ID NO: 11047 - DNA, 37 bp, synthetic construct
  misc_feature 1..37: note = Description of Artificial Sequence: Synthetic oligonucleotide
  source 1..37: mol_type = other DNA
agttgtgatttgcgtttaggtgatagtcggttacaat

SEQ ID NO: 11048 - DNA, 47 bp, synthetic construct
  misc_feature 1..47: note = Description of Artificial Sequence: Synthetic oligonucleotide
  source 1..47: mol_type = other DNA
agttgtgatttgctttaaattcgtatctttgacatcttataaacaac

SEQ ID NO: 11049 - DNA, 47 bp, synthetic construct
  misc_feature 1..47: note = Description of Artificial Sequence: Synthetic oligonucleotide
  source 1..47: mol_type = other DNA
agttgtgatttgctttcgttctttgaatttatgatatttgccacaac

SEQ ID NO: 11050 - DNA, 37 bp, synthetic construct
  misc_feature 1..37: note = Description of Artificial Sequence: Synthetic oligonucleotide
  source 1..37: mol_type = other DNA
agttgtggattgattaggaatcgatagtattgacagt

SEQ ID NO: 11051 - DNA, 38 bp, synthetic construct
  misc_feature 1..38: note = Description of Artificial Sequence: Synthetic oligonucleotide
  source 1..38: mol_type = other DNA
agttgtggcttgctctcaggcataggtcagttacaata

SEQ ID NO: 11052 - DNA, 37 bp, synthetic construct
  misc_feature 1..37: note = Description of Artificial Sequence: Synthetic oligonucleotide
  source 1..37: mol_type = other DNA
agttgtggtttgatttaaatgatgattattagatatt

SEQ ID NO: 11053 - DNA, 37 bp, synthetic construct
  misc_feature 1..37: note = Description of Artificial Sequence: Synthetic oligonucleotide
  source 1..37: mol_type = other DNA
agttgtggtttgatttcaaagagggataaaaaacatt

SEQ ID NO: 11054 - DNA, 37 bp, synthetic construct
  misc_feature 1..37: note = Description of Artificial Sequence: Synthetic oligonucleotide
  source 1..37: mol_type = other DNA
agttgtgtcttgcactcagacgcggatcagttacaat

SEQ ID NO: 11055 - DNA, 37 bp, synthetic construct
  misc_feature 1..37: note = Description of Artificial Sequence: Synthetic oligonucleotide
  source 1..37: mol_type = other DNA
agttgtttatcatcataaaattgcatcaagccacaac

SEQ ID NO: 11056 - DNA, 36 bp, synthetic construct
  misc_feature 1..36: note = Description of Artificial Sequence: Synthetic oligonucleotide
  source 1..36: mol_type = other DNA
agtttaagccgctcttccggggggggaaggcaaaac

SEQ ID NO: 11057 - DNA, 36 bp, synthetic construct
  misc_feature 1..36: note = Description of Artificial Sequence: Synthetic oligonucleotide
  source 1..36: mol_type = other DNA
agtttacaacctcgggatatgtgctctgtccggaac

SEQ ID NO: 11058 - DNA, 36 bp, synthetic construct
  misc_feature 1..36: note = Description of Artificial Sequence: Synthetic oligonucleotide
  source 1..36: mol_type = other DNA
agtttaccagattgggatatgtgcactggccggaac

SEQ ID NO: 11059 - DNA, 36 bp, synthetic construct
  misc_feature 1..36: note = Description of Artificial Sequence: Synthetic oligonucleotide
  source 1..36: mol_type = other DNA
agtttaccggtcgcgcctctggggggaaggcaaaac

SEQ ID NO: 11060 - DNA, 36 bp, synthetic construct
  misc_feature 1..36: note = Description of Artificial Sequence: Synthetic oligonucleotide
  source 1..36: mol_type = other DNA
agtttactacatcaggatatgcgcactggccggaac

SEQ ID NO: 11061 - DNA, 36 bp, synthetic construct
  misc_feature 1..36: note = Description of Artificial Sequence: Synthetic oligonucleotide
  source 1..36: mol_type = other DNA
agtttactcgattgggatatgagtactggccggaac

SEQ ID NO: 11062 - DNA, 36 bp, synthetic construct
  misc_feature 1..36: note = Description of Artificial Sequence: Synthetic oligonucleotide
  source 1..36: mol_type = other DNA
agtttactcgcactgaatttggaatcaaggcaaagc

SEQ ID NO: 11063 - DNA, 36 bp, synthetic construct
  misc_feature 1..36: note = Description of Artificial Sequence: Synthetic oligonucleotide
  source 1..36: mol_type = other DNA
agtttacttgattgagatatgcgcactgaccggaac

SEQ ID NO: 11064 - DNA, 36 bp, synthetic construct
  misc_feature 1..36: note = Description of Artificial Sequence: Synthetic oligonucleotide
  source 1..36: mol_type = other DNA
agtttagaatcccttggacggggggcaatcccaaac

SEQ ID NO: 11065 - DNA, 36 bp, synthetic construct
  misc_feature 1..36: note = Description of Artificial Sequence: Synthetic oligonucleotide
  source 1..36: mol_type = other DNA
agtttagatcactgggatatgtgctctagccggaac

SEQ ID NO: 11066 - DNA, 36 bp, synthetic construct
  misc_feature 1..36: note = Description of Artificial Sequence: Synthetic oligonucleotide
  source 1..36: mol_type = other DNA
agtttagcaaatcgaaaactgcgcgggaactacaac

SEQ ID NO: 11067 - DNA, 36 bp, synthetic construct
  misc_feature 1..36: note = Description of Artificial Sequence: Synthetic oligonucleotide
  source 1..36: mol_type = other DNA
agtttagcacattgggatttgcgcactgaccggaac

SEQ ID NO: 11068 - DNA, 36 bp, synthetic construct
  misc_feature 1..36: note = Description of Artificial Sequence: Synthetic oligonucleotide
  source 1..36: mol_type = other DNA
agtttagcagataagagaatcgtcgcaactcacaac

SEQ ID NO: 11069 - DNA, 36 bp, synthetic construct
  misc_feature 1..36: note = Description of Artificial Sequence: Synthetic oligonucleotide
  source 1..36: mol_type = other DNA
agtttagcagataagagaatcgttccaactcacaac

SEQ ID NO: 11070 - DNA, 36 bp, synthetic construct
  misc_feature 1..36: note = Description of Artificial Sequence: Synthetic oligonucleotide
  source 1..36: mol_type = other DNA
agtttagcagattgggatatgtgctttgaccggaac

SEQ ID NO: 11071 - DNA, 36 bp, synthetic construct
  misc_feature 1..36: note = Description of Artificial Sequence: Synthetic oligonucleotide
  source 1..36: mol_type = other DNA
agtttagcagattgggatttgcactctggccggaac

SEQ ID NO: 11072 - DNA, 36 bp, synthetic construct
  misc_feature 1..36: note = Description of Artificial Sequence: Synthetic oligonucleotide
  source 1..36: mol_type = other DNA
agtttagcagattgggatttgcgcactgaccggaac

SEQ ID NO: 11073 - DNA, 36 bp, synthetic construct
  misc_feature 1..36: note = Description of Artificial Sequence: Synthetic oligonucleotide
  source 1..36: mol_type = other DNA
agtttagcagattgggatttgtactctgaccggaac

SEQ ID NO: 11074 - DNA, 35 bp, synthetic construct
  misc_feature 1..35: note = Description of Artificial Sequence: Synthetic oligonucleotide
  source 1..35: mol_type = other DNA
agtttagcagattgggatttgtgctctgaccggaa

SEQ ID NO: 11075 - DNA, 36 bp, synthetic construct
  misc_feature 1..36: note = Description of Artificial Sequence: Synthetic oligonucleotide
  source 1..36: mol_type = other DNA
agtttagcaggatagatttggacagacaactatagc

SEQ ID NO: 11076 - DNA, 36 bp, synthetic construct
  misc_feature 1..36: note = Description of Artificial Sequence: Synthetic oligonucleotide
  source 1..36: mol_type = other DNA
agtttagcagtctggtgattgaggaccaaccgcaac

SEQ ID NO: 11077 - DNA, 32 bp, synthetic construct
  misc_feature 1..32: note = Description of Artificial Sequence: Synthetic oligonucleotide
  source 1..32: mol_type = other DNA
agtttagcatacgtttttcatcattctcaaac

SEQ ID NO: 11078 - DNA, 36 bp, synthetic construct
  misc_feature 1..36: note = Description of Artificial Sequence: Synthetic oligonucleotide
  source 1..36: mol_type = other DNA
agtttagcatattgggatttgtgctctggccggaac

SEQ ID NO: 11079 - DNA, 36 bp, synthetic construct
  misc_feature 1..36: note = Description of Artificial Sequence: Synthetic oligonucleotide
  source 1..36: mol_type = other DNA
agtttagcatttcagaaatcgtggtccagccgcaac

SEQ ID NO: 11080 - DNA, 36 bp, synthetic construct
  misc_feature 1..36: note = Description of Artificial Sequence: Synthetic oligonucleotide
  source 1..36: mol_type = other DNA
agtttagccgataggaaatcgcggaccagccgcaac

SEQ ID NO: 11081 - DNA, 36 bp, synthetic construct
  misc_feature 1..36: note = Description of Artificial Sequence: Synthetic oligonucleotide
  source 1..36: mol_type = other DNA
agtttagccgataggaaatcgtgcgccagccgcaac

SEQ ID NO: 11082 - DNA, 36 bp, synthetic construct
  misc_feature 1..36: note = Description of Artificial Sequence: Synthetic oligonucleotide
  source 1..36: mol_type = other DNA
agtttagccgatgaagaatcgcggtccagccgcaac

SEQ ID NO: 11083 - DNA, 36 bp, synthetic construct
  misc_feature 1..36: note = Description of Artificial Sequence: Synthetic oligonucleotide
  source 1..36: mol_type = other DNA
agtttagccgatggggaaacgagggccaaccgcaac

SEQ ID NO: 11084 - DNA, 36 bp, synthetic construct
  misc_feature 1..36: note = Description of Artificial Sequence: Synthetic oligonucleotide
  source 1..36: mol_type = other DNA
agtttagccgatggggatcggaggtccagccgcaac

SEQ ID NO: 11085 - DNA, 36 bp, synthetic construct
  misc_feature 1..36: note = Description of Artificial Sequence: Synthetic oligonucleotide
  source 1..36: mol_type = other DNA
agtttagccgatgggggaatgcgggccagccgcaac

SEQ ID NO: 11086 - DNA, 36 bp, synthetic construct
  misc_feature 1..36: note = Description of Artificial Sequence: Synthetic oligonucleotide
  source 1..36: mol_type = other DNA
agtttagccgcttagagatcgaggaccagccgcaac

SEQ ID NO: 11087 - DNA, 36 bp, synthetic construct
  misc_feature 1..36: note = Description of Artificial Sequence: Synthetic oligonucleotide
  source 1..36: mol_type = other DNA
agtttagccgttcagaaaacgcaggccaaccgcaac

SEQ ID NO: 11088 - DNA, 36 bp, synthetic construct
  misc_feature 1..36: note = Description of Artificial Sequence: Synthetic oligonucleotide
  source 1..36: mol_type = other DNA
agtttagccgtttggaaatcaggagccaaccgcaac

SEQ ID NO: 11089 - DNA, 36 bp, synthetic construct
  misc_feature 1..36: note = Description of Artificial Sequence: Synthetic oligonucleotide
  source 1..36: mol_type = other DNA
agtttagcctaatcagattcgtggggaaacgatggc

SEQ ID NO: 11090 - DNA, 36 bp, synthetic construct
  misc_feature 1..36: note = Description of Artificial Sequence: Synthetic oligonucleotide
  source 1..36: mol_type = other DNA
agtttagcgggtcagggaatggttggccgccaaaac

SEQ ID NO: 11091 - DNA, 36 bp, synthetic construct
  misc_feature 1..36: note = Description of Artificial Sequence: Synthetic oligonucleotide
  source 1..36: mol_type = other DNA
agtttagcggtctggtgatcgagggccaaccgcaac

SEQ ID NO: 11092 - DNA, 36 bp, synthetic construct
  misc_feature 1..36: note = Description of Artificial Sequence: Synthetic oligonucleotide
  source 1..36: mol_type = other DNA
agtttagctgactgggatatgcgctctgaccggaac

SEQ ID NO: 11093 - DNA, 36 bp, synthetic construct
  misc_feature 1..36: note = Description of Artificial Sequence: Synthetic oligonucleotide
  source 1..36: mol_type = other DNA
agtttagctgattaagaatcgtggtccaaccgcaac

SEQ ID NO: 11094 - DNA, 36 bp, synthetic construct
  misc_feature 1..36: note = Description of Artificial Sequence: Synthetic oligonucleotide
  source 1..36: mol_type = other DNA
agtttagctgattagaaatcgtgggccaaccgcaac

SEQ ID NO: 11095 - DNA, 36 bp, synthetic construct
  misc_feature 1..36: note = Description of Artificial Sequence: Synthetic oligonucleotide
  source 1..36: mol_type = other DNA
agtttagctgattaggaaacgcggtccaaccgcaac

SEQ ID NO: 11096 - DNA, 36 bp, synthetic construct
  misc_feature 1..36: note = Description of Artificial Sequence: Synthetic oligonucleotide
  source 1..36: mol_type = other DNA
agtttagtcattcagaattcgaggtccagccgcaac

SEQ ID NO: 11097 - DNA, 36 bp, synthetic construct
  misc_feature 1..36: note = Description of Artificial Sequence: Synthetic oligonucleotide
  source 1..36: mol_type = other DNA
agtttagtcgattggaaaaaagactctggccggaac

SEQ ID NO: 11098 - DNA, 36 bp, synthetic construct
  misc_feature 1..36: note = Description of Artificial Sequence: Synthetic oligonucleotide
  source 1..36: mol_type = other DNA
agtttagtcgattgggatatgtactctgaccggaac

SEQ ID NO: 11099 - DNA, 36 bp, synthetic construct
  misc_feature 1..36: note = Description of Artificial Sequence: Synthetic oligonucleotide
  source 1..36: mol_type = other DNA
agtttagtcggtcagggaatggtcggccgccaaaac

SEQ ID NO: 11100 - DNA, 36 bp, synthetic construct
  misc_feature 1..36: note = Description of Artificial Sequence: Synthetic oligonucleotide
  source 1..36: mol_type = other DNA
agtttatcaagcattccgatggtggggtatcggaac

SEQ ID NO: 11101 - DNA, 36 bp, synthetic construct
  misc_feature 1..36: note = Description of Artificial Sequence: Synthetic oligonucleotide
  source 1..36: mol_type = other DNA
agtttatcaatcattccgatggtggggtatcggaac

SEQ ID NO: 11102 - DNA, 36 bp, synthetic construct
  misc_feature 1..36: note = Description of Artificial Sequence: Synthetic oligonucleotide
  source 1..36: mol_type = other DNA
agtttatcactctgggaaatgagccctggccacaac

SEQ ID NO: 11103 - DNA, 36 bp, synthetic construct
  misc_feature 1..36: note = Description of Artificial Sequence: Synthetic oligonucleotide
  source 1..36: mol_type = other DNA
agtttatcaggcgttccgatggtggggtatcggaac

SEQ ID NO: 11104 - DNA, 36 bp, synthetic construct
  misc_feature 1..36: note = Description of Artificial Sequence: Synthetic oligonucleotide
  source 1..36: mol_type = other DNA
agtttatcgactagttcgatggtggggaatcagaac

SEQ ID NO: 11105 - DNA, 38 bp, synthetic construct
  misc_feature 1..38: note = Description of Artificial Sequence: Synthetic oligonucleotide
  source 1..38: mol_type = other DNA
agtttcaaactaagtgtttactagatataatttgttag

SEQ ID NO: 11106 - DNA, 38 bp, synthetic construct
  misc_feature 1..38: note = Description of Artificial Sequence: Synthetic oligonucleotide
  source 1..38: mol_type = other DNA
agtttcaattgggggtattctgtggtgtagtttgtgac

SEQ ID NO: 11107 - DNA, 38 bp, synthetic construct
  misc_feature 1..38: note = Description of Artificial Sequence: Synthetic oligonucleotide
  source 1..38: mol_type = other DNA
agtttcagaagctggcacttaagaatgatttatgttac

SEQ ID NO: 11108 - DNA, 36 bp, synthetic construct
  misc_feature 1..36: note = Description of Artificial Sequence: Synthetic oligonucleotide
  source 1..36: mol_type = other DNA
agtttcccggtctcgtaaatggaatcaaggcaaagc

SEQ ID NO: 11109 - DNA, 36 bp, synthetic construct
  misc_feature 1..36: note = Description of Artificial Sequence: Synthetic oligonucleotide
  source 1..36: mol_type = other DNA
agtttgacctcttcggcttttgaatcaaggcaaagc

SEQ ID NO: 11110 - DNA, 37 bp, synthetic construct
  misc_feature 1..37: note = Description of Artificial Sequence: Synthetic oligonucleotide
  source 1..37: mol_type = other DNA
agtttgagacccctatgaattaacactgctctcaaac

SEQ ID NO: 11111 - DNA, 23 bp, synthetic construct
  misc_feature 1..23: note = Description of Artificial Sequence: Synthetic oligonucleotide
  source 1..23: mol_type = other DNA
agtttgagaggtgtgtaattttt

SEQ ID NO: 11112 - DNA, 36 bp, synthetic construct
  misc_feature 1..36: note = Description of Artificial Sequence: Synthetic oligonucleotide
  source 1..36: mol_type = other DNA
agtttgagcaaaaggtaatacgacatatattcaaac

SEQ ID NO: 11113 - DNA, 36 bp, synthetic construct
  misc_feature 1..36: note = Description of Artificial Sequence: Synthetic oligonucleotide
  source 1..36: mol_type = other DNA
agtttgccacccccatttttggaatcaaggcaaagc

SEQ ID NO: 11114 - DNA, 36 bp, synthetic construct
  misc_feature 1..36: note = Description of Artificial Sequence: Synthetic oligonucleotide
  source 1..36: mol_type = other DNA
agtttgccacccccgtttttggaatcaaggcaaagc

SEQ ID NO: 11115 - DNA, 36 bp, synthetic construct
  misc_feature 1..36: note = Description of Artificial Sequence: Synthetic oligonucleotide
  source 1..36: mol_type = other DNA
agtttgccagccccgtttttggaatcaaggcaaagc

SEQ ID NO: 11116 - DNA, 36 bp, synthetic construct
  misc_feature 1..36: note = Description of Artificial Sequence: Synthetic oligonucleotide
  source 1..36: mol_type = other DNA
agtttgccagcccttggacggggggcaatcccaaac

SEQ ID NO: 11117 - DNA, 36 bp, synthetic construct
  misc_feature 1..36: note = Description of Artificial Sequence: Synthetic oligonucleotide
  source 1..36: mol_type = other DNA
agtttgccgcccccgtcgttggaaccaaggcaaagc

SEQ ID NO: 11118 - DNA, 36 bp, synthetic construct
  misc_feature 1..36: note = Description of Artificial Sequence: Synthetic oligonucleotide
  source 1..36: mol_type = other DNA
agtttgccgcgcccgaatttggaatcaaggcaaagc

SEQ ID NO: 11119 - DNA, 36 bp, synthetic construct
  misc_feature 1..36: note = Description of Artificial Sequence: Synthetic oligonucleotide
  source 1..36: mol_type = other DNA
agtttgctccacccgtttttggaatcaaggcaaagc

SEQ ID NO: 11120 - DNA, 36 bp, synthetic construct
  misc_feature 1..36: note = Description of Artificial Sequence: Synthetic oligonucleotide
  source 1..36: mol_type = other DNA
agtttgctccccccgtatttggaatcaaggcaaagc

SEQ ID NO: 11121 - DNA, 36 bp, synthetic construct
  misc_feature 1..36: note = Description of Artificial Sequence: Synthetic oligonucleotide
  source 1..36: mol_type = other DNA
agtttgctctacccatttttggaatcaaggcaaagc

SEQ ID NO: 11122 - DNA, 36 bp, synthetic construct
  misc_feature 1..36: note = Description of Artificial Sequence: Synthetic oligonucleotide
  source 1..36: mol_type = other DNA
agtttgctctacccggttttggaatcaaggcaaagc

SEQ ID NO: 11123 - DNA, 36 bp, synthetic construct
  misc_feature 1..36: note = Description of Artificial Sequence: Synthetic oligonucleotide
  source 1..36: mol_type = other DNA
agtttggcatcccttggacggggggcaatcccaaac

SEQ ID NO: 11124 - DNA, 37 bp, synthetic construct
  misc_feature 1..37: note = Description of Artificial Sequence: Synthetic oligonucleotide
  source 1..37: mol_type = other DNA
agttttagaggtgtgttattttagatgggtttaaaac

SEQ ID NO: 11125 - DNA, 37 bp, synthetic construct
  misc_feature 1..37: note = Description of Artificial Sequence: Synthetic oligonucleotide
  source 1..37: mol_type = other DNA
agttttgtagaattcaaaatttacatatctctcaaac

SEQ ID NO: 11126 - DNA, 37 bp, synthetic construct
  misc_feature 1..37: note = Description of Artificial Sequence: Synthetic oligonucleotide
  source 1..37: mol_type = other DNA
agttttgttaccattcaaaataacatactcctaaaat

SEQ ID NO: 11127 - DNA, 36 bp, synthetic construct
  misc_feature 1..36: note = Description of Artificial Sequence: Synthetic oligonucleotide
  source 1..36: mol_type = other DNA
ataatagctgattaaaaaacggggtcaaaccgcaac

SEQ ID NO: 11128 - DNA, 36 bp, synthetic construct
  misc_feature 1..36: note = Description of Artificial Sequence: Synthetic oligonucleotide
  source 1..36: mol_type = other DNA
ataatatcataaaataattcactagggaagtataac

SEQ ID NO: 11129 - DNA, 23 bp, synthetic construct
  misc_feature 1..23: note = Description of Artificial Sequence: Synthetic oligonucleotide
  source 1..23: mol_type = other DNA
atacaaaattacatgattctcaa

SEQ ID NO: 11130 - DNA, 33 bp, synthetic construct
  misc_feature 1..33: note = Description of Artificial Sequence: Synthetic oligonucleotide
  source 1..33: mol_type = other DNA
ataccataccaagaactacgaggggactacaac

SEQ ID NO: 11131 - DNA, 36 bp, synthetic construct
  misc_feature 1..36: note = Description of Artificial Sequence: Synthetic oligonucleotide
  source 1..36: mol_type = other DNA
atagacaagaatgagtaaattgaaatttagcacagc

SEQ ID NO: 11132 - DNA, 38 bp, synthetic construct
  misc_feature 1..38: note = Description of Artificial Sequence: Synthetic oligonucleotide
  source 1..38: mol_type = other DNA
atagtttagcatattgggatttgtgctctgaccggaac

SEQ ID NO: 11133 - DNA, 36 bp, synthetic construct
  misc_feature 1..36: note = Description of Artificial Sequence: Synthetic oligonucleotide
  source 1..36: mol_type = other DNA
atatagaaccctaattgtttaacacacttagcaaac

SEQ ID NO: 11134 - DNA, 36 bp, synthetic construct
  misc_feature 1..36: note = Description of Artificial Sequence: Synthetic oligonucleotide
  source 1..36: mol_type = other DNA
atatatcagagatcaattgaacggtcaattataacg

SEQ ID NO: 11135 - DNA, 36 bp, synthetic construct
  misc_feature 1..36: note = Description of Artificial Sequence: Synthetic oligonucleotide
  source 1..36: mol_type = other DNA
atatcacttatactaaatttcgcagagtactaaaac

SEQ ID NO: 11136 - DNA, 25 bp, synthetic construct
  misc_feature 1..25: note = Description of Artificial Sequence: Synthetic oligonucleotide
  source 1..25: mol_type = other DNA
atatgaatttacactactctcaaac

SEQ ID NO: 11137 - DNA, 36 bp, synthetic construct
  misc_feature 1..36: note = Description of Artificial Sequence: Synthetic oligonucleotide
  source 1..36: mol_type = other DNA
atattaccacttaggaaattgcgatgcaatcaaaac

SEQ ID NO: 11138 - DNA, 36 bp, synthetic construct
  misc_feature 1..36: note = Description of Artificial Sequence: Synthetic oligonucleotide
  source 1..36: mol_type = other DNA
atcataacataaccgtgtcggatgggaagctatgac

SEQ ID NO: 11139 - DNA, 36 bp, synthetic construct
  misc_feature 1..36: note = Description of Artificial Sequence: Synthetic oligonucleotide
  source 1..36: mol_type = other DNA
atcataccataccaagaactacgaggggactacaac

SEQ ID NO: 11140 - DNA, 36 bp, synthetic construct
  misc_feature 1..36: note = Description of Artificial Sequence: Synthetic oligonucleotide
  source 1..36: mol_type = other DNA
atcatagcataaccgtgtcggatgggaagctatgac

SEQ ID NO: 11141 - DNA, 36 bp, synthetic construct
  misc_feature 1..36: note = Description of Artificial Sequence: Synthetic oligonucleotide
  source 1..36: mol_type = other DNA
atcatagcatagcgaaggatttgatggagctacaac

SEQ ID NO: 11142 - DNA, 36 bp, synthetic construct
  misc_feature 1..36: note = Description of Artificial Sequence: Synthetic oligonucleotide
  source 1..36: mol_type = other DNA
atcatagcggtctggtgattgagggccaaccgcaac

SEQ ID NO: 11143 - DNA, 36 bp, synthetic construct
  misc_feature 1..36: note = Description of Artificial Sequence: Synthetic oligonucleotide
  source 1..36: mol_type = other DNA
atcatagctgttcagaaaccgaggtccagccgcaac

SEQ ID NO: 11144 - DNA, 36 bp, synthetic construct
  misc_feature 1..36: note = Description of Artificial Sequence: Synthetic oligonucleotide
  source 1..36: mol_type = other DNA
atcatagctgttcagaaaccggggtccagccgcaac

SEQ ID NO: 11145 - DNA, 36 bp, synthetic construct
  misc_feature 1..36: note = Description of Artificial Sequence: Synthetic oligonucleotide
  source 1..36: mol_type = other DNA
atcatagtacagcaatggctttcatggaactatgac

SEQ ID NO: 11146 - DNA, 36 bp, synthetic construct
  misc_feature 1..36: note = Description of Artificial Sequence: Synthetic oligonucleotide
  source 1..36: mol_type = other DNA
atcatagtcattcagagatcgcggtccagcggcaac

SEQ ID NO: 11147 - DNA, 36 bp, synthetic construct
  misc_feature 1..36: note = Description of Artificial Sequence: Synthetic oligonucleotide
  source 1..36: mol_type = other DNA
atcatagttccctaatagctcttggtatggtataat

SEQ ID NO: 11148 - DNA, 36 bp, synthetic construct
  misc_feature 1..36: note = Description of Artificial Sequence: Synthetic oligonucleotide
  source 1..36: mol_type = other DNA
atcatagttctctaatagctcttggtatggtataat

SEQ ID NO: 11149 - DNA, 25 bp, synthetic construct
  misc_feature 1..25: note = Description of Artificial Sequence: Synthetic oligonucleotide
  source 1..25: mol_type = other DNA
atccaaaatcgaacctgctacaata

SEQ ID NO: 11150 - DNA, 36 bp, synthetic construct
  misc_feature 1..36: note = Description of Artificial Sequence: Synthetic oligonucleotide
  source 1..36: mol_type = other DNA
atcctaccacggggaaatcggtagggaagccacggc

SEQ ID NO: 11151 - DNA, 36 bp, synthetic construct
  misc_feature 1..36: note = Description of Artificial Sequence: Synthetic oligonucleotide
  source 1..36: mol_type = other DNA
atcctaccagggggaaatcagtagggaaaccacggc

SEQ ID NO: 11152 - DNA, 36 bp, synthetic construct
  misc_feature 1..36: note = Description of Artificial Sequence: Synthetic oligonucleotide
  source 1..36: mol_type = other DNA
atcctagcagaaaaagcggcgtggccaagcccggac

SEQ ID NO: 11153 - DNA, 36 bp, synthetic construct
  misc_feature 1..36: note = Description of Artificial Sequence: Synthetic oligonucleotide
  source 1..36: mol_type = other DNA
atcctagcagaagaagcggcgtggccaaacccggac

SEQ ID NO: 11154 - DNA, 36 bp, synthetic construct
  misc_feature 1..36: note = Description of Artificial Sequence: Synthetic oligonucleotide
  source 1..36: mol_type = other DNA
atcctagcagaagaagcggcgtggccaagcccggac

SEQ ID NO: 11155 - DNA, 46 bp, synthetic construct
  misc_feature 1..46: note = Description of Artificial Sequence: Synthetic oligonucleotide
  source 1..46: mol_type = other DNA
atcgagcgtactatgcgagatcggcgaagccaaagcaattcacaac

SEQ ID NO: 11156 - DNA, 36 bp, synthetic construct
  misc_feature 1..36: note = Description of Artificial Sequence: Synthetic oligonucleotide
  source 1..36: mol_type = other DNA
atcgtaacagacctaaacttggaagcaacctacaac

SEQ ID NO: 11157 - DNA, 36 bp, synthetic construct
  misc_feature 1..36: note = Description of Artificial Sequence: Synthetic oligonucleotide
  source 1..36: mol_type = other DNA
atcgtaatcaataccgatttacagccaaactacaac

SEQ ID NO: 11158 - DNA, 36 bp, synthetic construct
  misc_feature 1..36: note = Description of Artificial Sequence: Synthetic oligonucleotide
  source 1..36: mol_type = other DNA
atcgtagcatcccttggacggggggcaatcccaaac

SEQ ID NO: 11159 - DNA, 36 bp, synthetic construct
  misc_feature 1..36: note = Description of Artificial Sequence: Synthetic oligonucleotide
  source 1..36: mol_type = other DNA
atcgtagcattccggggtgagagagggagctacaac

SEQ ID NO: 11160 - DNA, 23 bp, synthetic construct
  misc_feature 1..23: note = Description of Artificial Sequence: Synthetic oligonucleotide
  source 1..23: mol_type = other DNA
atctcactcggttatgctataat

SEQ ID NO: 11161 - DNA, 36 bp, synthetic construct
  misc_feature 1..36: note = Description of Artificial Sequence: Synthetic oligonucleotide
  source 1..36: mol_type = other DNA
atcttaccagcctcttaatcggaaccaaggcaaagc

SEQ ID NO: 11162 - DNA, 36 bp, synthetic construct
  misc_feature 1..36: note = Description of Artificial Sequence: Synthetic oligonucleotide
  source 1..36: mol_type = other DNA
atcttaccatatcggagtgtggcagggagctataac

SEQ ID NO: 11163 - DNA, 36 bp, synthetic construct
  misc_feature 1..36: note = Description of Artificial Sequence: Synthetic oligonucleotide
  source 1..36: mol_type = other DNA
atcttagcagggaaagcgatgcggcccaaccggaac

SEQ ID NO: 11164 - DNA, 36 bp, synthetic construct
  misc_feature 1..36: note = Description of Artificial Sequence: Synthetic oligonucleotide
  source 1..36: mol_type = other DNA
atcttagcagtgaaagcggtgcagccaaaccggaac

SEQ ID NO: 11165 - DNA, 36 bp, synthetic construct
  misc_feature 1..36: note = Description of Artificial Sequence: Synthetic oligonucleotide
  source 1..36: mol_type = other DNA
atcttagcggtctggtgattgagggccaaccgcaac

SEQ ID NO: 11166 - DNA, 37 bp, synthetic construct
  misc_feature 1..37: note = Description of Artificial Sequence: Synthetic oligonucleotide
  source 1..37: mol_type = other DNA
atcttagcggtctggtgattgagggccaaccgcaacg

SEQ ID NO: 11167 - DNA, 31 bp, synthetic construct
  misc_feature 1..31: note = Description of Artificial Sequence: Synthetic oligonucleotide
  source 1..31: mol_type = other DNA
atcttagctgttcagaaaatgcggtcaaccc

SEQ ID NO: 11168 - DNA, 36 bp, synthetic construct
  misc_feature 1..36: note = Description of Artificial Sequence: Synthetic oligonucleotide
  source 1..36: mol_type = other DNA
atcttatcaaatctgtatcagtaaggccactataac

SEQ ID NO: 11169 - DNA, 37 bp, synthetic construct
  misc_feature 1..37: note = Description of Artificial Sequence: Synthetic oligonucleotide
  source 1..37: mol_type = other DNA
atgacactttacaacaatatcacttagcaaatgaaac

SEQ ID NO: 11170 - DNA, 29 bp, synthetic construct
  misc_feature 1..29: note = Description of Artificial Sequence: Synthetic oligonucleotide
  source 1..29: mol_type = other DNA
atgaccttgaaattacatcaaaccacaac

SEQ ID NO: 11171 - DNA, 36 bp, synthetic construct
  misc_feature 1..36: note = Description of Artificial Sequence: Synthetic oligonucleotide
  source 1..36: mol_type = other DNA
atgataaaaccctgtaatttttcgctatgataaaac

SEQ ID NO: 11172 - DNA, 34 bp, synthetic construct
  misc_feature 1..34: note = Description of Artificial Sequence: Synthetic oligonucleotide
  source 1..34: mol_type = other DNA
atgcaaagatactaattttttagcaaatcacaac

SEQ ID NO: 11173 - DNA, 36 bp, synthetic construct
  misc_feature 1..36: note = Description of Artificial Sequence: Synthetic oligonucleotide
  source 1..36: mol_type = other DNA
atggtaactgatcactgcctgccgtcaatccgcagc

SEQ ID NO: 11174 - DNA, 36 bp, synthetic construct
  misc_feature 1..36: note = Description of Artificial Sequence: Synthetic oligonucleotide
  source 1..36: mol_type = other DNA
atggtaactgatcactgcctgtcgtcaatccgcagc

SEQ ID NO: 11175 - DNA, 36 bp, synthetic construct
  misc_feature 1..36: note = Description of Artificial Sequence: Synthetic oligonucleotide
  source 1..36: mol_type = other DNA
atggtaattgatcactgcccgccgtcaatccgcagc

SEQ ID NO: 11176 - DNA, 36 bp, synthetic construct
  misc_feature 1..36: note = Description of Artificial Sequence: Synthetic oligonucleotide
  source 1..36: mol_type = other DNA
atggtaattgatcactgcctgctgtcaatccgcagc

SEQ ID NO: 11177 - DNA, 36 bp, synthetic construct
  misc_feature 1..36: note = Description of Artificial Sequence: Synthetic oligonucleotide
  source 1..36: mol_type = other DNA
atggtagcaaatcgagaaacggcctcagtccgcagc

SEQ ID NO: 11178 - DNA, 37 bp, synthetic construct
  misc_feature 1..37: note = Description of Artificial Sequence: Synthetic oligonucleotide
  source 1..37: mol_type = other DNA
atggtagctcatccggggtgagagagggagctacaac

SEQ ID NO: 11179 - DNA, 38 bp, synthetic construct
  misc_feature 1..38: note = Description of Artificial Sequence: Synthetic oligonucleotide
  source 1..38: mol_type = other DNA
atgttacggcttgactccaatctcctatttgctatgct

SEQ ID NO: 11180 - DNA, 36 bp, synthetic construct
  misc_feature 1..36: note = Description of Artificial Sequence: Synthetic oligonucleotide
  source 1..36: mol_type = other DNA
atgttgccatgctaggaattggaatcaaggcaaagc

SEQ ID NO: 11181 - DNA, 36 bp, synthetic construct
  misc_feature 1..36: note = Description of Artificial Sequence: Synthetic oligonucleotide
  source 1..36: mol_type = other DNA
attaaatgaaaccagatttcatagggcaaccctaac

SEQ ID NO: 11182 - DNA, 36 bp, synthetic construct
  misc_feature 1..36: note = Description of Artificial Sequence: Synthetic oligonucleotide
  source 1..36: mol_type = other DNA
attacacaaacaaaatatttaattgtcgattgtaag

SEQ ID NO: 11183 - DNA, 40 bp, synthetic construct
  misc_feature 1..40: note = Description of Artificial Sequence: Synthetic oligonucleotide
  source 1..40: mol_type = other DNA
attacacttttcagaaaagccccataggaactgaaactgg

SEQ ID NO: 11184 - DNA, 36 bp, synthetic construct
  misc_feature 1..36: note = Description of Artificial Sequence: Synthetic oligonucleotide
  source 1..36: mol_type = other DNA
attaccagactacccctgtgggggcgagatcaaaac

SEQ ID NO: 11185 - DNA, 36 bp, synthetic construct
  misc_feature 1..36: note = Description of Artificial Sequence: Synthetic oligonucleotide
  source 1..36: mol_type = other DNA
attactagcttgccctggtgggggcacgttcaaaac

SEQ ID NO: 11186 - DNA, 36 bp, synthetic construct
  misc_feature 1..36: note = Description of Artificial Sequence: Synthetic oligonucleotide
  source 1..36: mol_type = other DNA
attataacaaaactgcttttactgtcccttcaaaac

SEQ ID NO: 11187 - DNA, 36 bp, synthetic construct
  misc_feature 1..36: note = Description of Artificial Sequence: Synthetic oligonucleotide
  source 1..36: mol_type = other DNA
attataacaaatctgaaatctttgtggcgtcaaaac

SEQ ID NO: 11188 - DNA, 36 bp, synthetic construct
  misc_feature 1..36: note = Description of Artificial Sequence: Synthetic oligonucleotide
  source 1..36: mol_type = other DNA
attataacacagaagagtaggattgggggctataac

SEQ ID NO: 11189 - DNA, 36 bp, synthetic construct
  misc_feature 1..36: note = Description of Artificial Sequence: Synthetic oligonucleotide
  source 1..36: mol_type = other DNA
attataacacgtaatcgcttgtaggggtattaaaac

SEQ ID NO: 11190 - DNA, 36 bp, synthetic construct
  misc_feature 1..36: note = Description of Artificial Sequence: Synthetic oligonucleotide
  source 1..36: mol_type = other DNA
attataacacttttcgttttttagtcccgtcagaac

SEQ ID NO: 11191 - DNA, 36 bp, synthetic construct
  misc_feature 1..36: note = Description of Artificial Sequence: Synthetic oligonucleotide
  source 1..36: mol_type = other DNA
attataacagaaagtggtttgtaggggtcttaaaac

SEQ ID NO: 11192 - DNA, 36 bp, synthetic construct
  misc_feature 1..36: note = Description of Artificial Sequence: Synthetic oligonucleotide
  source 1..36: mol_type = other DNA
attataacagctgattgaattgcaacgcactagggc

SEQ ID NO: 11193 - DNA, 36 bp, synthetic construct
  misc_feature 1..36: note = Description of Artificial Sequence: Synthetic oligonucleotide
  source 1..36: mol_type = other DNA
attataacaggcggcggtttggaggggtcttaaaac

SEQ ID NO: 11194 - DNA, 36 bp, synthetic construct
  misc_feature 1..36: note = Description of Artificial Sequence: Synthetic oligonucleotide
  source 1..36: mol_type = other DNA
attataacaggtaatcgtttgtaggggtattaaaac

SEQ ID NO: 11195 - DNA, 36 bp, synthetic construct
  misc_feature 1..36: note = Description of Artificial Sequence: Synthetic oligonucleotide
  source 1..36: mol_type = other DNA
attataacaggtggcggtttggaggggtcttaaaac

SEQ ID NO: 11196 - DNA, 36 bp, synthetic construct
  misc_feature 1..36: note = Description of Artificial Sequence: Synthetic oligonucleotide
  source 1..36: mol_type = other DNA
attataacaggtggtggtttgtgggggtcttaaaac

SEQ ID NO: 11197 - DNA, 36 bp, synthetic construct
  misc_feature 1..36: note = Description of Artificial Sequence: Synthetic oligonucleotide
  source 1..36: mol_type = other DNA
attataacaggttagcgtttgtaggggtattaaaac

SEQ ID NO: 11198 - DNA, 36 bp, synthetic construct
  misc_feature 1..36: note = Description of Artificial Sequence: Synthetic oligonucleotide
  source 1..36: mol_type = other DNA
attataacatattaaatattgtggtcaatacagaac

SEQ ID NO: 11199 - DNA, 36 bp, synthetic construct
  misc_feature 1..36: note = Description of Artificial Sequence: Synthetic oligonucleotide
  source 1..36: mol_type = other DNA
attataacatattagaaaaataggtcaatacgcaac

SEQ ID NO: 11200 - DNA, 36 bp, synthetic construct
  misc_feature 1..36: note = Description of Artificial Sequence: Synthetic oligonucleotide
  source 1..36: mol_type = other DNA
attataacatattttaaattaagagaaaatcaaaac

SEQ ID NO: 11201 - DNA, 36 bp, synthetic construct
  misc_feature 1..36: note = Description of Artificial Sequence: Synthetic oligonucleotide
  source 1..36: mol_type = other DNA
attataacatattttaaattaatagcaaatcaaaac

SEQ ID NO: 11202 - DNA, 36 bp, synthetic construct
  misc_feature 1..36: note = Description of Artificial Sequence: Synthetic oligonucleotide
  source 1..36: mol_type = other DNA
attataacccttcggaatggggctgggggctataac

SEQ ID NO: 11203 - DNA, 36 bp, synthetic construct
  misc_feature 1..36: note = Description of Artificial Sequence: Synthetic oligonucleotide
  source 1..36: mol_type = other DNA
attataaccgaccgaggcctgctgccaacccgcaat

SEQ ID NO: 11204 - DNA, 36 bp, synthetic construct
  misc_feature 1..36: note = Description of Artificial Sequence: Synthetic oligonucleotide
  source 1..36: mol_type = other DNA
attataaccgcccagagatcgcggtccaccagcaac

SEQ ID NO: 11205 - DNA, 36 bp, synthetic construct
  misc_feature 1..36: note = Description of Artificial Sequence: Synthetic oligonucleotide
  source 1..36: mol_type = other DNA
attataactcatccgtatctgagtgcaagccacaac

SEQ ID NO: 11206 - DNA, 36 bp, synthetic construct
  misc_feature 1..36: note = Description of Artificial Sequence: Synthetic oligonucleotide
  source 1..36: mol_type = other DNA
attataactgacccgtgcctgagtgcaagccacaac

SEQ ID NO: 11207 - DNA, 36 bp, synthetic construct
  misc_feature 1..36: note = Description of Artificial Sequence: Synthetic oligonucleotide
  source 1..36: mol_type = other DNA
attataactgacccgtgcctgagtgcaagccacatc

SEQ ID NO: 11208 - DNA, 36 bp, synthetic construct
  misc_feature 1..36: note = Description of Artificial Sequence: Synthetic oligonucleotide
  source 1..36: mol_type = other DNA
attataactgatccgcgtccgagtgcaagccacaac

SEQ ID NO: 11209 - DNA, 36 bp, synthetic construct
  misc_feature 1..36: note = Description of Artificial Sequence: Synthetic oligonucleotide
  source 1..36: mol_type = other DNA
attataactgatccgcgtctgagtgcaagccacaac

SEQ ID NO: 11210 - DNA, 36 bp, synthetic construct
  misc_feature 1..36: note = Description of Artificial Sequence: Synthetic oligonucleotide
  source 1..36: mol_type = other DNA
attataactgatccgtgcctgagtgcaaaccacaac

SEQ ID NO: 11211 - DNA, 36 bp, synthetic construct
  misc_feature 1..36: note = Description of Artificial Sequence: Synthetic oligonucleotide
  source 1..36: mol_type = other DNA
attataactgatccgtgcctgagtgcaagtcacaac

SEQ ID NO: 11212 - DNA, 36 bp, synthetic construct
  misc_feature 1..36: note = Description of Artificial Sequence: Synthetic oligonucleotide
  source 1..36: mol_type = other DNA
attataactgatccgtggctgagtgcaagtcacaac

SEQ ID NO: 11213 - DNA, 36 bp, synthetic construct
  misc_feature 1..36: note = Description of Artificial Sequence: Synthetic oligonucleotide
  source 1..36: mol_type = other DNA
attataactgattaatttaccctgtcaacctgcaac

SEQ ID NO: 11214 - DNA, 36 bp, synthetic construct
  misc_feature 1..36: note = Description of Artificial Sequence: Synthetic oligonucleotide
  source 1..36: mol_type = other DNA
attataactgattaattttccaagtcaacctgcaac

SEQ ID NO: 11215 - DNA, 36 bp, synthetic construct
  misc_feature 1..36: note = Description of Artificial Sequence: Synthetic oligonucleotide
  source 1..36: mol_type = other DNA
attataatcatcctttaaaattctacaagtcccagc

SEQ ID NO: 11216 - DNA, 28 bp, synthetic construct
  misc_feature 1..28: note = Description of Artificial Sequence: Synthetic oligonucleotide
  source 1..28: mol_type = other DNA
attataattgcgaggtaaagttacttaa

SEQ ID NO: 11217 - DNA, 36 bp, synthetic construct
  misc_feature 1..36: note = Description of Artificial Sequence: Synthetic oligonucleotide
  source 1..36: mol_type = other DNA
attatacaactatctaaattgttagggaactataac

SEQ ID NO: 11218 - DNA, 36 bp, synthetic construct
  misc_feature 1..36: note = Description of Artificial Sequence: Synthetic oligonucleotide
  source 1..36: mol_type = other DNA
attatacaactatctgaattgttagagaactataac

SEQ ID NO: 11219 - DNA, 36 bp, synthetic construct
  misc_feature 1..36: note = Description of Artificial Sequence: Synthetic oligonucleotide
  source 1..36: mol_type = other DNA
attatacaataaatactttcgaagggaaactatagc

SEQ ID NO: 11220 - DNA, 36 bp, synthetic construct
  misc_feature 1..36: note = Description of Artificial Sequence: Synthetic oligonucleotide
  source 1..36: mol_type = other DNA
attatacaatatctgatttggaaagcaacctataac

SEQ ID NO: 11221 - DNA, 36 bp, synthetic construct
  misc_feature 1..36: note = Description of Artificial Sequence: Synthetic oligonucleotide
  source 1..36: mol_type = other DNA
attatacaattatccaaattgtcagggaactataac

SEQ ID NO: 11222 - DNA, 36 bp, synthetic construct
  misc_feature 1..36: note = Description of Artificial Sequence: Synthetic oligonucleotide
  source 1..36: mol_type = other DNA
attatacagtattcttactttgagtgggagtataac

SEQ ID NO: 11223 - DNA, 36 bp, synthetic construct
  misc_feature 1..36: note = Description of Artificial Sequence: Synthetic oligonucleotide
  source 1..36: mol_type = other DNA
attataccaactggggatttggatgggcgccaagac

SEQ ID NO: 11224 - DNA, 37 bp, synthetic construct
  misc_feature 1..37: note = Description of Artificial Sequence: Synthetic oligonucleotide
  source 1..37: mol_type = other DNA
attataccaactggggatttgtaagggcgccaagact

SEQ ID NO: 11225 - DNA, 36 bp, synthetic construct
  misc_feature 1..36: note = Description of Artificial Sequence: Synthetic oligonucleotide
  source 1..36: mol_type = other DNA
attataccaagtccattaatgcggtagggtcaaaac

SEQ ID NO: 11226 - DNA, 36 bp, synthetic construct
  misc_feature 1..36: note = Description of Artificial Sequence: Synthetic oligonucleotide
  source 1..36: mol_type = other DNA
attataccaatatctaaattgtcagggaactataac

SEQ ID NO: 11227 - DNA, 36 bp, synthetic construct
  misc_feature 1..36: note = Description of Artificial Sequence: Synthetic oligonucleotide
  source 1..36: mol_type = other DNA
attataccaatatctaaattgttagggaactataac

SEQ ID NO: 11228 - DNA, 36 bp, synthetic construct
  misc_feature 1..36: note = Description of Artificial Sequence: Synthetic oligonucleotide
  source 1..36: mol_type = other DNA
attataccacaaaaagaaacgctagggaactgcaac

SEQ ID NO: 11229 - DNA, 36 bp, synthetic construct
  misc_feature 1..36: note = Description of Artificial Sequence: Synthetic oligonucleotide
  source 1..36: mol_type = other DNA
attataccacaacaaaaaactttagggagctataac

SEQ ID NO: 11230 - DNA, 36 bp, synthetic construct
  misc_feature 1..36: note = Description of Artificial Sequence: Synthetic oligonucleotide
  source 1..36: mol_type = other DNA
attataccacaacgagaaatattagggaactacaac

SEQ ID NO: 11231 - DNA, 36 bp, synthetic construct
  misc_feature 1..36: note = Description of Artificial Sequence: Synthetic oligonucleotide
  source 1..36: mol_type = other DNA
attataccacagggaaaattagtgaccaaccagaac

SEQ ID NO: 11232 - DNA, 36 bp, synthetic construct
  misc_feature 1..36: note = Description of Artificial Sequence: Synthetic oligonucleotide
  source 1..36: mol_type = other DNA
attataccacgattcaaattgctaggggactataac

SEQ ID NO: 11233 - DNA, 36 bp, synthetic construct
  misc_feature 1..36: note = Description of Artificial Sequence: Synthetic oligonucleotide
  source 1..36: mol_type = other DNA
attataccactacgagaaagaacagggaaccacaac

SEQ ID NO: 11234 - DNA, 35 bp, synthetic construct
  misc_feature 1..35: note = Description of Artificial Sequence: Synthetic oligonucleotide
  source 1..35: mol_type = other DNA
attataccactacgagaaagaacaggggaccacaa

SEQ ID NO: 11235 - DNA, 26 bp, synthetic construct
  misc_feature 1..26: note = Description of Artificial Sequence: Synthetic oligonucleotide
  source 1..26: mol_type = other DNA
attataccactacgagaaagaatagg

SEQ ID NO: 11236 - DNA, 36 bp, synthetic construct
  misc_feature 1..36: note = Description of Artificial Sequence: Synthetic oligonucleotide
  source 1..36: mol_type = other DNA
attataccactacgagagaaaactgggaactacgac

SEQ ID NO: 11237 - DNA, 36 bp, synthetic construct
  misc_feature 1..36: note = Description of Artificial Sequence: Synthetic oligonucleotide
  source 1..36: mol_type = other DNA
attataccataacctgaaccgtttgggggctataac

SEQ ID NO: 11238 - DNA, 36 bp, synthetic construct
  misc_feature 1..36: note = Description of Artificial Sequence: Synthetic oligonucleotide
  source 1..36: mol_type = other DNA
attataccataccaaaaaacaaaagggaactaaaac

SEQ ID NO: 11239 - DNA, 37 bp, synthetic construct
  misc_feature 1..37: note = Description of Artificial Sequence: Synthetic oligonucleotide
  source 1..37: mol_type = other DNA
attataccataccaaaaataaatagggaactacaaca

SEQ ID NO: 11240 - DNA, 36 bp, synthetic construct
  misc_feature 1..36: note = Description of Artificial Sequence: Synthetic oligonucleotide
  source 1..36: mol_type = other DNA
attataccataccaaaaatcattagggggctacaac

SEQ ID NO: 11241 - DNA, 36 bp, synthetic construct
  misc_feature 1..36: note = Description of Artificial Sequence: Synthetic oligonucleotide
  source 1..36: mol_type = other DNA
attataccataccaaaaattaaaagggaactaaaac

SEQ ID NO: 11242 - DNA, 36 bp, synthetic construct
  misc_feature 1..36: note = Description of Artificial Sequence: Synthetic oligonucleotide
  source 1..36: mol_type = other DNA
attataccataccaaaacttaaaagggaactaaaac

SEQ ID NO: 11243 - DNA, 36 bp, synthetic construct
  misc_feature 1..36: note = Description of Artificial Sequence: Synthetic oligonucleotide
  source 1..36: mol_type = other DNA
attataccataccaaagaaaataagggaactacaac

SEQ ID NO: 11244 - DNA, 36 bp, synthetic construct
  misc_feature 1..36: note = Description of Artificial Sequence: Synthetic oligonucleotide
  source 1..36: mol_type = other DNA
attataccataccaaagaataagaggggactaaaac

SEQ ID NO: 11245 - DNA, 36 bp, synthetic construct
  misc_feature 1..36: note = Description of Artificial Sequence: Synthetic oligonucleotide
  source 1..36: mol_type = other DNA
attataccataccaaataatcttagggaactataac

SEQ ID NO: 11246 - DNA, 36 bp, synthetic construct
  misc_feature 1..36: note = Description of Artificial Sequence: Synthetic oligonucleotide
  source 1..36: mol_type = other DNA
attataccataccaacaacgatcagggaactacaac

SEQ ID NO: 11247 - DNA, 36 bp, synthetic construct
  misc_feature 1..36: note = Description of Artificial Sequence: Synthetic oligonucleotide
  source 1..36: mol_type = other DNA
attataccataccaacaatcacccgggaactataac

SEQ ID NO: 11248 - DNA, 36 bp, synthetic construct
  misc_feature 1..36: note = Description of Artificial Sequence: Synthetic oligonucleotide
  source 1..36: mol_type = other DNA
attataccataccaacaatcgcccgggaactataac

SEQ ID NO: 11249 - DNA, 36 bp, synthetic construct
  misc_feature 1..36: note = Description of Artificial Sequence: Synthetic oligonucleotide
  source 1..36: mol_type = other DNA
attataccataccaagaaaaattagggaactacaat

SEQ ID NO: 11250 - DNA, 36 bp, synthetic construct
  misc_feature 1..36: note = Description of Artificial Sequence: Synthetic oligonucleotide
  source 1..36: mol_type = other DNA
attataccataccaagaacaaatagggaactacaac

SEQ ID NO: 11251 - DNA, 36 bp, synthetic construct
  misc_feature 1..36: note = Description of Artificial Sequence: Synthetic oligonucleotide
  source 1..36: mol_type = other DNA
attataccataccaagaaccgttagggaactacaac

SEQ ID NO: 11252 - DNA, 36 bp, synthetic construct
  misc_feature 1..36: note = Description of Artificial Sequence: Synthetic oligonucleotide
  source 1..36: mol_type = other DNA
attataccataccaagaactatcagggaactataac

SEQ ID NO: 11253 - DNA, 36 bp, synthetic construct
  misc_feature 1..36: note = Description of Artificial Sequence: Synthetic oligonucleotide
  source 1..36: mol_type = other DNA
attataccataccaagaactatcagggagctatgac

SEQ ID NO: 11254 - DNA, 36 bp, synthetic construct
  misc_feature 1..36: note = Description of Artificial Sequence: Synthetic oligonucleotide
  source 1..36: mol_type = other DNA
attataccataccaagaactatcagggggctacaac

SEQ ID NO: 11255 - DNA, 36 bp, synthetic construct
  misc_feature 1..36: note = Description of Artificial Sequence: Synthetic oligonucleotide
  source 1..36: mol_type = other DNA
attataccataccaagaataattagggaactacaat

SEQ ID NO: 11256 - DNA, 36 bp, synthetic construct
  misc_feature 1..36: note = Description of Artificial Sequence: Synthetic oligonucleotide
  source 1..36: mol_type = other DNA
attataccataccaagaattaacagggagctacaac

SEQ ID NO: 11257 - DNA, 36 bp, synthetic construct
  misc_feature 1..36: note = Description of Artificial Sequence: Synthetic oligonucleotide
  source 1..36: mol_type = other DNA
attataccataccaagagctattagggaactatgac

SEQ ID NO: 11258 - DNA, 36 bp, synthetic construct
  misc_feature 1..36: note = Description of Artificial Sequence: Synthetic oligonucleotide
  source 1..36: mol_type = other DNA
attataccataccaagcgataactgggaacaacaac

SEQ ID NO: 11259 - DNA, 36 bp, synthetic construct
  misc_feature 1..36: note = Description of Artificial Sequence: Synthetic oligonucleotide
  source 1..36: mol_type = other DNA
attataccataccaaggactaccagggaactacaac

SEQ ID NO: 11260 - DNA, 36 bp, synthetic construct
  misc_feature 1..36: note = Description of Artificial Sequence: Synthetic oligonucleotide
  source 1..36: mol_type = other DNA
attataccataccaagtaataactgggaactacagc

SEQ ID NO: 11261 - DNA, 36 bp, synthetic construct
  misc_feature 1..36: note = Description of Artificial Sequence: Synthetic oligonucleotide
  source 1..36: mol_type = other DNA
attataccataccaataatcatccgggagctataac

SEQ ID NO: 11262 - DNA, 36 bp, synthetic construct
  misc_feature 1..36: note = Description of Artificial Sequence: Synthetic oligonucleotide
  source 1..36: mol_type = other DNA
attataccataccgaaaatcattaggggactacaac

SEQ ID NO: 11263 - DNA, 36 bp, synthetic construct
  misc_feature 1..36: note = Description of Artificial Sequence: Synthetic oligonucleotide
  source 1..36: mol_type = other DNA
attataccataccgaaaatcattagggggctacaac

SEQ ID NO: 11264 - DNA, 37 bp, synthetic construct
  misc_feature 1..37: note = Description of Artificial Sequence: Synthetic oligonucleotide
  source 1..37: mol_type = other DNA
attataccataccgaaaatcattagggggctacaacg

SEQ ID NO: 11265 - DNA, 36 bp, synthetic construct
  misc_feature 1..36: note = Description of Artificial Sequence: Synthetic oligonucleotide
  source 1..36: mol_type = other DNA
attataccatatcaaaatcaaagatcaaaccgcaac

SEQ ID NO: 11266 - DNA, 36 bp, synthetic construct
  misc_feature 1..36: note = Description of Artificial Sequence: Synthetic oligonucleotide
  source 1..36: mol_type = other DNA
attataccatatttaaatcaaagatcaaaccgcaac

SEQ ID NO: 11267 - DNA, 36 bp, synthetic construct
  misc_feature 1..36: note = Description of Artificial Sequence: Synthetic oligonucleotide
  source 1..36: mol_type = other DNA
attataccatctcggaaagtgaaagggagctataac

SEQ ID NO: 11268 - DNA, 28 bp, synthetic construct
  misc_feature 1..28: note = Description of Artificial Sequence: Synthetic oligonucleotide
  source 1..28: mol_type = other DNA
attataccatgattcaaattgctagggg

SEQ ID NO: 11269 - DNA, 36 bp, synthetic construct
  misc_feature 1..36: note = Description of Artificial Sequence: Synthetic oligonucleotide
  source 1..36: mol_type = other DNA
attataccatgccgaaaatcacccgggggctacaac

SEQ ID NO: 11270 - DNA, 36 bp, synthetic construct
  misc_feature 1..36: note = Description of Artificial Sequence: Synthetic oligonucleotide
  source 1..36: mol_type = other DNA
attataccattacctgatctgtaggggagctataac

SEQ ID NO: 11271 - DNA, 36 bp, synthetic construct
  misc_feature 1..36: note = Description of Artificial Sequence: Synthetic oligonucleotide
  source 1..36: mol_type = other DNA
attataccattatctgatttgtcagggagctataac

SEQ ID NO: 11272 - DNA, 36 bp, synthetic construct
  misc_feature 1..36: note = Description of Artificial Sequence: Synthetic oligonucleotide
  source 1..36: mol_type = other DNA
attatacccttgagagagataatagggaactacaac

SEQ ID NO: 11273 - DNA, 36 bp, synthetic construct
  misc_feature 1..36: note = Description of Artificial Sequence: Synthetic oligonucleotide
  source 1..36: mol_type = other DNA
attataccgcgcctctccggggggggaagccaaaac

SEQ ID NO: 11274 - DNA, 36 bp, synthetic construct
  misc_feature 1..36: note = Description of Artificial Sequence: Synthetic oligonucleotide
  source 1..36: mol_type = other DNA
attataccgtatctaagtgtggcaggtcaatgcagc

SEQ ID NO: 11275 - DNA, 36 bp, synthetic construct
  misc_feature 1..36: note = Description of Artificial Sequence: Synthetic oligonucleotide
  source 1..36: mol_type = other DNA
attatacctgagcaacgattccccacaaaccacagt

SEQ ID NO: 11276 - DNA, 36 bp, synthetic construct
  misc_feature 1..36: note = Description of Artificial Sequence: Synthetic oligonucleotide
  source 1..36: mol_type = other DNA
attatacctgagcgccgattttcttccaaccccagc

SEQ ID NO: 11277 - DNA, 34 bp, synthetic construct
  misc_feature 1..34: note = Description of Artificial Sequence: Synthetic oligonucleotide
  source 1..34: mol_type = other DNA
attatacctgagcggcgattccctgcaagccaca

SEQ ID NO: 11278 - DNA, 36 bp, synthetic construct
  misc_feature 1..36: note = Description of Artificial Sequence: Synthetic oligonucleotide
  source 1..36: mol_type = other DNA
attatacctgattaatttttctggtcaacctgcaac

SEQ ID NO: 11279 - DNA, 36 bp, synthetic construct
  misc_feature 1..36: note = Description of Artificial Sequence: Synthetic oligonucleotide
  source 1..36: mol_type = other DNA
attataccttagcgagaaatattagggaattacaac

SEQ ID NO: 11280 - DNA, 36 bp, synthetic construct
  misc_feature 1..36: note = Description of Artificial Sequence: Synthetic oligonucleotide
  source 1..36: mol_type = other DNA
attataccttagcgagagatagtagggaattacaac

SEQ ID NO: 11281 - DNA, 26 bp, synthetic construct
  misc_feature 1..26: note = Description of Artificial Sequence: Synthetic oligonucleotide
  source 1..26: mol_type = other DNA
attatactactatcgaaattattagg

SEQ ID NO: 11282 - DNA, 36 bp, synthetic construct
  misc_feature 1..36: note = Description of Artificial Sequence: Synthetic oligonucleotide
  source 1..36: mol_type = other DNA
attatactactatcgaaattattaggggactataac

SEQ ID NO: 11283 - DNA, 36 bp, synthetic construct
  misc_feature 1..36: note = Description of Artificial Sequence: Synthetic oligonucleotide
  source 1..36: mol_type = other DNA
attatagcaacttaggaaacgcgctcaatccgcaac

SEQ ID NO: 11284 - DNA, 36 bp, synthetic construct
  misc_feature 1..36: note = Description of Artificial Sequence: Synthetic oligonucleotide
  source 1..36: mol_type = other DNA
attatagcacaccggagaaccgaagggaactacaac

SEQ ID NO: 11285 - DNA, 36 bp, synthetic construct
  misc_feature 1..36: note = Description of Artificial Sequence: Synthetic oligonucleotide
  source 1..36: mol_type = other DNA
attatagcactgcgaaatgaaaaagggagctacaac

SEQ ID NO: 11286 - DNA, 36 bp, synthetic construct
  misc_feature 1..36: note = Description of Artificial Sequence: Synthetic oligonucleotide
  source 1..36: mol_type = other DNA
attatagcagagcgggcatttccctcaaaacatagc

SEQ ID NO: 11287 - DNA, 36 bp, synthetic construct
  misc_feature 1..36: note = Description of Artificial Sequence: Synthetic oligonucleotide
  source 1..36: mol_type = other DNA
attatagcagatatgaaaacgagagcaagttataac

SEQ ID NO: 11288 - DNA, 36 bp, synthetic construct
  misc_feature 1..36: note = Description of Artificial Sequence: Synthetic oligonucleotide
  source 1..36: mol_type = other DNA
attatagcagatatgaaaatgagagcaagttataac

SEQ ID NO: 11289 - DNA, 36 bp, synthetic construct
  misc_feature 1..36: note = Description of Artificial Sequence: Synthetic oligonucleotide
  source 1..36: mol_type = other DNA
attatagcagatatgaatttgagagcaagttataac

SEQ ID NO: 11290 - DNA, 36 bp, synthetic construct
  misc_feature 1..36: note = Description of Artificial Sequence: Synthetic oligonucleotide
  source 1..36: mol_type = other DNA
attatagcataccggaaaaccctagggaactatgac

SEQ ID NO: 11291 - DNA, 36 bp, synthetic construct
  misc_feature 1..36: note = Description of Artificial Sequence: Synthetic oligonucleotide
  source 1..36: mol_type = other DNA
attatagcataccggagaaccgaagggaactataac

SEQ ID NO: 11292 - DNA, 36 bp, synthetic construct
  misc_feature 1..36: note = Description of Artificial Sequence: Synthetic oligonucleotide
  source 1..36: mol_type = other DNA
attatagcataccggagacttgaagggaactataac

SEQ ID NO: 11293 - DNA, 36 bp, synthetic construct
  misc_feature 1..36: note = Description of Artificial Sequence: Synthetic oligonucleotide
  source 1..36: mol_type = other DNA
attatagcatactttaaattaacagtaaatcaaaac

SEQ ID NO: 11294 - DNA, 36 bp, synthetic construct
  misc_feature 1..36: note = Description of Artificial Sequence: Synthetic oligonucleotide
  source 1..36: mol_type = other DNA
attatagcatagcggagaatcacggggaataaaaac

SEQ ID NO: 11295 - DNA, 36 bp, synthetic construct
  misc_feature 1..36: note = Description of Artificial Sequence: Synthetic oligonucleotide
  source 1..36: mol_type = other DNA
attatagcatatccgagtgagaaagggggctataac

SEQ ID NO: 11296 - DNA, 36 bp, synthetic construct
  misc_feature 1..36: note = Description of Artificial Sequence: Synthetic oligonucleotide
  source 1..36: mol_type = other DNA
attatagcatatcgaaaatttattaggaactataac

SEQ ID NO: 11297 - DNA, 36 bp, synthetic construct
  misc_feature 1..36: note = Description of Artificial Sequence: Synthetic oligonucleotide
  source 1..36: mol_type = other DNA
attatagcatatcgaagtggaaaagggtgctataac

SEQ ID NO: 11298 - DNA, 36 bp, synthetic construct
  misc_feature 1..36: note = Description of Artificial Sequence: Synthetic oligonucleotide
  source 1..36: mol_type = other DNA
attatagcatatcgagaatttagtaggaactataac

SEQ ID NO: 11299 - DNA, 36 bp, synthetic construct
  misc_feature 1..36: note = Description of Artificial Sequence: Synthetic oligonucleotide
  source 1..36: mol_type = other DNA
attatagcatatcgggaaatcacagggaataaaaac

SEQ ID NO: 11300 - DNA, 36 bp, synthetic construct
  misc_feature 1..36: note = Description of Artificial Sequence: Synthetic oligonucleotide
  source 1..36: mol_type = other DNA
attatagcatatctgatttggaaaggaagctataac

SEQ ID NO: 11301 - DNA, 36 bp, synthetic construct
  misc_feature 1..36: note = Description of Artificial Sequence: Synthetic oligonucleotide
  source 1..36: mol_type = other DNA
attatagcatattaaaaattaggtttcaactcgaac

SEQ ID NO: 11302 - DNA, 36 bp, synthetic construct
  misc_feature 1..36: note = Description of Artificial Sequence: Synthetic oligonucleotide
  source 1..36: mol_type = other DNA
attatagcatatttgagtgggaacaggtgctataac

SEQ ID NO: 11303 - DNA, 36 bp, synthetic construct
  misc_feature 1..36: note = Description of Artificial Sequence: Synthetic oligonucleotide
  source 1..36: mol_type = other DNA
attatagcatatttgtgtgggaacaggcgctataac

SEQ ID NO: 11304 - DNA, 36 bp, synthetic construct
  misc_feature 1..36: note = Description of Artificial Sequence: Synthetic oligonucleotide
  source 1..36: mol_type = other DNA
attatagcatgtcggaacctaatagggagctatgac

SEQ ID NO: 11305 - DNA, 36 bp, synthetic construct
  misc_feature 1..36: note = Description of Artificial Sequence: Synthetic oligonucleotide
  source 1..36: mol_type = other DNA
attatagcatgtcggagtataaagggaagctgtaac

SEQ ID NO: 11306 - DNA, 36 bp, synthetic construct
  misc_feature 1..36: note = Description of Artificial Sequence: Synthetic oligonucleotide
  source 1..36: mol_type = other DNA
attatagcatttacatgtaggaatgggagctataac

SEQ ID NO: 11307 - DNA, 36 bp, synthetic construct
  misc_feature 1..36: note = Description of Artificial Sequence: Synthetic oligonucleotide
  source 1..36: mol_type = other DNA
attatagccgatggggaaacgagggccagccgcaac

SEQ ID NO: 11308 - DNA, 36 bp, synthetic construct
  misc_feature 1..36: note = Description of Artificial Sequence: Synthetic oligonucleotide
  source 1..36: mol_type = other DNA
attatagcgaaccggggtgagaaaggaagctacaac

SEQ ID NO: 11309 - DNA, 36 bp, synthetic construct
  misc_feature 1..36: note = Description of Artificial Sequence: Synthetic oligonucleotide
  source 1..36: mol_type = other DNA
attatagcgcagaagagtaggattggtggctataac

SEQ ID NO: 11310 - DNA, 36 bp, synthetic construct
  misc_feature 1..36: note = Description of Artificial Sequence: Synthetic oligonucleotide
  source 1..36: mol_type = other DNA
attatagcgcatccgagtgagaaagggggctataac

SEQ ID NO: 11311 - DNA, 36 bp, synthetic construct
  misc_feature 1..36: note = Description of Artificial Sequence: Synthetic oligonucleotide
  source 1..36: mol_type = other DNA
attatagcgcatccgagtgagaaaggtggctatgac

SEQ ID NO: 11312 - DNA, 36 bp, synthetic construct
  misc_feature 1..36: note = Description of Artificial Sequence: Synthetic oligonucleotide
  source 1..36: mol_type = other DNA
attatagcggcctggtgattgagggccagccgcaac

SEQ ID NO: 11313 - DNA, 36 bp, synthetic construct
  misc_feature 1..36: note = Description of Artificial Sequence: Synthetic oligonucleotide
  source 1..36: mol_type = other DNA
attatagcgtatttgtgtgggaacaggttctataac

SEQ ID NO: 11314 - DNA, 36 bp, synthetic construct
  misc_feature 1..36: note = Description of Artificial Sequence: Synthetic oligonucleotide
  source 1..36: mol_type = other DNA
attatagcgtatttgtgtggggaagggtgctataac

SEQ ID NO: 11315 - DNA, 36 bp, synthetic construct
  misc_feature 1..36: note = Description of Artificial Sequence: Synthetic oligonucleotide
  source 1..36: mol_type = other DNA
attatagctgactaagaattgtggtccagccgcaac

SEQ ID NO: 11316 - DNA, 36 bp, synthetic construct
  misc_feature 1..36: note = Description of Artificial Sequence: Synthetic oligonucleotide
  source 1..36: mol_type = other DNA
attatagctgattaaattagggtgtccagtcgcaac

SEQ ID NO: 11317 - DNA, 36 bp, synthetic construct
  misc_feature 1..36: note = Description of Artificial Sequence: Synthetic oligonucleotide
  source 1..36: mol_type = other DNA
attatagctgattaatttttctggtcaacctgcaac

SEQ ID NO: 11318 - DNA, 36 bp, synthetic construct
  misc_feature 1..36: note = Description of Artificial Sequence: Synthetic oligonucleotide
  source 1..36: mol_type = other DNA
attatagctttccggggagagagaggaaactacaac

SEQ ID NO: 11319 - DNA, 25 bp, synthetic construct
  misc_feature 1..25: note = Description of Artificial Sequence: Synthetic oligonucleotide
  source 1..25: mol_type = other DNA
attatagtcctgcggagtgagaaag

SEQ ID NO: 11320 - DNA, 36 bp, synthetic construct
  misc_feature 1..36: note = Description of Artificial Sequence: Synthetic oligonucleotide
  source 1..36: mol_type = other DNA
attatagttccctaaaatctttcggtatggtataat

SEQ ID NO: 11321 - DNA, 36 bp, synthetic construct
  misc_feature 1..36: note = Description of Artificial Sequence: Synthetic oligonucleotide
  source 1..36: mol_type = other DNA
attatatcaaatcctaaatctttgttgcgtcaaaac

SEQ ID NO: 11322 - DNA, 36 bp, synthetic construct
  misc_feature 1..36: note = Description of Artificial Sequence: Synthetic oligonucleotide
  source 1..36: mol_type = other DNA
attatatcaaatccttttttttcggcacgtcaaaac

SEQ ID NO: 11323 - DNA, 36 bp, synthetic construct
  misc_feature 1..36: note = Description of Artificial Sequence: Synthetic oligonucleotide
  source 1..36: mol_type = other DNA
attatatcaaatggggatttgaaagcaggttaaagc

SEQ ID NO: 11324 - DNA, 36 bp, synthetic construct
  misc_feature 1..36: note = Description of Artificial Sequence: Synthetic oligonucleotide
  source 1..36: mol_type = other DNA
attatatcaaatggggatttgaaagtaggttaaagc

SEQ ID NO: 11325 - DNA, 36 bp, synthetic construct
  misc_feature 1..36: note = Description of Artificial Sequence: Synthetic oligonucleotide
  source 1..36: mol_type = other DNA
attatatcaaatggggatttgagagtagattaaaac

SEQ ID NO: 11326 - DNA, 36 bp, synthetic construct
  misc_feature 1..36: note = Description of Artificial Sequence: Synthetic oligonucleotide
  source 1..36: mol_type = other DNA
attatatcaaatggggatttgagagtaggttaaagt

SEQ ID NO: 11327 - DNA, 36 bp, synthetic construct
  misc_feature 1..36: note = Description of Artificial Sequence: Synthetic oligonucleotide
  source 1..36: mol_type = other DNA
attatatcaatatctaaattgttagggaactataac

SEQ ID NO: 11328 - DNA, 36 bp, synthetic construct
  misc_feature 1..36: note = Description of Artificial Sequence: Synthetic oligonucleotide
  source 1..36: mol_type = other DNA
attatatcaatgccaattaggaaagcaatctacaac

SEQ ID NO: 11329 - DNA, 36 bp, synthetic construct
  misc_feature 1..36: note = Description of Artificial Sequence: Synthetic oligonucleotide
  source 1..36: mol_type = other DNA
attatatcacaacgggaaattgaagggaataaaaac

SEQ ID NO: 11330 - DNA, 36 bp, synthetic construct
  misc_feature 1..36: note = Description of Artificial Sequence: Synthetic oligonucleotide
  source 1..36: mol_type = other DNA
attatatcactatcgaaattattagaggactataac

SEQ ID NO: 11331 - DNA, 36 bp, synthetic construct
  misc_feature 1..36: note = Description of Artificial Sequence: Synthetic oligonucleotide
  source 1..36: mol_type = other DNA
attatatcactatctaaattgttagggaactataac

SEQ ID NO: 11332 - DNA, 36 bp, synthetic construct
  misc_feature 1..36: note = Description of Artificial Sequence: Synthetic oligonucleotide
  source 1..36: mol_type = other DNA
attatatcactatctaaattgttaggggactataac

SEQ ID NO: 11333 - DNA, 37 bp, synthetic construct
  misc_feature 1..37: note = Description of Artificial Sequence: Synthetic oligonucleotide
  source 1..37: mol_type = other DNA
attatatcactctaaggaattacagggaacaaaaact

SEQ ID NO: 11334 - DNA, 36 bp, synthetic construct
  misc_feature 1..36: note = Description of Artificial Sequence: Synthetic oligonucleotide
  source 1..36: mol_type = other DNA
attatatcagacatgaaaatgagagcaagttataac

SEQ ID NO: 11335 - DNA, 36 bp, synthetic construct
  misc_feature 1..36: note = Description of Artificial Sequence: Synthetic oligonucleotide
  source 1..36: mol_type = other DNA
attatatcagatatgaatttgagagcaagttataac

SEQ ID NO: 11336 - DNA, 36 bp, synthetic construct
  misc_feature 1..36: note = Description of Artificial Sequence: Synthetic oligonucleotide
  source 1..36: mol_type = other DNA
attatatcagattggaattagatgtctactcgcaac

SEQ ID NO: 11337 - DNA, 36 bp, synthetic construct
  misc_feature 1..36: note = Description of Artificial Sequence: Synthetic oligonucleotide
  source 1..36: mol_type = other DNA
attatatcagattggaattcggtgtctaggtgcaac

SEQ ID NO: 11338 - DNA, 36 bp, synthetic construct
  misc_feature 1..36: note = Description of Artificial Sequence: Synthetic oligonucleotide
  source 1..36: mol_type = other DNA
attatatcataccaagcgataaccgggaacaacaac

SEQ ID NO: 11339 - DNA, 36 bp, synthetic construct
  misc_feature 1..36: note = Description of Artificial Sequence: Synthetic oligonucleotide
  source 1..36: mol_type = other DNA
attatatcatagcagaaatcaaaagggaactacaac

SEQ ID NO: 11340 - DNA, 36 bp, synthetic construct
  misc_feature 1..36: note = Description of Artificial Sequence: Synthetic oligonucleotide
  source 1..36: mol_type = other DNA
attatatcatatcaaaacttagtagtgaactataac

SEQ ID NO: 11341 - DNA, 36 bp, synthetic construct
  misc_feature 1..36: note = Description of Artificial Sequence: Synthetic oligonucleotide
  source 1..36: mol_type = other DNA
attatatcatatcaaaatataacagggaactataac

SEQ ID NO: 11342 - DNA, 36 bp, synthetic construct
  misc_feature 1..36: note = Description of Artificial Sequence: Synthetic oligonucleotide
  source 1..36: mol_type = other DNA
attatatcatatcaaaatttaaaagagaactataac

SEQ ID NO: 11343 - DNA, 36 bp, synthetic construct
  misc_feature 1..36: note = Description of Artificial Sequence: Synthetic oligonucleotide
  source 1..36: mol_type = other DNA
attatatcatattctaaattgtcagggaactataac

SEQ ID NO: 11344 - DNA, 36 bp, synthetic construct
  misc_feature 1..36: note = Description of Artificial Sequence: Synthetic oligonucleotide
  source 1..36: mol_type = other DNA
attatatcatatttttgataggggtatcaatatgac

SEQ ID NO: 11345 - DNA, 36 bp, synthetic construct
  misc_feature 1..36: note = Description of Artificial Sequence: Synthetic oligonucleotide
  source 1..36: mol_type = other DNA
attatatcattgtcaaaaaactttacaagacccagc

SEQ ID NO: 11346 - DNA, 36 bp, synthetic construct
  misc_feature 1..36: note = Description of Artificial Sequence: Synthetic oligonucleotide
  source 1..36: mol_type = other DNA
attatatcgctcgcgcctccggggggaaggcaaaac

SEQ ID NO: 11347 - DNA, 36 bp, synthetic construct
  misc_feature 1..36: note = Description of Artificial Sequence: Synthetic oligonucleotide
  source 1..36: mol_type = other DNA
attatatcgtattcatacttagagtgggaatttaac

SEQ ID NO: 11348 - DNA, 36 bp, synthetic construct
  misc_feature 1..36: note = Description of Artificial Sequence: Synthetic oligonucleotide
  source 1..36: mol_type = other DNA
attatcatacatcaaaattagaaatcaaaccacaac

SEQ ID NO: 11349 - DNA, 47 bp, synthetic construct
  misc_feature 1..47: note = Description of Artificial Sequence: Synthetic oligonucleotide
  source 1..47: mol_type = other DNA
attatgatttgctttcaaattagtatctttgaaccattgggaacagc

SEQ ID NO: 11350 - DNA, 36 bp, synthetic construct
  misc_feature 1..36: note = Description of Artificial Sequence: Synthetic oligonucleotide
  source 1..36: mol_type = other DNA
attatgctctacccatttttggaatcaaggcaaagc

SEQ ID NO: 11351 - DNA, 36 bp, synthetic construct
  misc_feature 1..36: note = Description of Artificial Sequence: Synthetic oligonucleotide
  source 1..36: mol_type = other DNA
attattttacatcaaaaatagaaatcaaaccacaac

SEQ ID NO: 11352 - DNA, 36 bp, synthetic construct
  misc_feature 1..36: note = Description of Artificial Sequence: Synthetic oligonucleotide
  source 1..36: mol_type = other DNA
attattttacatcaaagatagaaatcaaaccacaac

SEQ ID NO: 11353 - DNA, 36 bp, synthetic construct
  misc_feature 1..36: note = Description of Artificial Sequence: Synthetic oligonucleotide
  source 1..36: mol_type = other DNA
attattttacatcaaagatcgaaatcaaaccacaac

SEQ ID NO: 11354 - DNA, 36 bp, synthetic construct
  misc_feature 1..36: note = Description of Artificial Sequence: Synthetic oligonucleotide
  source 1..36: mol_type = other DNA
attcaactataccgaaaaactggagagtaccgaaac

SEQ ID NO: 11355 - DNA, 35 bp, synthetic construct
  misc_feature 1..35: note = Description of Artificial Sequence: Synthetic oligonucleotide
  source 1..35: mol_type = other DNA
attcagtttactcagaaaaatggtcggcctgcaac

SEQ ID NO: 11356 - DNA, 37 bp, synthetic construct
  misc_feature 1..37: note = Description of Artificial Sequence: Synthetic oligonucleotide
  source 1..37: mol_type = other DNA
attccagtaaccctcttttttgatgcaaactataact

SEQ ID NO: 11357 - DNA, 36 bp, synthetic construct
  misc_feature 1..36: note = Description of Artificial Sequence: Synthetic oligonucleotide
  source 1..36: mol_type = other DNA
attctaaaccactgggagatgcgcactggccggaac

SEQ ID NO: 11358 - DNA, 36 bp, synthetic construct
  misc_feature 1..36: note = Description of Artificial Sequence: Synthetic oligonucleotide
  source 1..36: mol_type = other DNA
attctaaaccattgagatatgtactgtggccggaac

SEQ ID NO: 11359 - DNA, 36 bp, synthetic construct
  misc_feature 1..36: note = Description of Artificial Sequence: Synthetic oligonucleotide
  source 1..36: mol_type = other DNA
attctaacagacttcgccggggggtgaagtcagaac

SEQ ID NO: 11360 - DNA, 36 bp, synthetic construct
  misc_feature 1..36: note = Description of Artificial Sequence: Synthetic oligonucleotide
  source 1..36: mol_type = other DNA
attctaacgacccggcccccggggggaaggcaaaac

SEQ ID NO: 11361 - DNA, 36 bp, synthetic construct
  misc_feature 1..36: note = Description of Artificial Sequence: Synthetic oligonucleotide
  source 1..36: mol_type = other DNA
attctaacgcgcgcgcctccggggggaaggcaaaac

SEQ ID NO: 11362 - DNA, 36 bp, synthetic construct
  misc_feature 1..36: note = Description of Artificial Sequence: Synthetic oligonucleotide
  source 1..36: mol_type = other DNA
attctaactcatctgattcaggcgccaaaccgcaac

SEQ ID NO: 11363 - DNA, 29 bp, synthetic construct
  misc_feature 1..29: note = Description of Artificial Sequence: Synthetic oligonucleotide
  source 1..29: mol_type = other DNA
attctacacgattgggaaatgtgctctga

SEQ ID NO: 11364 - DNA, 36 bp, synthetic construct
  misc_feature 1..36: note = Description of Artificial Sequence: Synthetic oligonucleotide
  source 1..36: mol_type = other DNA
attctaccaaactgtcctcttgggggaagacaaaac

SEQ ID NO: 11365 - DNA, 36 bp, synthetic construct
  misc_feature 1..36: note = Description of Artificial Sequence: Synthetic oligonucleotide
  source 1..36: mol_type = other DNA
attctacctcacgtgcttccggggggaaggcaaaac

SEQ ID NO: 11366 - DNA, 36 bp, synthetic construct
  misc_feature 1..36: note = Description of Artificial Sequence: Synthetic oligonucleotide
  source 1..36: mol_type = other DNA
attctactatcccttggacggggggcaatcccaaac

SEQ ID NO: 11367 - DNA, 36 bp, synthetic construct
  misc_feature 1..36: note = Description of Artificial Sequence: Synthetic oligonucleotide
  source 1..36: mol_type = other DNA
attctactctatcgggatatgagctctggccggaac

SEQ ID NO: 11368 - DNA, 36 bp, synthetic construct
  misc_feature 1..36: note = Description of Artificial Sequence: Synthetic oligonucleotide
  source 1..36: mol_type = other DNA
attctagacgattgggatttgagctctggccggaac

SEQ ID NO: 11369 - DNA, 36 bp, synthetic construct
  misc_feature 1..36: note = Description of Artificial Sequence: Synthetic oligonucleotide
  source 1..36: mol_type = other DNA
attctagacgattgggatttgcgctctggccggaac

SEQ ID NO: 11370 - DNA, 36 bp, synthetic construct
  misc_feature 1..36: note = Description of Artificial Sequence: Synthetic oligonucleotide
  source 1..36: mol_type = other DNA
attctagcacatcttaatttgatttaaagccggaac

SEQ ID NO: 11371 - DNA, 36 bp, synthetic construct
  misc_feature 1..36: note = Description of Artificial Sequence: Synthetic oligonucleotide
  source 1..36: mol_type = other DNA
attctagcagctcaggctttggggtccagccgcaac

SEQ ID NO: 11372 - DNA, 36 bp, synthetic construct
  misc_feature 1..36: note = Description of Artificial Sequence: Synthetic oligonucleotide
  source 1..36: mol_type = other DNA
attctagcatctcaaggaatggcactccgctagggc

SEQ ID NO: 11373 - DNA, 36 bp, synthetic construct
  misc_feature 1..36: note = Description of Artificial Sequence: Synthetic oligonucleotide
  source 1..36: mol_type = other DNA
attctagcatctcagtgaatggcactccgctagggc

SEQ ID NO: 11374 - DNA, 36 bp, synthetic construct
  misc_feature 1..36: note = Description of Artificial Sequence: Synthetic oligonucleotide
  source 1..36: mol_type = other DNA
attctataaaatctgtatcagtaaggctactgcaac

SEQ ID NO: 11375 - DNA, 36 bp, synthetic construct
  misc_feature 1..36: note = Description of Artificial Sequence: Synthetic oligonucleotide
  source 1..36: mol_type = other DNA
attctatcgcacgcgcctccggggggaaggcaaaac

SEQ ID NO: 11376 - DNA, 36 bp, synthetic construct
  misc_feature 1..36: note = Description of Artificial Sequence: Synthetic oligonucleotide
  source 1..36: mol_type = other DNA
attctatcgctcgcgcctccggggggaaggcaaaac

SEQ ID NO: 11377 - DNA, 47 bp, synthetic construct
  misc_feature 1..47: note = Description of Artificial Sequence: Synthetic oligonucleotide
  source 1..47: mol_type = other DNA
attctatgcaaaattcgtcaaacaaacttttgaaagcaaaccacaac

SEQ ID NO: 11378 - DNA, 36 bp, synthetic construct
  misc_feature 1..36: note = Description of Artificial Sequence: Synthetic oligonucleotide
  source 1..36: mol_type = other DNA
attctgagcgacttctcaggggagtgaagtcaaaac

SEQ ID NO: 11379 - DNA, 36 bp, synthetic construct
  misc_feature 1..36: note = Description of Artificial Sequence: Synthetic oligonucleotide
  source 1..36: mol_type = other DNA
attctgcacgcctcggctttggaatcaaggcaaagc

SEQ ID NO: 11380 - DNA, 36 bp, synthetic construct
  misc_feature 1..36: note = Description of Artificial Sequence: Synthetic oligonucleotide
  source 1..36: mol_type = other DNA
attctgccccccccggatttggaatcaaggcaaagc

SEQ ID NO: 11381 - DNA, 35 bp, synthetic construct
  misc_feature 1..35: note = Description of Artificial Sequence: Synthetic oligonucleotide
  source 1..35: mol_type = other DNA
attctgcccgcctctgaattggactcaaggcaaag

SEQ ID NO: 11382 - DNA, 36 bp, synthetic construct
  misc_feature 1..36: note = Description of Artificial Sequence: Synthetic oligonucleotide
  source 1..36: mol_type = other DNA
attctgctcaaagcgcttttggtgtcaagctgtaac

SEQ ID NO: 11383 - DNA, 36 bp, synthetic construct
  misc_feature 1..36: note = Description of Artificial Sequence: Synthetic oligonucleotide
  source 1..36: mol_type = other DNA
attctgctccccccagttttggaatcaaggcaaagc

SEQ ID NO: 11384 - DNA, 36 bp, synthetic construct
  misc_feature 1..36: note = Description of Artificial Sequence: Synthetic oligonucleotide
  source 1..36: mol_type = other DNA
attctgctccgcccggttttggaatcaaggcaaagc

SEQ ID NO: 11385 - DNA, 36 bp, synthetic construct
  misc_feature 1..36: note = Description of Artificial Sequence: Synthetic oligonucleotide
  source 1..36: mol_type = other DNA
attcttgaactgattgatctgacatctacctgagac

SEQ ID NO: 11386 - DNA, 36 bp, synthetic construct
  misc_feature 1..36: note = Description of Artificial Sequence: Synthetic oligonucleotide
  source 1..36: mol_type = other DNA
attgaaaaaggctttaaattttcgttattttgtacc

SEQ ID NO: 11387 - DNA, 47 bp, synthetic construct
  misc_feature 1..47: note = Description of Artificial Sequence: Synthetic oligonucleotide
  source 1..47: mol_type = other DNA
attgaaagaacttaatcaaagatagaaattcgaaagtaaatcacaac

SEQ ID NO: 11388 - DNA, 36 bp, synthetic construct
  misc_feature 1..36: note = Description of Artificial Sequence: Synthetic oligonucleotide
  source 1..36: mol_type = other DNA
attgagaatcttttattattcactttgatacactta

SEQ ID NO: 11389 - DNA, 36 bp, synthetic construct
  misc_feature 1..36: note = Description of Artificial Sequence: Synthetic oligonucleotide
  source 1..36: mol_type = other DNA
attgcaggttgattggaaaaattaatcagttataat

SEQ ID NO: 11390 - DNA, 36 bp, synthetic construct
  misc_feature 1..36: note = Description of Artificial Sequence: Synthetic oligonucleotide
  source 1..36: mol_type = other DNA
attggggatgattgctgatctttgttaagatgaacc

SEQ ID NO: 11391 - DNA, 46 bp, synthetic construct
  misc_feature 1..46: note = Description of Artificial Sequence: Synthetic oligonucleotide
  source 1..46: mol_type = other DNA
attggtttgaatctattcagaataaaatttgaaagcaaactacaac

SEQ ID NO: 11392 - DNA, 46 bp, synthetic construct
  misc_feature 1..46: note = Description of Artificial Sequence: Synthetic oligonucleotide
  source 1..46: mol_type = other DNA
attgtaacaaatatcagtaagtcaaagaatgaaagcaaatcacaac

SEQ ID NO: 11393 - DNA, 36 bp, synthetic construct
  misc_feature 1..36: note = Description of Artificial Sequence: Synthetic oligonucleotide
  source 1..36: mol_type = other DNA
attgtaacacacttggggaaggatgcaagtcacagc

SEQ ID NO: 11394 - DNA, 36 bp, synthetic construct
  misc_feature 1..36: note = Description of Artificial Sequence: Synthetic oligonucleotide
  source 1..36: mol_type = other DNA
attgtaacacgctggaaaaagttggggaatcaaaac

SEQ ID NO: 11395 - DNA, 36 bp, synthetic construct
  misc_feature 1..36: note = Description of Artificial Sequence: Synthetic oligonucleotide
  source 1..36: mol_type = other DNA
attgtaacagcttgatagatggcaacgcgctagggc

SEQ ID NO: 11396 - DNA, 36 bp, synthetic construct
  misc_feature 1..36: note = Description of Artificial Sequence: Synthetic oligonucleotide
  source 1..36: mol_type = other DNA
attgtaacaggatagagcttgcatctcatagatagt

SEQ ID NO: 11397 - DNA, 36 bp, synthetic construct
  misc_feature 1..36: note = Description of Artificial Sequence: Synthetic oligonucleotide
  source 1..36: mol_type = other DNA
attgtaaccgaccccggcctgccagcaatccccaac

SEQ ID NO: 11398 - DNA, 36 bp, synthetic construct
  misc_feature 1..36: note = Description of Artificial Sequence: Synthetic oligonucleotide
  source 1..36: mol_type = other DNA
attgtaaccgatccgcgtctgagggcaagtcacaac

SEQ ID NO: 11399 - DNA, 36 bp, synthetic construct
  misc_feature 1..36: note = Description of Artificial Sequence: Synthetic oligonucleotide
  source 1..36: mol_type = other DNA
attgtaacgaatattgatttagaggggtattaaaac

SEQ ID NO: 11400 - DNA, 36 bp, synthetic construct
  misc_feature 1..36: note = Description of Artificial Sequence: Synthetic oligonucleotide
  source 1..36: mol_type = other DNA
attgtaacgcataggagtttatagaggtattaaaac

SEQ ID NO: 11401 - DNA, 36 bp, synthetic construct
  misc_feature 1..36: note = Description of Artificial Sequence: Synthetic oligonucleotide
  source 1..36: mol_type = other DNA
attgtaacgcatagtcgtttataggggtattaaaac

SEQ ID NO: 11402 - DNA, 36 bp, synthetic construct
  misc_feature 1..36: note = Description of Artificial Sequence: Synthetic oligonucleotide
  source 1..36: mol_type = other DNA
attgtaactaatccatgcctgagagcaagccacaac

SEQ ID NO: 11403 - DNA, 36 bp, synthetic construct
  misc_feature 1..36: note = Description of Artificial Sequence: Synthetic oligonucleotide
  source 1..36: mol_type = other DNA
attgtaactaatccgtgcctgagtgcaagccacaac

SEQ ID NO: 11404 - DNA, 36 bp, synthetic construct
  misc_feature 1..36: note = Description of Artificial Sequence: Synthetic oligonucleotide
  source 1..36: mol_type = other DNA
attgtaactcacgcgcctctggggggaaggcaaaac

SEQ ID NO: 11405 - DNA, 36 bp, synthetic construct
  misc_feature 1..36: note = Description of Artificial Sequence: Synthetic oligonucleotide
  source 1..36: mol_type = other DNA
attgtaactgaccggtccctgagagcaagccacaac

SEQ ID NO: 11406 - DNA, 36 bp, synthetic construct
  misc_feature 1..36: note = Description of Artificial Sequence: Synthetic oligonucleotide
  source 1..36: mol_type = other DNA
attgtaactgacctatgcctgagagcaagccacaac

SEQ ID NO: 11407 - DNA, 36 bp, synthetic construct
  misc_feature 1..36: note = Description of Artificial Sequence: Synthetic oligonucleotide
  source 1..36: mol_type = other DNA
attgtaactgatcccagcctgaagtcaatccgcaac

SEQ ID NO: 11408 - DNA, 36 bp, synthetic construct
  misc_feature 1..36: note = Description of Artificial Sequence: Synthetic oligonucleotide
  source 1..36: mol_type = other DNA
attgtaactgatccgagcctgagtgcaagccacaac

SEQ ID NO: 11409 - DNA, 36 bp, synthetic construct
  misc_feature 1..36: note = Description of Artificial Sequence: Synthetic oligonucleotide
  source 1..36: mol_type = other DNA
attgtaactgatccgcccctgagggcaagccacaac

SEQ ID NO: 11410 - DNA, 36 bp, synthetic construct
  misc_feature 1..36: note = Description of Artificial Sequence: Synthetic oligonucleotide
  source 1..36: mol_type = other DNA
attgtaactgatccgcccctgagtgcaagtcacaac

SEQ ID NO: 11411 - DNA, 37 bp, synthetic construct
  misc_feature 1..37: note = Description of Artificial Sequence: Synthetic oligonucleotide
  source 1..37: mol_type = other DNA
attgtaactgatccgcgcctgagggcaagtcacaacg

SEQ ID NO: 11412 - DNA, 24 bp, synthetic construct
  misc_feature 1..24: note = Description of Artificial Sequence: Synthetic oligonucleotide
  source 1..24: mol_type = other DNA
attgtaactgatccgcgtctgagg

SEQ ID NO: 11413 - DNA, 36 bp, synthetic construct
  misc_feature 1..36: note = Description of Artificial Sequence: Synthetic oligonucleotide
  source 1..36: mol_type = other DNA
attgtaactgatccgcgtctgagggcaagccacaac

SEQ ID NO: 11414 - DNA, 39 bp, synthetic construct
  misc_feature 1..39: note = Description of Artificial Sequence: Synthetic oligonucleotide
  source 1..39: mol_type = other DNA
attgtaactgatccgcgtctgagggcaagtcacaacaca

SEQ ID NO: 11415 - DNA, 36 bp, synthetic construct
  misc_feature 1..36: note = Description of Artificial Sequence: Synthetic oligonucleotide
  source 1..36: mol_type = other DNA
attgtaactgatccgcgtctgagtgcaagccacaac

SEQ ID NO: 11416 - DNA, 36 bp, synthetic construct
  misc_feature 1..36: note = Description of Artificial Sequence: Synthetic oligonucleotide
  source 1..36: mol_type = other DNA
attgtaactgatccgcgtctgagtgcaagtcacaac

SEQ ID NO: 11417 - DNA, 36 bp, synthetic construct
  misc_feature 1..36: note = Description of Artificial Sequence: Synthetic oligonucleotide
  source 1..36: mol_type = other DNA
attgtaactgatccgtgcctgagagcaagccacaac

SEQ ID NO: 11418 - DNA, 36 bp, synthetic construct
  misc_feature 1..36: note = Description of Artificial Sequence: Synthetic oligonucleotide
  source 1..36: mol_type = other DNA
attgtaactgatccgtgcctgagtgcaagccacaac

SEQ ID NO: 11419 - DNA, 37 bp, synthetic construct
  misc_feature 1..37: note = Description of Artificial Sequence: Synthetic oligonucleotide
  source 1..37: mol_type = other DNA
attgtaactgatccgtgcctgagtgcaagccacaacc

SEQ ID NO: 11420 - DNA, 36 bp, synthetic construct
  misc_feature 1..36: note = Description of Artificial Sequence: Synthetic oligonucleotide
  source 1..36: mol_type = other DNA
attgtaactgatccgtgcctgagtgcaagtcacaac

SEQ ID NO: 11421 - DNA, 36 bp, synthetic construct
  misc_feature 1..36: note = Description of Artificial Sequence: Synthetic oligonucleotide
  source 1..36: mol_type = other DNA
attgtaagaactaagttagcgaaagcaaatcacaac

SEQ ID NO: 11422 - DNA, 36 bp, synthetic construct
  misc_feature 1..36: note = Description of Artificial Sequence: Synthetic oligonucleotide
  source 1..36: mol_type = other DNA
attgtaatcataccgaattcgggagcaatccccaac

SEQ ID NO: 11423 - DNA, 47 bp, synthetic construct
  misc_feature 1..47: note = Description of Artificial Sequence: Synthetic oligonucleotide
  source 1..47: mol_type = other DNA
attgtaattgcgaggtaaagttacttaaattgaaagctaattacaac

SEQ ID NO: 11424 - DNA, 36 bp, synthetic construct
  misc_feature 1..36: note = Description of Artificial Sequence: Synthetic oligonucleotide
  source 1..36: mol_type = other DNA
attgtacagtattcttactttgagtgggggtataac

SEQ ID NO: 11425 - DNA, 36 bp, synthetic construct
  misc_feature 1..36: note = Description of Artificial Sequence: Synthetic oligonucleotide
  source 1..36: mol_type = other DNA
attgtacagttacttaaatcttgagagtacaaaaac

SEQ ID NO: 11426 - DNA, 36 bp, synthetic construct
  misc_feature 1..36: note = Description of Artificial Sequence: Synthetic oligonucleotide
  source 1..36: mol_type = other DNA
attgtaccaaaccaagactcatgagggaactacaac

SEQ ID NO: 11427 - DNA, 36 bp, synthetic construct
  misc_feature 1..36: note = Description of Artificial Sequence: Synthetic oligonucleotide
  source 1..36: mol_type = other DNA
attgtaccaaaccaatgaccagcagggaactacaac

SEQ ID NO: 11428 - DNA, 36 bp, synthetic construct
  misc_feature 1..36: note = Description of Artificial Sequence: Synthetic oligonucleotide
  source 1..36: mol_type = other DNA
attgtaccaaagcggcgattctccacaggccacagc

SEQ ID NO: 11429 - DNA, 36 bp, synthetic construct
  misc_feature 1..36: note = Description of Artificial Sequence: Synthetic oligonucleotide
  source 1..36: mol_type = other DNA
attgtaccaactggggaattggaaggccggcaagac

SEQ ID NO: 11430 - DNA, 29 bp, synthetic construct
  misc_feature 1..29: note = Description of Artificial Sequence: Synthetic oligonucleotide
  source 1..29: mol_type = other DNA
attgtaccacacaaatgcctgcccgcaag

SEQ ID NO: 11431 - DNA, 36 bp, synthetic construct
  misc_feature 1..36: note = Description of Artificial Sequence: Synthetic oligonucleotide
  source 1..36: mol_type = other DNA
attgtaccacacaaatgcctgtccgcaagccacaac

SEQ ID NO: 11432 - DNA, 36 bp, synthetic construct
  misc_feature 1..36: note = Description of Artificial Sequence: Synthetic oligonucleotide
  source 1..36: mol_type = other DNA
attgtaccacacaaatgcctgtctgcaagccacaac

SEQ ID NO: 11433 - DNA, 36 bp, synthetic construct
  misc_feature 1..36: note = Description of Artificial Sequence: Synthetic oligonucleotide
  source 1..36: mol_type = other DNA
attgtaccagagcgacgattccccaccaactacagt

SEQ ID NO: 11434 - DNA, 36 bp, synthetic construct
  misc_feature 1..36: note = Description of Artificial Sequence: Synthetic oligonucleotide
  source 1..36: mol_type = other DNA
attgtaccagagcgacgattcccggccaactacagt

SEQ ID NO: 11435 - DNA, 36 bp, synthetic construct
  misc_feature 1..36: note = Description of Artificial Sequence: Synthetic oligonucleotide
  source 1..36: mol_type = other DNA
attgtaccagagcgacgattccctgccaactacagt

SEQ ID NO: 11436 - DNA, 36 bp, synthetic construct
  misc_feature 1..36: note = Description of Artificial Sequence: Synthetic oligonucleotide
  source 1..36: mol_type = other DNA
attgtaccagagcgacgattccctgccagccacaac

SEQ ID NO: 11437 - DNA, 37 bp, synthetic construct
  misc_feature 1..37: note = Description of Artificial Sequence: Synthetic oligonucleotide
  source 1..37: mol_type = other DNA
attgtaccagagcggcgattacccgtcaactacagta

SEQ ID NO: 11438 - DNA, 36 bp, synthetic construct
  misc_feature 1..36: note = Description of Artificial Sequence: Synthetic oligonucleotide
  source 1..36: mol_type = other DNA
attgtaccagagcggcgattcccgaccaactacagt

SEQ ID NO: 11439 - DNA, 36 bp, synthetic construct
  misc_feature 1..36: note = Description of Artificial Sequence: Synthetic oligonucleotide
  source 1..36: mol_type = other DNA
attgtaccagagcggcggttcccgaccaactacagc

SEQ ID NO: 11440 - DNA, 36 bp, synthetic construct
  misc_feature 1..36: note = Description of Artificial Sequence: Synthetic oligonucleotide
  source 1..36: mol_type = other DNA
attgtaccagagcggcggttcccgaccaactacagt

SEQ ID NO: 11441 - DNA, 36 bp, synthetic construct
  misc_feature 1..36: note = Description of Artificial Sequence: Synthetic oligonucleotide
  source 1..36: mol_type = other DNA
attgtaccagagcggtgattcccgaccaactacagt

SEQ ID NO: 11442 - DNA, 36 bp, synthetic construct
  misc_feature 1..36: note = Description of Artificial Sequence: Synthetic oligonucleotide
  source 1..36: mol_type = other DNA
attgtaccataccaaatcttgaaagggaactaaaac

SEQ ID NO: 11443 - DNA, 36 bp, synthetic construct
  misc_feature 1..36: note = Description of Artificial Sequence: Synthetic oligonucleotide
  source 1..36: mol_type = other DNA
attgtaccataccaatttctgaaagggaactaaaac

SEQ ID NO: 11444 - DNA, 36 bp, synthetic construct
  misc_feature 1..36: note = Description of Artificial Sequence: Synthetic oligonucleotide
  source 1..36: mol_type = other DNA
attgtacccaagccgcgattgccggccgcccctagc

SEQ ID NO: 11445 - DNA, 36 bp, synthetic construct
  misc_feature 1..36: note = Description of Artificial Sequence: Synthetic oligonucleotide
  source 1..36: mol_type = other DNA
attgtacccaagcgacgattctccgcaagccacagc

SEQ ID NO: 11446 - DNA, 36 bp, synthetic construct
  misc_feature 1..36: note = Description of Artificial Sequence: Synthetic oligonucleotide
  source 1..36: mol_type = other DNA
attgtaccccaacggcgatttcccgtcagctacagc

SEQ ID NO: 11447 - DNA, 36 bp, synthetic construct
  misc_feature 1..36: note = Description of Artificial Sequence: Synthetic oligonucleotide
  source 1..36: mol_type = other DNA
attgtacccgaccaagggttacctgcaattcacaac

SEQ ID NO: 11448 - DNA, 36 bp, synthetic construct
  misc_feature 1..36: note = Description of Artificial Sequence: Synthetic oligonucleotide
  source 1..36: mol_type = other DNA
attgtacccgagcggcgattgcctgcaaaccacagc

SEQ ID NO: 11449 - DNA, 36 bp, synthetic construct
  misc_feature 1..36: note = Description of Artificial Sequence: Synthetic oligonucleotide
  source 1..36: mol_type = other DNA
attgtacccgagcggcgtttcccggccaaccacagc

SEQ ID NO: 11450 - DNA, 36 bp, synthetic construct
  misc_feature 1..36: note = Description of Artificial Sequence: Synthetic oligonucleotide
  source 1..36: mol_type = other DNA
attgtacccgatttgaatttgagagcaagttataac

SEQ ID NO: 11451 - DNA, 36 bp, synthetic construct
  misc_feature 1..36: note = Description of Artificial Sequence: Synthetic oligonucleotide
  source 1..36: mol_type = other DNA
attgtacctaagcggtgagtcccggccagccaaagc

SEQ ID NO: 11452 - DNA, 36 bp, synthetic construct
  misc_feature 1..36: note = Description of Artificial Sequence: Synthetic oligonucleotide
  source 1..36: mol_type = other DNA
attgtacctgagcggcgattcccggcaagctacagc

SEQ ID NO: 11453 - DNA, 36 bp, synthetic construct
  misc_feature 1..36: note = Description of Artificial Sequence: Synthetic oligonucleotide
  source 1..36: mol_type = other DNA
attgtacctgagcggcgattgtccgcaagccacagc

SEQ ID NO: 11454 - DNA, 36 bp, synthetic construct
  misc_feature 1..36: note = Description of Artificial Sequence: Synthetic oligonucleotide
  source 1..36: mol_type = other DNA
attgtacctgagcggcgattgtcctcaagccccagc

SEQ ID NO: 11455 - DNA, 36 bp, synthetic construct
  misc_feature 1..36: note = Description of Artificial Sequence: Synthetic oligonucleotide
  source 1..36: mol_type = other DNA
attgtacctgagcggcgatttcctccaagccacagc

SEQ ID NO: 11456 - DNA, 36 bp, synthetic construct
  misc_feature 1..36: note = Description of Artificial Sequence: Synthetic oligonucleotide
  source 1..36: mol_type = other DNA
attgtacctgagcggtcattgtccgacggccacagc

SEQ ID NO: 11457 - DNA, 36 bp, synthetic construct
  misc_feature 1..36: note = Description of Artificial Sequence: Synthetic oligonucleotide
  source 1..36: mol_type = other DNA
attgtacctgagcgtcggttcccttcaaaccacaac

SEQ ID NO: 11458 - DNA, 36 bp, synthetic construct
  misc_feature 1..36: note = Description of Artificial Sequence: Synthetic oligonucleotide
  source 1..36: mol_type = other DNA
attgtacgtgagcggcgattcccgaccaactccagc

SEQ ID NO: 11459 - DNA, 36 bp, synthetic construct
  misc_feature 1..36: note = Description of Artificial Sequence: Synthetic oligonucleotide
  source 1..36: mol_type = other DNA
attgtactcaggcggcgattccctgccaactacagt

SEQ ID NO: 11460 - DNA, 36 bp, synthetic construct
  misc_feature 1..36: note = Description of Artificial Sequence: Synthetic oligonucleotide
  source 1..36: mol_type = other DNA
attgtacttataccgtgtttctagtcaagccacagc

SEQ ID NO: 11461 - DNA, 36 bp, synthetic construct
  misc_feature 1..36: note = Description of Artificial Sequence: Synthetic oligonucleotide
  source 1..36: mol_type = other DNA
attgtagaaatcaaagaacagtagtcaatccgcaac

SEQ ID NO: 11462 - DNA, 36 bp, synthetic construct
  misc_feature 1..36: note = Description of Artificial Sequence: Synthetic oligonucleotide
  source 1..36: mol_type = other DNA
attgtagaatcccttggacggggggcaatcccaaac

SEQ ID NO: 11463 - DNA, 37 bp, synthetic construct
  misc_feature 1..37: note = Description of Artificial Sequence: Synthetic oligonucleotide
  source 1..37: mol_type = other DNA
attgtagagcatccggggtgagagagggagctacaac

SEQ ID NO: 11464 - DNA, 36 bp, synthetic construct
  misc_feature 1..36: note = Description of Artificial Sequence: Synthetic oligonucleotide
  source 1..36: mol_type = other DNA
attgtagagcatcgggatatgcgctctgaccggaac

SEQ ID NO: 11465 - DNA, 36 bp, synthetic construct
  misc_feature 1..36: note = Description of Artificial Sequence: Synthetic oligonucleotide
  source 1..36: mol_type = other DNA
attgtagcaaaccggggtgagagagggagctacaac

SEQ ID NO: 11466 - DNA, 36 bp, synthetic construct
  misc_feature 1..36: note = Description of Artificial Sequence: Synthetic oligonucleotide
  source 1..36: mol_type = other DNA
attgtagcaagacgagagaagatcgcaatccgcagc

SEQ ID NO: 11467 - DNA, 36 bp, synthetic construct
  misc_feature 1..36: note = Description of Artificial Sequence: Synthetic oligonucleotide
  source 1..36: mol_type = other DNA
attgtagcaagtcgagaggtggccgcaaaccacagc

SEQ ID NO: 11468 - DNA, 36 bp, synthetic construct
  misc_feature 1..36: note = Description of Artificial Sequence: Synthetic oligonucleotide
  source 1..36: mol_type = other DNA
attgtagcaatccgaggtgagagagggaactacaac

SEQ ID NO: 11469 - DNA, 36 bp, synthetic construct
  misc_feature 1..36: note = Description of Artificial Sequence: Synthetic oligonucleotide
  source 1..36: mol_type = other DNA
attgtagcaatccggggtgagagagggagctacaac

SEQ ID NO: 11470 - DNA, 36 bp, synthetic construct
  misc_feature 1..36: note = Description of Artificial Sequence: Synthetic oligonucleotide
  source 1..36: mol_type = other DNA
attgtagcaatccggggtgagagtgggagctacaac

SEQ ID NO: 11471 - DNA, 36 bp, synthetic construct
  misc_feature 1..36: note = Description of Artificial Sequence: Synthetic oligonucleotide
  source 1..36: mol_type = other DNA
attgtagcacgctggaaaaagggggggaatcaaaac

SEQ ID NO: 11472 - DNA, 36 bp, synthetic construct
  misc_feature 1..36: note = Description of Artificial Sequence: Synthetic oligonucleotide
  source 1..36: mol_type = other DNA
attgtagcacgtgaggaaatgagatcaagttataac

SEQ ID NO: 11473 - DNA, 36 bp, synthetic construct
  misc_feature 1..36: note = Description of Artificial Sequence: Synthetic oligonucleotide
  source 1..36: mol_type = other DNA
attgtagcactgcgaaatgagaaagggagctacaac

SEQ ID NO: 11474 - DNA, 36 bp, synthetic construct
  misc_feature 1..36: note = Description of Artificial Sequence: Synthetic oligonucleotide
  source 1..36: mol_type = other DNA
attgtagcactgcgaaatgagaaagggagctacagc

SEQ ID NO: 11475 - DNA, 36 bp, synthetic construct
  misc_feature 1..36: note = Description of Artificial Sequence: Synthetic oligonucleotide
  source 1..36: mol_type = other DNA
attgtagcagatatgaaaacgagagcaagttataac

SEQ ID NO: 11476 - DNA, 36 bp, synthetic construct
  misc_feature 1..36: note = Description of Artificial Sequence: Synthetic oligonucleotide
  source 1..36: mol_type = other DNA
attgtagcagatatgaaaatgagagcaagttataac

SEQ ID NO: 11477 - DNA, 36 bp, synthetic construct
  misc_feature 1..36: note = Description of Artificial Sequence: Synthetic oligonucleotide
  source 1..36: mol_type = other DNA
attgtagcagcccttggacggggggcaatcccaaac

SEQ ID NO: 11478 - DNA, 36 bp, synthetic construct
  misc_feature 1..36: note = Description of Artificial Sequence: Synthetic oligonucleotide
  source 1..36: mol_type = other DNA
attgtagcaggttcgattttggatggtagctacaac

SEQ ID NO: 11479 - DNA, 36 bp, synthetic construct
  misc_feature 1..36: note = Description of Artificial Sequence: Synthetic oligonucleotide
  source 1..36: mol_type = other DNA
attgtagcattccggggtgagagagggagctacaac

SEQ ID NO: 11480 - DNA, 36 bp, synthetic construct
  misc_feature 1..36: note = Description of Artificial Sequence: Synthetic oligonucleotide
  source 1..36: mol_type = other DNA
attgtagcatttcagaaatcgaggtccagccgcaac

SEQ ID NO: 11481 - DNA, 36 bp, synthetic construct
  misc_feature 1..36: note = Description of Artificial Sequence: Synthetic oligonucleotide
  source 1..36: mol_type = other DNA
attgtagcatttcggagtgtggcagggaactataac

SEQ ID NO: 11482 - DNA, 36 bp, synthetic construct
  misc_feature 1..36: note = Description of Artificial Sequence: Synthetic oligonucleotide
  source 1..36: mol_type = other DNA
attgtagccaaccggggtgagagagggagctacaac

SEQ ID NO: 11483 - DNA, 36 bp, synthetic construct
  misc_feature 1..36: note = Description of Artificial Sequence: Synthetic oligonucleotide
  source 1..36: mol_type = other DNA
attgtagccagcctcaccggggggtgaagtcaaaac

SEQ ID NO: 11484 - DNA, 33 bp, synthetic construct
  misc_feature 1..33: note = Description of Artificial Sequence: Synthetic oligonucleotide
  source 1..33: mol_type = other DNA
attgtagccgatgggaaactggggtccagccgc

SEQ ID NO: 11485 - DNA, 36 bp, synthetic construct
  misc_feature 1..36: note = Description of Artificial Sequence: Synthetic oligonucleotide
  source 1..36: mol_type = other DNA
attgtagccgcttagagatcgagagcaagccgcaac

SEQ ID NO: 11486 - DNA, 36 bp, synthetic construct
  misc_feature 1..36: note = Description of Artificial Sequence: Synthetic oligonucleotide
  source 1..36: mol_type = other DNA
attgtagccttccggggtgagagaggagctacaacg

SEQ ID NO: 11487 - DNA, 36 bp, synthetic construct
  misc_feature 1..36: note = Description of Artificial Sequence: Synthetic oligonucleotide
  source 1..36: mol_type = other DNA
attgtagccttccggggtgagagagggagctacaac

SEQ ID NO: 11488 - DNA, 37 bp, synthetic construct
  misc_feature 1..37: note = Description of Artificial Sequence: Synthetic oligonucleotide
  source 1..37: mol_type = other DNA
attgtagcggttcaaaatccgaggtccagccgcaacc

SEQ ID NO: 11489 - DNA, 36 bp, synthetic construct
  misc_feature 1..36: note = Description of Artificial Sequence: Synthetic oligonucleotide
  source 1..36: mol_type = other DNA
attgtagctaaccggggtgagaaagggagctacaac

SEQ ID NO: 11490 - DNA, 36 bp, synthetic construct
  misc_feature 1..36: note = Description of Artificial Sequence: Synthetic oligonucleotide
  source 1..36: mol_type = other DNA
attgtagctaaccggggtgagagagggagctacaac

SEQ ID NO: 11491 - DNA, 35 bp, synthetic construct
  misc_feature 1..35: note = Description of Artificial Sequence: Synthetic oligonucleotide
  source 1..35: mol_type = other DNA
attgtagctatccggggtgagagagggagctacaa

SEQ ID NO: 11492 - DNA, 36 bp, synthetic construct
  misc_feature 1..36: note = Description of Artificial Sequence: Synthetic oligonucleotide
  source 1..36: mol_type = other DNA
attgtagctatccggggtgagagagggagctacaac

SEQ ID NO: 11493 - DNA, 36 bp, synthetic construct
  misc_feature 1..36: note = Description of Artificial Sequence: Synthetic oligonucleotide
  source 1..36: mol_type = other DNA
attgtagctattcaaaaatcttggtcaacccgcaac

SEQ ID NO: 11494 - DNA, 36 bp, synthetic construct
  misc_feature 1..36: note = Description of Artificial Sequence: Synthetic oligonucleotide
  source 1..36: mol_type = other DNA
attgtagctgacctctccggggggtgaagtcaaaac

SEQ ID NO: 11495 - DNA, 36 bp, synthetic construct
  misc_feature 1..36: note = Description of Artificial Sequence: Synthetic oligonucleotide
  source 1..36: mol_type = other DNA
attgtagctgattagaaaatgcggtcaatccgcaac

SEQ ID NO: 11496 - DNA, 36 bp, synthetic construct
  misc_feature 1..36: note = Description of Artificial Sequence: Synthetic oligonucleotide
  source 1..36: mol_type = other DNA
attgtagctgttcaaaattcgcggtccagccgcaac

SEQ ID NO: 11497 - DNA, 36 bp, synthetic construct
  misc_feature 1..36: note = Description of Artificial Sequence: Synthetic oligonucleotide
  source 1..36: mol_type = other DNA
attgtagcttaccgatgtcagagagggaactacaac

SEQ ID NO: 11498 - DNA, 36 bp, synthetic construct
  misc_feature 1..36: note = Description of Artificial Sequence: Synthetic oligonucleotide
  source 1..36: mol_type = other DNA
attgtagctttccggggtgagagagggagctacaac

SEQ ID NO: 11499 - DNA, 36 bp, synthetic construct
  misc_feature 1..36: note = Description of Artificial Sequence: Synthetic oligonucleotide
  source 1..36: mol_type = other DNA
attgtaggcatccggggtgagagagggagctacaac

SEQ ID NO: 11500 - DNA, 36 bp, synthetic construct
  misc_feature 1..36: note = Description of Artificial Sequence: Synthetic oligonucleotide
  source 1..36: mol_type = other DNA
attgtaggttacgggcagactcggttcagatacaat

SEQ ID NO: 11501 - DNA, 36 bp, synthetic construct
  misc_feature 1..36: note = Description of Artificial Sequence: Synthetic oligonucleotide
  source 1..36: mol_type = other DNA
attgtagtcatccgaggtgagagagggaactacaac

SEQ ID NO: 11502 - DNA, 36 bp, synthetic construct
  misc_feature 1..36: note = Description of Artificial Sequence: Synthetic oligonucleotide
  source 1..36: mol_type = other DNA
attgtagtcatccggggtgagagagggaactacaac

SEQ ID NO: 11503 - DNA, 37 bp, synthetic construct
  misc_feature 1..37: note = Description of Artificial Sequence: Synthetic oligonucleotide
  source 1..37: mol_type = other DNA
attgtagtgcatccggggtgagagagggagctacaac

SEQ ID NO: 11504 - DNA, 36 bp, synthetic construct
  misc_feature 1..36: note = Description of Artificial Sequence: Synthetic oligonucleotide
  source 1..36: mol_type = other DNA
attgtagttatccggggtgagagagggaactacaac

SEQ ID NO: 11505 - DNA, 37 bp, synthetic construct
  misc_feature 1..37: note = Description of Artificial Sequence: Synthetic oligonucleotide
  source 1..37: mol_type = other DNA
attgtagttcatccggggtgagagagggagctacaac

SEQ ID NO: 11506 - DNA, 36 bp, synthetic construct
  misc_feature 1..36: note = Description of Artificial Sequence: Synthetic oligonucleotide
  source 1..36: mol_type = other DNA
attgtagttccctaatttttcttggtatggtataat

SEQ ID NO: 11507 - DNA, 36 bp, synthetic construct
  misc_feature 1..36: note = Description of Artificial Sequence: Synthetic oligonucleotide
  source 1..36: mol_type = other DNA
attgtagttccctaatttttcttggtatgttataat

SEQ ID NO: 11508 - DNA, 37 bp, synthetic construct
  misc_feature 1..37: note = Description of Artificial Sequence: Synthetic oligonucleotide
  source 1..37: mol_type = other DNA
attgtagttcgtccggggtgagagagggagctacaac

SEQ ID NO: 11509 - DNA, 37 bp, synthetic construct
  misc_feature 1..37: note = Description of Artificial Sequence: Synthetic oligonucleotide
  source 1..37: mol_type = other DNA
attgtagtttatccggggtgagagagggagctacaac

SEQ ID NO: 11510 - DNA, 36 bp, synthetic construct
  misc_feature 1..36: note = Description of Artificial Sequence: Synthetic oligonucleotide
  source 1..36: mol_type = other DNA
attgtatcacacacgagtttgtaggggtattaaaac

SEQ ID NO: 11511 - DNA, 36 bp, synthetic construct
  misc_feature 1..36: note = Description of Artificial Sequence: Synthetic oligonucleotide
  source 1..36: mol_type = other DNA
attgtatcacacgcaagtttgtaggggtattaaaac

SEQ ID NO: 11512 - DNA, 36 bp, synthetic construct
  misc_feature 1..36: note = Description of Artificial Sequence: Synthetic oligonucleotide
  source 1..36: mol_type = other DNA
attgtatcacataggggtttgtaggggtattaaaac

SEQ ID NO: 11513 - DNA, 36 bp, synthetic construct
  misc_feature 1..36: note = Description of Artificial Sequence: Synthetic oligonucleotide
  source 1..36: mol_type = other DNA
attgtatcacatagttgtttgtaggggtattaaaac

SEQ ID NO: 11514 - DNA, 36 bp, synthetic construct
  misc_feature 1..36: note = Description of Artificial Sequence: Synthetic oligonucleotide
  source 1..36: mol_type = other DNA
attgtatcacgtactagtttgtaggggtattaaaac

SEQ ID NO: 11515 - DNA, 36 bp, synthetic construct
  misc_feature 1..36: note = Description of Artificial Sequence: Synthetic oligonucleotide
  source 1..36: mol_type = other DNA
attgtatcagagcggctattcccggccagccaaagc

SEQ ID NO: 11516 - DNA, 36 bp, synthetic construct
  misc_feature 1..36: note = Description of Artificial Sequence: Synthetic oligonucleotide
  source 1..36: mol_type = other DNA
attgtatcagataggagcctgtccactctccccaac

SEQ ID NO: 11517 - DNA, 36 bp, synthetic construct
  misc_feature 1..36: note = Description of Artificial Sequence: Synthetic oligonucleotide
  source 1..36: mol_type = other DNA
attgtatcagatagggaattgagcttttacaacaac

SEQ ID NO: 11518 - DNA, 36 bp, synthetic construct
  misc_feature 1..36: note = Description of Artificial Sequence: Synthetic oligonucleotide
  source 1..36: mol_type = other DNA
attgtatcagatatgaaaatgagagcaagttataac

SEQ ID NO: 11519 - DNA, 36 bp, synthetic construct
  misc_feature 1..36: note = Description of Artificial Sequence: Synthetic oligonucleotide
  source 1..36: mol_type = other DNA
attgtatcaggctttccgatggtggggtatcggaac

SEQ ID NO: 11520 - DNA, 36 bp, synthetic construct
  misc_feature 1..36: note = Description of Artificial Sequence: Synthetic oligonucleotide
  source 1..36: mol_type = other DNA
attgtatcataccaaaggataatagggaactaaaac

SEQ ID NO: 11521 - DNA, 36 bp, synthetic construct
  misc_feature 1..36: note = Description of Artificial Sequence: Synthetic oligonucleotide
  source 1..36: mol_type = other DNA
attgtatcatatggggatttgagagtagcttaaaac

SEQ ID NO: 11522 - DNA, 36 bp, synthetic construct
  misc_feature 1..36: note = Description of Artificial Sequence: Synthetic oligonucleotide
  source 1..36: mol_type = other DNA
attgtatccgataggtgtctgcccggtccccccaac

SEQ ID NO: 11523 - DNA, 36 bp, synthetic construct
  misc_feature 1..36: note = Description of Artificial Sequence: Synthetic oligonucleotide
  source 1..36: mol_type = other DNA
attgtatcgcattgtcgtttataggggtattaaaac

SEQ ID NO: 11524 - DNA, 36 bp, synthetic construct
  misc_feature 1..36: note = Description of Artificial Sequence: Synthetic oligonucleotide
  source 1..36: mol_type = other DNA
attgtatcgctcgcgcctccggggggaaggcaaaac

SEQ ID NO: 11525 - DNA, 36 bp, synthetic construct
  misc_feature 1..36: note = Description of Artificial Sequence: Synthetic oligonucleotide
  source 1..36: mol_type = other DNA
attgtatcgtattttgctttagagtaggggtctaat

SEQ ID NO: 11526 - DNA, 36 bp, synthetic construct
  misc_feature 1..36: note = Description of Artificial Sequence: Synthetic oligonucleotide
  source 1..36: mol_type = other DNA
attgtatctaacggatgcccaaagccaagtcacaac

SEQ ID NO: 11527 - DNA, 36 bp, synthetic construct
  misc_feature 1..36: note = Description of Artificial Sequence: Synthetic oligonucleotide
  source 1..36: mol_type = other DNA
attgtatctaacggatgcctaaagccaagtcacaac

SEQ ID NO: 11528 - DNA, 36 bp, synthetic construct
  misc_feature 1..36: note = Description of Artificial Sequence: Synthetic oligonucleotide
  source 1..36: mol_type = other DNA
attgtatctgacggatgcccgaagccaagtcacaac

SEQ ID NO: 11529 - DNA, 36 bp, synthetic construct
  misc_feature 1..36: note = Description of Artificial Sequence: Synthetic oligonucleotide
  source 1..36: mol_type = other DNA
attgtatctgatcggagcctggccgctatccccagc

SEQ ID NO: 11530 - DNA, 36 bp, synthetic construct
  misc_feature 1..36: note = Description of Artificial Sequence: Synthetic oligonucleotide
  source 1..36: mol_type = other DNA
attgtatctgatcggagtctgtccgcaatccccaac

SEQ ID NO: 11531 - DNA, 36 bp, synthetic construct
  misc_feature 1..36: note = Description of Artificial Sequence: Synthetic oligonucleotide
  source 1..36: mol_type = other DNA
attgtatcttatctcttttctacatcaaaccacaac

SEQ ID NO: 11532 - DNA, 36 bp, synthetic construct
  misc_feature 1..36: note = Description of Artificial Sequence: Synthetic oligonucleotide
  source 1..36: mol_type = other DNA
attgtattcatgcggaaatttaagtcaaatcacagc

SEQ ID NO: 11533 - DNA, 36 bp, synthetic construct
  misc_feature 1..36: note = Description of Artificial Sequence: Synthetic oligonucleotide
  source 1..36: mol_type = other DNA
attgtatttgggattgcttgaactgtcaactataac

SEQ ID NO: 11534 - DNA, 36 bp, synthetic construct
  misc_feature 1..36: note = Description of Artificial Sequence: Synthetic oligonucleotide
  source 1..36: mol_type = other DNA
attgtcttatacctttcttctacatcaaaccacaac

SEQ ID NO: 11535 - DNA, 36 bp, synthetic construct
  misc_feature 1..36: note = Description of Artificial Sequence: Synthetic oligonucleotide
  source 1..36: mol_type = other DNA
attgtcttatatctctcttctacatcaaaccacaac

SEQ ID NO: 11536 - DNA, 36 bp, synthetic construct
  misc_feature 1..36: note = Description of Artificial Sequence: Synthetic oligonucleotide
  source 1..36: mol_type = other DNA
attgtcttatatctcttttctacatcaaaccacaac

SEQ ID NO: 11537 - DNA, 36 bp, synthetic construct
  misc_feature 1..36: note = Description of Artificial Sequence: Synthetic oligonucleotide
  source 1..36: mol_type = other DNA
attgtcttttatctcgtttctacatcaaaccacaac

SEQ ID NO: 11538 - DNA, 36 bp, synthetic construct
  misc_feature 1..36: note = Description of Artificial Sequence: Synthetic oligonucleotide
  source 1..36: mol_type = other DNA
attgtgacaaaaccgattttgtagtgacgtcaaaac

SEQ ID NO: 11539 - DNA, 47 bp, synthetic construct
  misc_feature 1..47: note = Description of Artificial Sequence: Synthetic oligonucleotide
  source 1..47: mol_type = other DNA
attgtgatttgctctcatttttgtaactttgtaccatacatcacagc

SEQ ID NO: 11540 - DNA, 47 bp, synthetic construct
  misc_feature 1..47: note = Description of Artificial Sequence: Synthetic oligonucleotide
  source 1..47: mol_type = other DNA
attgtgatttgcttgaaaaatcgtacctttgtggtatcaacaacaac

SEQ ID NO: 11541 - DNA, 47 bp, synthetic construct
  misc_feature 1..47: note = Description of Artificial Sequence: Synthetic oligonucleotide
  source 1..47: mol_type = other DNA
attgtgatttgcttgaaaatatctacctttgtggtatcaacaacaac

SEQ ID NO: 11542 - DNA, 47 bp, synthetic construct
  misc_feature 1..47: note = Description of Artificial Sequence: Synthetic oligonucleotide
  source 1..47: mol_type = other DNA
attgtgatttgctttaaaattagtatctttgcattagcaaaaccagc

SEQ ID NO: 11543 - DNA, 36 bp, synthetic construct
  misc_feature 1..36: note = Description of Artificial Sequence: Synthetic oligonucleotide
  source 1..36: mol_type = other DNA
attgtgcccaccccgtttttggaatcaaggcaaagc

SEQ ID NO: 11544 - DNA, 47 bp, synthetic construct
  misc_feature 1..47: note = Description of Artificial Sequence: Synthetic oligonucleotide
  source 1..47: mol_type = other DNA
attgtgtttgacagtgcaaaaataataaaaaagaagcaaatcacaac

SEQ ID NO: 11545 - DNA, 47 bp, synthetic construct
  misc_feature 1..47: note = Description of Artificial Sequence: Synthetic oligonucleotide
  source 1..47: mol_type = other DNA
attgtttcagaccttatgttttactttttttgaatgacatacacaac

SEQ ID NO: 11546 - DNA, 41 bp, synthetic construct
  misc_feature 1..41: note = Description of Artificial Sequence: Synthetic oligonucleotide
  source 1..41: mol_type = other DNA
attgtttctgccactgcaaaggtactaattttttagcaaat

SEQ ID NO: 11547 - DNA, 47 bp, synthetic construct
  misc_feature 1..47: note = Description of Artificial Sequence: Synthetic oligonucleotide
  source 1..47: mol_type = other DNA
attgttttagaccatatgttttactttttttgaatgacatacacaac

SEQ ID NO: 11548 - DNA, 46 bp, synthetic construct
  misc_feature 1..46: note = Description of Artificial Sequence: Synthetic oligonucleotide
  source 1..46: mol_type = other DNA
attgttttagtccgtattgtttacttttttgaatgacatacacaac

SEQ ID NO: 11549 - DNA, 46 bp, synthetic construct
  misc_feature 1..46: note = Description of Artificial Sequence: Synthetic oligonucleotide
  source 1..46: mol_type = other DNA
attgttttagtccgtattgtttacttttttgagtgacatacacaac

SEQ ID NO: 11550 - DNA, 46 bp, synthetic construct
  misc_feature 1..46: note = Description of Artificial Sequence: Synthetic oligonucleotide
  source 1..46: mol_type = other DNA
attgttttagtccgtatttgttacttttttgaatgacatacacaac

SEQ ID NO: 11551 - DNA, 41 bp, synthetic construct
  misc_feature 1..41: note = Description of Artificial Sequence: Synthetic oligonucleotide
  source 1..41: mol_type = other DNA
attgttttcaatgcttcaaagatactaaaatggaagcaaat

SEQ ID NO: 11552 - DNA, 36 bp, synthetic construct
  misc_feature 1..36: note = Description of Artificial Sequence: Synthetic oligonucleotide
  source 1..36: mol_type = other DNA
atttaattttagccgattttgtaaggaacgtatagc

SEQ ID NO: 11553 - DNA, 37 bp, synthetic construct
  misc_feature 1..37: note = Description of Artificial Sequence: Synthetic oligonucleotide
  source 1..37: mol_type = other DNA
atttcagttgcaggtttattgggataggctttgcaac

SEQ ID NO: 11554 - DNA, 36 bp, synthetic construct
  misc_feature 1..36: note = Description of Artificial Sequence: Synthetic oligonucleotide
  source 1..36: mol_type = other DNA
atttctctataccgaaaattgagagagtaccaaaac

SEQ ID NO: 11555 - DNA, 36 bp, synthetic construct
  misc_feature 1..36: note = Description of Artificial Sequence: Synthetic oligonucleotide
  source 1..36: mol_type = other DNA
atttgactatccttatgaattacattgctctcaaac

SEQ ID NO: 11556 - DNA, 36 bp, synthetic construct
  misc_feature 1..36: note = Description of Artificial Sequence: Synthetic oligonucleotide
  source 1..36: mol_type = other DNA
attttaacatgtcgtgacttggaggggtattaaaac

SEQ ID NO: 11557 - DNA, 36 bp, synthetic construct
  misc_feature 1..36: note = Description of Artificial Sequence: Synthetic oligonucleotide
  source 1..36: mol_type = other DNA
attttaactcacgtgcctctggggggaaggcaaaac

SEQ ID NO: 11558 - DNA, 36 bp, synthetic construct
  misc_feature 1..36: note = Description of Artificial Sequence: Synthetic oligonucleotide
  source 1..36: mol_type = other DNA
attttaagctacctacatcctacacctcgttataat

SEQ ID NO: 11559 - DNA, 36 bp, synthetic construct
  misc_feature 1..36: note = Description of Artificial Sequence: Synthetic oligonucleotide
  source 1..36: mol_type = other DNA
attttaataacatttaagatgacatagaactaaaac

SEQ ID NO: 11560 - DNA, 36 bp, synthetic construct
  misc_feature 1..36: note = Description of Artificial Sequence: Synthetic oligonucleotide
  source 1..36: mol_type = other DNA
attttacagcacccgcctccggggggaaggcaaaac

SEQ ID NO: 11561 - DNA, 36 bp, synthetic construct
  misc_feature 1..36: note = Description of Artificial Sequence: Synthetic oligonucleotide
  source 1..36: mol_type = other DNA
attttacatcactcgaaaatggaatcaaggcaaagc

SEQ ID NO: 11562 - DNA, 36 bp, synthetic construct
  misc_feature 1..36: note = Description of Artificial Sequence: Synthetic oligonucleotide
  source 1..36: mol_type = other DNA
attttaccagattgggatatgagctctggccggaac

SEQ ID NO: 11563 - DNA, 36 bp, synthetic construct
  misc_feature 1..36: note = Description of Artificial Sequence: Synthetic oligonucleotide
  source 1..36: mol_type = other DNA
attttacccgacgcgcttccggggggaaggcaaaac

SEQ ID NO: 11564 - DNA, 36 bp, synthetic construct
  misc_feature 1..36: note = Description of Artificial Sequence: Synthetic oligonucleotide
  source 1..36: mol_type = other DNA
attttacccgacgctcttccggggggaaggcaaaac

SEQ ID NO: 11565 - DNA, 36 bp, synthetic construct
  misc_feature 1..36: note = Description of Artificial Sequence: Synthetic oligonucleotide
  source 1..36: mol_type = other DNA
attttacccgatgcacttccggggggaaggcaaaac

SEQ ID NO: 11566 - DNA, 37 bp, synthetic construct
  misc_feature 1..37: note = Description of Artificial Sequence: Synthetic oligonucleotide
  source 1..37: mol_type = other DNA
attttacccgatgcacttccggggggaaggcaaaaca

SEQ ID NO: 11567 - DNA, 36 bp, synthetic construct
  misc_feature 1..36: note = Description of Artificial Sequence: Synthetic oligonucleotide
  source 1..36: mol_type = other DNA
attttaccgcccccgtttttggaatcaaggcaaagc

SEQ ID NO: 11568 - DNA, 36 bp, synthetic construct
  misc_feature 1..36: note = Description of Artificial Sequence: Synthetic oligonucleotide
  source 1..36: mol_type = other DNA
attttaccgggcattccgatggtggggtatcggaac

SEQ ID NO: 11569 - DNA, 36 bp, synthetic construct
  misc_feature 1..36: note = Description of Artificial Sequence: Synthetic oligonucleotide
  source 1..36: mol_type = other DNA
attttactacctgggagatcgtacggtaatcaagac

SEQ ID NO: 11570 - DNA, 37 bp, synthetic construct
  misc_feature 1..37: note = Description of Artificial Sequence: Synthetic oligonucleotide
  source 1..37: mol_type = other DNA
attttactttaaaagactttggcttaaaaccgcaact

SEQ ID NO: 11571 - DNA, 36 bp, synthetic construct
  misc_feature 1..36: note = Description of Artificial Sequence: Synthetic oligonucleotide
  source 1..36: mol_type = other DNA
attttagaaaatcatgttttggtgtcaagctgtaac

SEQ ID NO: 11572 - DNA, 36 bp, synthetic construct
  misc_feature 1..36: note = Description of Artificial Sequence: Synthetic oligonucleotide
  source 1..36: mol_type = other DNA
attttagaaccattcgaaacaacacagctctaaaac

SEQ ID NO: 11573 - DNA, 36 bp, synthetic construct
  misc_feature 1..36: note = Description of Artificial Sequence: Synthetic oligonucleotide
  source 1..36: mol_type = other DNA
attttagatcactgggaaatgcgctctatccggaac

SEQ ID NO: 11574 - DNA, 36 bp, synthetic construct
  misc_feature 1..36: note = Description of Artificial Sequence: Synthetic oligonucleotide
  source 1..36: mol_type = other DNA
attttagatcactgggatatgtggtctagccggaac

SEQ ID NO: 11575 - DNA, 36 bp, synthetic construct
  misc_feature 1..36: note = Description of Artificial Sequence: Synthetic oligonucleotide
  source 1..36: mol_type = other DNA
attttagatcactgggatttgtgttctaaccggaac

SEQ ID NO: 11576 - DNA, 36 bp, synthetic construct
  misc_feature 1..36: note = Description of Artificial Sequence: Synthetic oligonucleotide
  source 1..36: mol_type = other DNA
attttagcacaaaggggtttgaaggggtcttaaaac

SEQ ID NO: 11577 - DNA, 36 bp, synthetic construct
  misc_feature 1..36: note = Description of Artificial Sequence: Synthetic oligonucleotide
  source 1..36: mol_type = other DNA
attttagcacaaaggggtttgcaggggtcttaaaac

SEQ ID NO: 11578 - DNA, 36 bp, synthetic construct
  misc_feature 1..36: note = Description of Artificial Sequence: Synthetic oligonucleotide
  source 1..36: mol_type = other DNA
attttagcacattagaaaatggttgtcagtcaaaac

SEQ ID NO: 11579 - DNA, 33 bp, synthetic construct
  misc_feature 1..33: note = Description of Artificial Sequence: Synthetic oligonucleotide
  source 1..33: mol_type = other DNA
attttagcagataagagaatcgttgcaactcac

SEQ ID NO: 11580 - DNA, 35 bp, synthetic construct
  misc_feature 1..35: note = Description of Artificial Sequence: Synthetic oligonucleotide
  source 1..35: mol_type = other DNA
attttagcataaagagagagggacaaccgtggaat

SEQ ID NO: 11581 - DNA, 37 bp, synthetic construct
  misc_feature 1..37: note = Description of Artificial Sequence: Synthetic oligonucleotide
  source 1..37: mol_type = other DNA
attttagccgatgggagatcgggggccaaccgcaact

SEQ ID NO: 11582 - DNA, 36 bp, synthetic construct
  misc_feature 1..36: note = Description of Artificial Sequence: Synthetic oligonucleotide
  source 1..36: mol_type = other DNA
attttagctgattagtgaccggcgtcaaaccgcaac

SEQ ID NO: 11583 - DNA, 36 bp, synthetic construct
  misc_feature 1..36: note = Description of Artificial Sequence: Synthetic oligonucleotide
  source 1..36: mol_type = other DNA
attttagtaactggaagatttgagttagtgtaaaac

SEQ ID NO: 11584 - DNA, 36 bp, synthetic construct
  misc_feature 1..36: note = Description of Artificial Sequence: Synthetic oligonucleotide
  source 1..36: mol_type = other DNA
attttagtacctaaacaaattacgtgactgtaaaac

SEQ ID NO: 11585 - DNA, 36 bp, synthetic construct
  misc_feature 1..36: note = Description of Artificial Sequence: Synthetic oligonucleotide
  source 1..36: mol_type = other DNA
attttagtacctgaaagaattaagttatcgtaaaac

SEQ ID NO: 11586 - DNA, 36 bp, synthetic construct
  misc_feature 1..36: note = Description of Artificial Sequence: Synthetic oligonucleotide
  source 1..36: mol_type = other DNA
attttagtacctgaacaaattacgtgactgtaaaac

SEQ ID NO: 11587 - DNA, 36 bp, synthetic construct
  misc_feature 1..36: note = Description of Artificial Sequence: Synthetic oligonucleotide
  source 1..36: mol_type = other DNA
attttagtacctggaagaattgagttatcgtaaaac

SEQ ID NO: 11588 - DNA, 36 bp, synthetic construct
  misc_feature 1..36: note = Description of Artificial Sequence: Synthetic oligonucleotide
  source 1..36: mol_type = other DNA
attttagtcccctataaactcacactactctcaaac

SEQ ID NO: 11589 - DNA, 47 bp, synthetic construct
  misc_feature 1..47: note = Description of Artificial Sequence: Synthetic oligonucleotide
  source 1..47: mol_type = other DNA
attttatataaagataaatatttcaaagcacgaaaccaaatcaaaac

SEQ ID NO: 11590 - DNA, 36 bp, synthetic construct
  misc_feature 1..36: note = Description of Artificial Sequence: Synthetic oligonucleotide
  source 1..36: mol_type = other DNA
attttatatcgttaggaaacgagcttaagccagaac

SEQ ID NO: 11591 - DNA, 36 bp, synthetic construct
  misc_feature 1..36: note = Description of Artificial Sequence: Synthetic oligonucleotide
  source 1..36: mol_type = other DNA
attttatcaagcattccgatggtggggtatcggaac

SEQ ID NO: 11592 - DNA, 36 bp, synthetic construct
  misc_feature 1..36: note = Description of Artificial Sequence: Synthetic oligonucleotide
  source 1..36: mol_type = other DNA
attttatcacaaaggggtttgtaggggtcttaaaac

SEQ ID NO: 11593 - DNA, 36 bp, synthetic construct
  misc_feature 1..36: note = Description of Artificial Sequence: Synthetic oligonucleotide
  source 1..36: mol_type = other DNA
attttatcaggcattccgatggtggggtatcggaac

SEQ ID NO: 11594 - DNA, 36 bp, synthetic construct
  misc_feature 1..36: note = Description of Artificial Sequence: Synthetic oligonucleotide
  source 1..36: mol_type = other DNA
attttatcatagcgaaaaattacagagtactaaaac

SEQ ID NO: 11595 - DNA, 29 bp, synthetic construct
  misc_feature 1..29: note = Description of Artificial Sequence: Synthetic oligonucleotide
  source 1..29: mol_type = other DNA
attttatcttaacttagttcttaaacaac

SEQ ID NO: 11596 - DNA, 36 bp, synthetic construct
  misc_feature 1..36: note = Description of Artificial Sequence: Synthetic oligonucleotide
  source 1..36: mol_type = other DNA
attttgccaaaagaaaaaaaaggaatcaaggcaaag

SEQ ID NO: 11597 - DNA, 36 bp, synthetic construct
  misc_feature 1..36: note = Description of Artificial Sequence: Synthetic oligonucleotide
  source 1..36: mol_type = other DNA
attttgcccgccgcgaatctggaatcaaggcaaagc

SEQ ID NO: 11598 - DNA, 36 bp, synthetic construct
  misc_feature 1..36: note = Description of Artificial Sequence: Synthetic oligonucleotide
  source 1..36: mol_type = other DNA
attttgcccggcctgaatttggaatcaaggcaaagc

SEQ ID NO: 11599 - DNA, 36 bp, synthetic construct
  misc_feature 1..36: note = Description of Artificial Sequence: Synthetic oligonucleotide
  source 1..36: mol_type = other DNA
attttgccgcacccgaatttggaatcaaggcaaagc

SEQ ID NO: 11600 - DNA, 36 bp, synthetic construct
  misc_feature 1..36: note = Description of Artificial Sequence: Synthetic oligonucleotide
  source 1..36: mol_type = other DNA
attttgccgcacccgtttttggaatcaaggcaaagc

SEQ ID NO: 11601 - DNA, 36 bp, synthetic construct
  misc_feature 1..36: note = Description of Artificial Sequence: Synthetic oligonucleotide
  source 1..36: mol_type = other DNA
attttgccgcgcccgtttttggaatcaaggcaaagc

SEQ ID NO: 11602 - DNA, 36 bp, synthetic construct
  misc_feature 1..36: note = Description of Artificial Sequence: Synthetic oligonucleotide
  source 1..36: mol_type = other DNA
attttgcgccccccgtatttggaatcaaggcaaagc

SEQ ID NO: 11603 - DNA, 36 bp, synthetic construct
  misc_feature 1..36: note = Description of Artificial Sequence: Synthetic oligonucleotide
  source 1..36: mol_type = other DNA
attttggaaccattcagaacaacacagctctaaaac

SEQ ID NO: 11604 - DNA, 36 bp, synthetic construct
  misc_feature 1..36: note = Description of Artificial Sequence: Synthetic oligonucleotide
  source 1..36: mol_type = other DNA
attttggaagcattcaaatcagcatagctctaaaac

SEQ ID NO: 11605 - DNA, 36 bp, synthetic construct
  misc_feature 1..36: note = Description of Artificial Sequence: Synthetic oligonucleotide
  source 1..36: mol_type = other DNA
atttttagaaagaacaatttgttgtaaagtcaaaac

SEQ ID NO: 11606 - DNA, 37 bp, synthetic construct
  misc_feature 1..37: note = Description of Artificial Sequence: Synthetic oligonucleotide
  source 1..37: mol_type = other DNA
caaacaaattatacgcaaagccgacttagtttgaaac

SEQ ID NO: 11607 - DNA, 33 bp, synthetic construct
  misc_feature 1..33: note = Description of Artificial Sequence: Synthetic oligonucleotide
  source 1..33: mol_type = other DNA
caaagatacaaaattttgaaagcgattcacaac

SEQ ID NO: 11608 - DNA, 36 bp, synthetic construct
  misc_feature 1..36: note = Description of Artificial Sequence: Synthetic oligonucleotide
  source 1..36: mol_type = other DNA
caagcttatcaagaagggtgaatgctaattcccagc

SEQ ID NO: 11609 - DNA, 37 bp, synthetic construct
  misc_feature 1..37: note = Description of Artificial Sequence: Synthetic oligonucleotide
  source 1..37: mol_type = other DNA
caaggttacctaattcagtttggtgccaagccccgac

SEQ ID NO: 11610 - DNA, 36 bp, synthetic construct
  misc_feature 1..36: note = Description of Artificial Sequence: Synthetic oligonucleotide
  source 1..36: mol_type = other DNA
caagtatatcaaggggataggtgactgaatcccagc

SEQ ID NO: 11611 - DNA, 36 bp, synthetic construct
  misc_feature 1..36: note = Description of Artificial Sequence: Synthetic oligonucleotide
  source 1..36: mol_type = other DNA
caagtatatcaggggatttagaagttgaaccccagc

SEQ ID NO: 11612 - DNA, 36 bp, synthetic construct
  misc_feature 1..36: note = Description of Artificial Sequence: Synthetic oligonucleotide
  source 1..36: mol_type = other DNA
caagtctatcaagagggatgaatgctaattcccagc

SEQ ID NO: 11613 - DNA, 36 bp, synthetic construct
  misc_feature 1..36: note = Description of Artificial Sequence: Synthetic oligonucleotide
  source 1..36: mol_type = other DNA
caagtctatcagggataaggagatttgattcccagc

SEQ ID NO: 11614 - DNA, 36 bp, synthetic construct
  misc_feature 1..36: note = Description of Artificial Sequence: Synthetic oligonucleotide
  source 1..36: mol_type = other DNA
caagtctatcgggaggaatgagaactgatttccagc

SEQ ID NO: 11615 - DNA, 36 bp, synthetic construct
  misc_feature 1..36: note = Description of Artificial Sequence: Synthetic oligonucleotide
  source 1..36: mol_type = other DNA
caagtttatcaagaagggtagaagctaattcccagt

SEQ ID NO: 11616 - DNA, 38 bp, synthetic construct
  misc_feature 1..38: note = Description of Artificial Sequence: Synthetic oligonucleotide
  source 1..38: mol_type = other DNA
caataacattatccagaaaaaacagtcaagtcaaaacc

SEQ ID NO: 11617 - DNA, 26 bp, synthetic construct
  misc_feature 1..26: note = Description of Artificial Sequence: Synthetic oligonucleotide
  source 1..26: mol_type = other DNA
cacaaaatttgaaagcaattcacaac

SEQ ID NO: 11618 - DNA, 30 bp, synthetic construct
  misc_feature 1..30: note = Description of Artificial Sequence: Synthetic oligonucleotide
  source 1..30: mol_type = other DNA
cactaattaaaaattacatatctcccaaac

SEQ ID NO: 11619 - DNA, 37 bp, synthetic construct
  misc_feature 1..37: note = Description of Artificial Sequence: Synthetic oligonucleotide
  source 1..37: mol_type = other DNA
cagcgtagcaaatcgagagacggccgcaatccgcagc

SEQ ID NO: 11620 - DNA, 35 bp, synthetic construct
  misc_feature 1..35: note = Description of Artificial Sequence: Synthetic oligonucleotide
  source 1..35: mol_type = other DNA
caggatatcaaaggggatggggggttggtgcccag

SEQ ID NO: 11621 - DNA, 30 bp, synthetic construct
  misc_feature 1..30: note = Description of Artificial Sequence: Synthetic oligonucleotide
  source 1..30: mol_type = other DNA
caggctccccggaatcgcggcgactgcggc

SEQ ID NO: 11622 - DNA, 36 bp, synthetic construct
  misc_feature 1..36: note = Description of Artificial Sequence: Synthetic oligonucleotide
  source 1..36: mol_type = other DNA
cagtatatcaaaggggagtggtgattgattcccagc

SEQ ID NO: 11623 - DNA, 36 bp, synthetic construct
  misc_feature 1..36: note = Description of Artificial Sequence: Synthetic oligonucleotide
  source 1..36: mol_type = other DNA
cagtatatcaaaggggatggatgattgattcccagc

SEQ ID NO: 11624 - DNA, 36 bp, synthetic construct
  misc_feature 1..36: note = Description of Artificial Sequence: Synthetic oligonucleotide
  source 1..36: mol_type = other DNA
cagtatatcaaaggggatggatgattgattctcagc

SEQ ID NO: 11625 - DNA, 36 bp, synthetic construct
  misc_feature 1..36: note = Description of Artificial Sequence: Synthetic oligonucleotide
  source 1..36: mol_type = other DNA
cagtatatcaaaggggattggtgattgattcccagc

SEQ ID NO: 11626 - DNA, 36 bp, synthetic construct
  misc_feature 1..36: note = Description of Artificial Sequence: Synthetic oligonucleotide
  source 1..36: mol_type = other DNA
cagtgtatcaaaggggattggtgattgattcccagc

SEQ ID NO: 11627 - DNA, 37 bp, synthetic construct
  misc_feature 1..37: note = Description of Artificial Sequence: Synthetic oligonucleotide
  source 1..37: mol_type = other DNA
cagtgtatctcagaagcggttcccggcaaaccatagc

SEQ ID NO: 11628 - DNA, 33 bp, synthetic construct
  misc_feature 1..33: note = Description of Artificial Sequence: Synthetic oligonucleotide
  source 1..33: mol_type = other DNA
cagttgctaagcgatggtgttgtaaagtgtcgt

SEQ ID NO: 11629 - DNA, 38 bp, synthetic construct
  misc_feature 1..38: note = Description of Artificial Sequence: Synthetic oligonucleotide
  source 1..38: mol_type = other DNA
cagttgtgatttgcgggtagaccttggtcggttatact

SEQ ID NO: 11630 - DNA, 39 bp, synthetic construct
  misc_feature 1..39: note = Description of Artificial Sequence: Synthetic oligonucleotide
  source 1..39: mol_type = other DNA
cagtttatcaagcattccgatggtggggtatcggaacat

SEQ ID NO: 11631 - DNA, 36 bp, synthetic construct
  misc_feature 1..36: note = Description of Artificial Sequence: Synthetic oligonucleotide
  source 1..36: mol_type = other DNA
cataccacatcgccccggagggggctagatcaaaac

SEQ ID NO: 11632 - DNA, 37 bp, synthetic construct
  misc_feature 1..37: note = Description of Artificial Sequence: Synthetic oligonucleotide
  source 1..37: mol_type = other DNA
cattgtagctatccggggtgagagagggagctacaac

SEQ ID NO: 11633 - DNA, 36 bp, synthetic construct
  misc_feature 1..36: note = Description of Artificial Sequence: Synthetic oligonucleotide
  source 1..36: mol_type = other DNA
catttatactaatctaagtttacagtactctaaaac

SEQ ID NO: 11634 - DNA, 40 bp, synthetic construct
  misc_feature 1..40: note = Description of Artificial Sequence: Synthetic oligonucleotide
  source 1..40: mol_type = other DNA
cattttgctctcctcggatttggaatcaaggcaaagcacc

SEQ ID NO: 11635 - DNA, 37 bp, synthetic construct
  misc_feature 1..37: note = Description of Artificial Sequence: Synthetic oligonucleotide
  source 1..37: mol_type = other DNA
ccatcagtttaagttcctgtaccctagcaactgaaac

SEQ ID NO: 11636 - DNA, 23 bp, synthetic construct
  misc_feature 1..23: note = Description of Artificial Sequence: Synthetic oligonucleotide
  source 1..23: mol_type = other DNA
ccatcggaatgcctgataaactc

SEQ ID NO: 11637 - DNA, 29 bp, synthetic construct
  misc_feature 1..29: note = Description of Artificial Sequence: Synthetic oligonucleotide
  source 1..29: mol_type = other DNA
cccccccccgggttggattcaaggcaaag

SEQ ID NO: 11638 - DNA, 37 bp, synthetic construct
  misc_feature 1..37: note = Description of Artificial Sequence: Synthetic oligonucleotide
  source 1..37: mol_type = other DNA
cccgttgctccctctctcaccccggaaagctacaatc

SEQ ID NO: 11639 - DNA, 27 bp, synthetic construct
  misc_feature 1..27: note = Description of Artificial Sequence: Synthetic oligonucleotide
  source 1..27: mol_type = other DNA
ccctatggatttacactactctcaaac

SEQ ID NO: 11640 - DNA, 25 bp, synthetic construct
  misc_feature 1..25: note = Description of Artificial Sequence: Synthetic oligonucleotide
  source 1..25: mol_type = other DNA
ccgatatccgacagaggactaaaac

SEQ ID NO: 11641 - DNA, 25 bp, synthetic construct
  misc_feature 1..25: note = Description of Artificial Sequence: Synthetic oligonucleotide
  source 1..25: mol_type = other DNA
ccgggaaccgccgtttttgtacact

SEQ ID NO: 11642 - DNA, 24 bp, synthetic construct
  misc_feature 1..24: note = Description of Artificial Sequence: Synthetic oligonucleotide
  source 1..24: mol_type = other DNA
ccgtgcctgagtgcaagccacaac

SEQ ID NO: 11643 - DNA, 35 bp, synthetic construct
  misc_feature 1..35: note = Description of Artificial Sequence: Synthetic oligonucleotide
  source 1..35: mol_type = other DNA
ccgtggtttccctaccgatttgcccatggtaggac

SEQ ID NO: 11644 - DNA, 25 bp, synthetic construct
  misc_feature 1..25: note = Description of Artificial Sequence: Synthetic oligonucleotide
  source 1..25: mol_type = other DNA
cctaccgatttccccctggtaggct

SEQ ID NO: 11645 - DNA, 28 bp, synthetic construct
  misc_feature 1..28: note = Description of Artificial Sequence: Synthetic oligonucleotide
  source 1..28: mol_type = other DNA
cctatacgaattaacaaggctctcaaac

SEQ ID NO: 11646 - DNA, 36 bp, synthetic construct
  misc_feature 1..36: note = Description of Artificial Sequence: Synthetic oligonucleotide
  source 1..36: mol_type = other DNA
cctatcaaacttacgaaaattttgccaatctacaac

SEQ ID NO: 11647 - DNA, 36 bp, synthetic construct
  misc_feature 1..36: note = Description of Artificial Sequence: Synthetic oligonucleotide
  source 1..36: mol_type = other DNA
cctctcaaagaacgcttgtcggtatcagatcacagc

SEQ ID NO: 11648 - DNA, 46 bp, synthetic construct
  misc_feature 1..46: note = Description of Artificial Sequence: Synthetic oligonucleotide
  source 1..46: mol_type = other DNA
cctgcgaatgctaagtaaaaatacaaatctgaaagcaattcacaac

SEQ ID NO: 11649 - DNA, 47 bp, synthetic construct
  misc_feature 1..47: note = Description of Artificial Sequence: Synthetic oligonucleotide
  source 1..47: mol_type = other DNA
cctgcgattgactacagtaaaaatacaatttgaaatccaatcacaac

SEQ ID NO: 11650 - DNA, 47 bp, synthetic construct
  misc_feature 1..47: note = Description of Artificial Sequence: Synthetic oligonucleotide
  source 1..47: mol_type = other DNA
cctgtgaatagtcaactaaagatacaattctgaaagcaattcacaac

SEQ ID NO: 11651 - DNA, 46 bp, synthetic construct
  misc_feature 1..46: note = Description of Artificial Sequence: Synthetic oligonucleotide
  source 1..46: mol_type = other DNA
cctgtgaatcatacctaaaattaggattctgaaagcaattcacaac

SEQ ID NO: 11652 - DNA, 37 bp, synthetic construct
  misc_feature 1..37: note = Description of Artificial Sequence: Synthetic oligonucleotide
  source 1..37: mol_type = other DNA
cctgtgaatcatcactaaaaatacaattttgaaagca

SEQ ID NO: 11653 - DNA, 46 bp, synthetic construct
  misc_feature 1..46: note = Description of Artificial Sequence: Synthetic oligonucleotide
  source 1..46: mol_type = other DNA
cctgtgaatcatcactaaaaatacaattttgaaagcaattcacaac

SEQ ID NO: 11654 - DNA, 46 bp, synthetic construct
  misc_feature 1..46: note = Description of Artificial Sequence: Synthetic oligonucleotide
  source 1..46: mol_type = other DNA
cctgtgaatcatcactaaaattagtattctgaaagcaattcacaac

SEQ ID NO: 11655 - DNA, 46 bp, synthetic construct
  misc_feature 1..46: note = Description of Artificial Sequence: Synthetic oligonucleotide
  source 1..46: mol_type = other DNA
cctgtgaatcattctaaaaatagaatttctgaaagcaattcacaac

SEQ ID NO: 11656 - DNA, 47 bp, synthetic construct
  misc_feature 1..47: note = Description of Artificial Sequence: Synthetic oligonucleotide
  source 1..47: mol_type = other DNA
cctgtgactcctcacagcaaaaatacaatttgaaagcaattcacaac

SEQ ID NO: 11657 - DNA, 47 bp, synthetic construct
  misc_feature 1..47: note = Description of Artificial Sequence: Synthetic oligonucleotide
  source 1..47: mol_type = other DNA
cctgtgattcaccacatcgaaaatacaaattgaaagctaatcacaac

SEQ ID NO: 11658 - DNA, 47 bp, synthetic construct
  misc_feature 1..47: note = Description of Artificial Sequence: Synthetic oligonucleotide
  source 1..47: mol_type = other DNA
cctgtgattcaccacgctaaaaatacaaattgaaagctaatcacaac

SEQ ID NO: 11659 - DNA, 46 bp, synthetic construct
  misc_feature 1..46: note = Description of Artificial Sequence: Synthetic oligonucleotide
  source 1..46: mol_type = other DNA
cctgtggatcctatgtcaaagatacaacctgaaagcaaatcacaac

SEQ ID NO: 11660 - DNA, 47 bp, synthetic construct
  misc_feature 1..47: note = Description of Artificial Sequence: Synthetic oligonucleotide
  source 1..47: mol_type = other DNA
cctgttgatgacccaacaaaggtactaatttgaaagcaaatcacaac

SEQ ID NO: 11661 - DNA, 36 bp, synthetic construct
  misc_feature 1..36: note = Description of Artificial Sequence: Synthetic oligonucleotide
  source 1..36: mol_type = other DNA
cctgttgtaatctaatgattgaaagctaatcacaac

SEQ ID NO: 11662 - DNA, 27 bp, synthetic construct
  misc_feature 1..27: note = Description of Artificial Sequence: Synthetic oligonucleotide
  source 1..27: mol_type = other DNA
ccttatgaaattacactattctcaaac

SEQ ID NO: 11663 - DNA, 37 bp, synthetic construct
  misc_feature 1..37: note = Description of Artificial Sequence: Synthetic oligonucleotide
  source 1..37: mol_type = other DNA
ccttcacattataacccgatcaagtaacaactgaaag

SEQ ID NO: 11664 - DNA, 37 bp, synthetic construct
  misc_feature 1..37: note = Description of Artificial Sequence: Synthetic oligonucleotide
  source 1..37: mol_type = other DNA
ccttgtggtttgattaaagattagaaaacacgatatt

SEQ ID NO: 11665 - DNA, 29 bp, synthetic construct
  misc_feature 1..29: note = Description of Artificial Sequence: Synthetic oligonucleotide
  source 1..29: mol_type = other DNA
cgaaacctcatttcctaagtttctatatt

SEQ ID NO: 11666 - DNA, 38 bp, synthetic construct
  misc_feature 1..38: note = Description of Artificial Sequence: Synthetic oligonucleotide
  source 1..38: mol_type = other DNA
cgagtttactaaagaggaacctgtccgaccgccccaac

SEQ ID NO: 11667 - DNA, 41 bp, synthetic construct
  misc_feature 1..41: note = Description of Artificial Sequence: Synthetic oligonucleotide
  source 1..41: mol_type = other DNA
cgatagctatcggaagtgttctttgatagattgcatacaga

SEQ ID NO: 11668 - DNA, 37 bp, synthetic construct
  misc_feature 1..37: note = Description of Artificial Sequence: Synthetic oligonucleotide
  source 1..37: mol_type = other DNA
cgctatggcctgtcgggagtcccggcttcgatacact

SEQ ID NO: 11669 - DNA, 46 bp, synthetic construct
  misc_feature 1..46: note = Description of Artificial Sequence: Synthetic oligonucleotide
  source 1..46: mol_type = other DNA
cgctgcgctccggttcagattgtatctttgacatacctatcacaac

SEQ ID NO: 11670 - DNA, 37 bp, synthetic construct
  misc_feature 1..37: note = Description of Artificial Sequence: Synthetic oligonucleotide
  source 1..37: mol_type = other DNA
cgctgggacttgacgagaaccgccgattgagtacatt

SEQ ID NO: 11671 - DNA, 27 bp, synthetic construct
  misc_feature 1..27: note = Description of Artificial Sequence: Synthetic oligonucleotide
  source 1..27: mol_type = other DNA
cgcttgcatacatacacattaaacaca

SEQ ID NO: 11672 - DNA, 32 bp, synthetic construct
  misc_feature 1..32: note = Description of Artificial Sequence: Synthetic oligonucleotide
  source 1..32: mol_type = other DNA
cggattgctcccgggccgcggtcgattacact

SEQ ID NO: 11673 - DNA, 38 bp, synthetic construct
  misc_feature 1..38: note = Description of Artificial Sequence: Synthetic oligonucleotide
  source 1..38: mol_type = other DNA
cggtatatcttattgagtattagaatcaaaccacaacc

SEQ ID NO: 11674 - DNA, 29 bp, synthetic construct
  misc_feature 1..29: note = Description of Artificial Sequence: Synthetic oligonucleotide
  source 1..29: mol_type = other DNA
cggttggaccgcgccgcgtcttcgattag

SEQ ID NO: 11675 - DNA, 28 bp, synthetic construct
  misc_feature 1..28: note = Description of Artificial Sequence: Synthetic oligonucleotide
  source 1..28: mol_type = other DNA
cggttggccctcaatctccaatcggcta

SEQ ID NO: 11676 - DNA, 24 bp, synthetic construct
  misc_feature 1..24: note = Description of Artificial Sequence: Synthetic oligonucleotide
  source 1..24: mol_type = other DNA
cgtaatttgttcaggtactaaaat

SEQ ID NO: 11677 - DNA, 36 bp, synthetic construct
  misc_feature 1..36: note = Description of Artificial Sequence: Synthetic oligonucleotide
  source 1..36: mol_type = other DNA
cgtctaagatacaccattttgaaagcaaatcacaac

SEQ ID NO: 11678 - DNA, 36 bp, synthetic construct
  misc_feature 1..36: note = Description of Artificial Sequence: Synthetic oligonucleotide
  source 1..36: mol_type = other DNA
cgtctagcactctggaaaagaaagaccaactgcaat

SEQ ID NO: 11679 - DNA, 36 bp, synthetic construct
  misc_feature 1..36: note = Description of Artificial Sequence: Synthetic oligonucleotide
  source 1..36: mol_type = other DNA
cgtctcataacattcaaaataacacaactataaaac

SEQ ID NO: 11680 - DNA, 34 bp, synthetic construct
  misc_feature 1..34: note = Description of Artificial Sequence: Synthetic oligonucleotide
  source 1..34: mol_type = other DNA
cgtggcttccctaccgatttccccgtggtaggtt

SEQ ID NO: 11681 - DNA, 36 bp, synthetic construct
  misc_feature 1..36: note = Description of Artificial Sequence: Synthetic oligonucleotide
  source 1..36: mol_type = other DNA
cgttaatatcatccttttcctacatcaaaccacacc

SEQ ID NO: 11682 - DNA, 37 bp, synthetic construct
  misc_feature 1..37: note = Description of Artificial Sequence: Synthetic oligonucleotide
  source 1..37: mol_type = other DNA
cgttgcggcttgctctcgatctctaagcggctacaat

SEQ ID NO: 11683 - DNA, 38 bp, synthetic construct
  misc_feature 1..38: note = Description of Artificial Sequence: Synthetic oligonucleotide
  source 1..38: mol_type = other DNA
cgttgtagctccctctctcaccccggatagctacaatc

SEQ ID NO: 11684 - DNA, 37 bp, synthetic construct
  misc_feature 1..37: note = Description of Artificial Sequence: Synthetic oligonucleotide
  source 1..37: mol_type = other DNA
cgttgtagttgactggtaatctcggcttggatacatt

SEQ ID NO: 11685 - DNA, 37 bp, synthetic construct
  misc_feature 1..37: note = Description of Artificial Sequence: Synthetic oligonucleotide
  source 1..37: mol_type = other DNA
cgttgtgaattgcgggcgggcatcgatcagctataat

SEQ ID NO: 11686 - DNA, 37 bp, synthetic construct
  misc_feature 1..37: note = Description of Artificial Sequence: Synthetic oligonucleotide
  source 1..37: mol_type = other DNA
cgttgtggcttgcactcaggcacaggtcagttataat

SEQ ID NO: 11687 - DNA, 32 bp, synthetic construct
  misc_feature 1..32: note = Description of Artificial Sequence: Synthetic oligonucleotide
  source 1..32: mol_type = other DNA
cgttgttacccaataaggtttgcaatctactt

SEQ ID NO: 11688 - DNA, 36 bp, synthetic construct
  misc_feature 1..36: note = Description of Artificial Sequence: Synthetic oligonucleotide
  source 1..36: mol_type = other DNA
cgttgttattgttttttttctacatcaaaccacaac

SEQ ID NO: 11689 - DNA, 36 bp, synthetic construct
  misc_feature 1..36: note = Description of Artificial Sequence: Synthetic oligonucleotide
  source 1..36: mol_type = other DNA
cgtttaataccatttaagatgacatagaactaaaac

SEQ ID NO: 11690 - DNA, 37 bp, synthetic construct
  misc_feature 1..37: note = Description of Artificial Sequence: Synthetic oligonucleotide
  source 1..37: mol_type = other DNA
cgtttgattaccatatgaaattacattactctcaaac

SEQ ID NO: 11691 - DNA, 37 bp, synthetic construct
  misc_feature 1..37: note = Description of Artificial Sequence: Synthetic oligonucleotide
  source 1..37: mol_type = other DNA
cgtttgggattgccccccgtccaagggatgctaggct

SEQ ID NO: 11692 - DNA, 37 bp, synthetic construct
  misc_feature 1..37: note = Description of Artificial Sequence: Synthetic oligonucleotide
  source 1..37: mol_type = other DNA
cgttttgccttccccccggaggcgcgagcgatacaat

SEQ ID NO: 11693 - DNA, 37 bp, synthetic construct
  misc_feature 1..37: note = Description of Artificial Sequence: Synthetic oligonucleotide
  source 1..37: mol_type = other DNA
cgttttggattgaccgcagactggggtttgttacagt

SEQ ID NO: 11694 - DNA, 37 bp, synthetic construct
  misc_feature 1..37: note = Description of Artificial Sequence: Synthetic oligonucleotide
  source 1..37: mol_type = other DNA
ctaacaaattataacaaagctacacttagtttgaaac

SEQ ID NO: 11695 - DNA, 37 bp, synthetic construct
  misc_feature 1..37: note = Description of Artificial Sequence: Synthetic oligonucleotide
  source 1..37: mol_type = other DNA
ctaacaaattataactagacacaacttagtttgaaac

SEQ ID NO: 11696 - DNA, 37 bp, synthetic construct
  misc_feature 1..37: note = Description of Artificial Sequence: Synthetic oligonucleotide
  source 1..37: mol_type = other DNA
ctaacaaattataactagactcaacttagtttgaaac

SEQ ID NO: 11697 - DNA, 37 bp, synthetic construct
  misc_feature 1..37: note = Description of Artificial Sequence: Synthetic oligonucleotide
  source 1..37: mol_type = other DNA
ctaacaaattataccaagagaccacttagtttgaaac

SEQ ID NO: 11698 - DNA, 25 bp, synthetic construct
  misc_feature 1..25: note = Description of Artificial Sequence: Synthetic oligonucleotide
  source 1..25: mol_type = other DNA
ctaacaatttagatattggtataat

SEQ ID NO: 11699 - DNA, 29 bp, synthetic construct
  misc_feature 1..29: note = Description of Artificial Sequence: Synthetic oligonucleotide
  source 1..29: mol_type = other DNA
ctaaggcgaagtttgatataatttgttat

SEQ ID NO: 11700 - DNA, 28 bp, synthetic construct
  misc_feature 1..28: note = Description of Artificial Sequence: Synthetic oligonucleotide
  source 1..28: mol_type = other DNA
ctaccgagaaagcaggcagggctacagg

SEQ ID NO: 11701 - DNA, 36 bp, synthetic construct
  misc_feature 1..36: note = Description of Artificial Sequence: Synthetic oligonucleotide
  source 1..36: mol_type = other DNA
ctataccttatacctaaaactgcagagtactaaaac

SEQ ID NO: 11702 - DNA, 35 bp, synthetic construct
  misc_feature 1..35: note = Description of Artificial Sequence: Synthetic oligonucleotide
  source 1..35: mol_type = other DNA
ctatagttccaaaagaaccatcactatgatatggt

SEQ ID NO: 11703 - DNA, 36 bp, synthetic construct
  misc_feature 1..36: note = Description of Artificial Sequence: Synthetic oligonucleotide
  source 1..36: mol_type = other DNA
ctccgcaaaaatagtaaattgagaactattcacaac

SEQ ID NO: 11704 - DNA, 27 bp, synthetic construct
  misc_feature 1..27: note = Description of Artificial Sequence: Synthetic oligonucleotide
  source 1..27: mol_type = other DNA
ctctctcaccccggaaggctacaatcc

SEQ ID NO: 11705 - DNA, 30 bp, synthetic construct
  misc_feature 1..30: note = Description of Artificial Sequence: Synthetic oligonucleotide
  source 1..30: mol_type = other DNA
ctcttaatcgcaccattttggaattgaaac

SEQ ID NO: 11706 - DNA, 35 bp, synthetic construct
  misc_feature 1..35: note = Description of Artificial Sequence: Synthetic oligonucleotide
  source 1..35: mol_type = other DNA
ctgagacttgcagtgaataaacgctttgatatgct

SEQ ID NO: 11707 - DNA, 43 bp, synthetic construct
  misc_feature 1..43: note = Description of Artificial Sequence: Synthetic oligonucleotide
  source 1..43: mol_type = other DNA
ctgtattaagcaagtgtgaatgtacggaatctgaaagctaatc

SEQ ID NO: 11708 - DNA, 35 bp, synthetic construct
  misc_feature 1..35: note = Description of Artificial Sequence: Synthetic oligonucleotide
  source 1..35: mol_type = other DNA
ctgtggtgtaccgggaaacaatggatgacttcagc

SEQ ID NO: 11709 - DNA, 38 bp, synthetic construct
  misc_feature 1..38: note = Description of Artificial Sequence: Synthetic oligonucleotide
  source 1..38: mol_type = other DNA
ctgttgttaatacaaaaataaagaacaaaatttgaaag

SEQ ID NO: 11710 - DNA, 46 bp, synthetic construct
  misc_feature 1..46: note = Description of Artificial Sequence: Synthetic oligonucleotide
  source 1..46: mol_type = other DNA
ctgtttctgatatgtcaaagataaaattttgaaagcaaatcacaac

SEQ ID NO: 11711 - DNA, 28 bp, synthetic construct
  misc_feature 1..28: note = Description of Artificial Sequence: Synthetic oligonucleotide
  source 1..28: mol_type = other DNA
cttaaaacttcttccattattctcaaac

SEQ ID NO: 11712 - DNA, 36 bp, synthetic construct
  misc_feature 1..36: note = Description of Artificial Sequence: Synthetic oligonucleotide
  source 1..36: mol_type = other DNA
cttacaatcgacaattaaatattttgtttgtgtaat

SEQ ID NO: 11713 - DNA, 36 bp, synthetic construct
  misc_feature 1..36: note = Description of Artificial Sequence: Synthetic oligonucleotide
  source 1..36: mol_type = other DNA
cttaccacagtgccccggtgggggcgagatcaaaac

SEQ ID NO: 11714 - DNA, 36 bp, synthetic construct
  misc_feature 1..36: note = Description of Artificial Sequence: Synthetic oligonucleotide
  source 1..36: mol_type = other DNA
cttataaaacatcggatttaaaggtcaagtagtaac

SEQ ID NO: 11715 - DNA, 46 bp, synthetic construct
  misc_feature 1..46: note = Description of Artificial Sequence: Synthetic oligonucleotide
  source 1..46: mol_type = other DNA
cttatgaattgctttcaaatttcgtagttttgtgattgataacaac

SEQ ID NO: 11716 - DNA, 46 bp, synthetic construct
  misc_feature 1..46: note = Description of Artificial Sequence: Synthetic oligonucleotide
  source 1..46: mol_type = other DNA
cttatgaattgctttcaaattttgtagttttgtgattgataacaac

SEQ ID NO: 11717 - DNA, 29 bp, synthetic construct
  misc_feature 1..29: note = Description of Artificial Sequence: Synthetic oligonucleotide
  source 1..29: mol_type = other DNA
cttctagcaaaaatccatatggtagcaaa

SEQ ID NO: 11718 - DNA, 36 bp, synthetic construct
  misc_feature 1..36: note = Description of Artificial Sequence: Synthetic oligonucleotide
  source 1..36: mol_type = other DNA
cttcttctaagatacagtttgaaagctaatcacaac

SEQ ID NO: 11719 - DNA, 46 bp, synthetic construct
  misc_feature 1..46: note = Description of Artificial Sequence: Synthetic oligonucleotide
  source 1..46: mol_type = other DNA
cttggttttaagattgtcaaaaaacattttgaaagcaaatcacaac

SEQ ID NO: 11720 - DNA, 46 bp, synthetic construct
  misc_feature 1..46: note = Description of Artificial Sequence: Synthetic oligonucleotide
  source 1..46: mol_type = other DNA
cttggttttaatatatcaaagaataaatttgaaagcaaatcacaac

SEQ ID NO: 11721 - DNA, 46 bp, synthetic construct
  misc_feature 1..46: note = Description of Artificial Sequence: Synthetic oligonucleotide
  source 1..46: mol_type = other DNA
cttgtgaatcctcacgtaaaaatacaatttgaaatcaattcacaac

SEQ ID NO: 11722 - DNA, 47 bp, synthetic construct
  misc_feature 1..47: note = Description of Artificial Sequence: Synthetic oligonucleotide
  source 1..47: mol_type = other DNA
cttgtgattcaccacagcaaaaatacaatttgaaagctaatcacaac

SEQ ID NO: 11723 - DNA, 47 bp, synthetic construct
  misc_feature 1..47: note = Description of Artificial Sequence: Synthetic oligonucleotide
  source 1..47: mol_type = other DNA
cttgtgattccacacatcaaagatacattttgtaagcaaatcacaac

SEQ ID NO: 11724 - DNA, 46 bp, synthetic construct
  misc_feature 1..46: note = Description of Artificial Sequence: Synthetic oligonucleotide
  source 1..46: mol_type = other DNA
cttgtgattcctcacgtaaaaatacaatttgaaagcaattcacaac

SEQ ID NO: 11725 - DNA, 46 bp, synthetic construct
  misc_feature 1..46: note = Description of Artificial Sequence: Synthetic oligonucleotide
  source 1..46: mol_type = other DNA
cttgtgattgctcacgtaaaaatacaatttgaaatcaattcacaac

SEQ ID NO: 11726 - DNA, 46 bp, synthetic construct
  misc_feature 1..46: note = Description of Artificial Sequence: Synthetic oligonucleotide
  source 1..46: mol_type = other DNA
cttgtgatttctcactaaaaatacaattttgaaatcaattcacaac

SEQ ID NO: 11727 - DNA, 36 bp, synthetic construct
  misc_feature 1..36: note = Description of Artificial Sequence: Synthetic oligonucleotide
  source 1..36: mol_type = other DNA
cttgtgcgttgctcgcgggctgggatcgattacact

SEQ ID NO: 11728 - DNA, 46 bp, synthetic construct
  misc_feature 1..46: note = Description of Artificial Sequence: Synthetic oligonucleotide
  source 1..46: mol_type = other DNA
cttgttttagtccgtatttgttacttttttgaatgacatacacaac

SEQ ID NO: 11729 - DNA, 37 bp, synthetic construct
  misc_feature 1..37: note = Description of Artificial Sequence: Synthetic oligonucleotide
  source 1..37: mol_type = other DNA
ctttaagtgtaccaaggtgaataatgaaagattctca

SEQ ID NO: 11730 - DNA, 37 bp, synthetic construct
  misc_feature 1..37: note = Description of Artificial Sequence: Synthetic oligonucleotide
  source 1..37: mol_type = other DNA
ctttcacccttgaattttttttgagcgggactacaat

SEQ ID NO: 11731 - DNA, 35 bp, synthetic construct
  misc_feature 1..35: note = Description of Artificial Sequence: Synthetic oligonucleotide
  source 1..35: mol_type = other DNA
ctttcagaatactattttagtagataattcgcagg

SEQ ID NO: 11732 - DNA, 38 bp, synthetic construct
  misc_feature 1..38: note = Description of Artificial Sequence: Synthetic oligonucleotide
  source 1..38: mol_type = other DNA
ctttcagtgttgactacaaccgcgcgcagtctgaaatg

SEQ ID NO: 11733 - DNA, 37 bp, synthetic construct
  misc_feature 1..37: note = Description of Artificial Sequence: Synthetic oligonucleotide
  source 1..37: mol_type = other DNA
ctttcagttactactctctcttggattagaatgttgg

SEQ ID NO: 11734 - DNA, 37 bp, synthetic construct
  misc_feature 1..37: note = Description of Artificial Sequence: Synthetic oligonucleotide
  source 1..37: mol_type = other DNA
ctttcagttgttgttttctttggatgattaatgaaag

SEQ ID NO: 11735 - DNA, 25 bp, synthetic construct
  misc_feature 1..25: note = Description of Artificial Sequence: Synthetic oligonucleotide
  source 1..25: mol_type = other DNA
ctttctcatttcgcagtgctacaat

SEQ ID NO: 11736 - DNA, 24 bp, synthetic construct
  misc_feature 1..24: note = Description of Artificial Sequence: Synthetic oligonucleotide
  source 1..24: mol_type = other DNA
ctttcttctacatcaaaccacaac

SEQ ID NO: 11737 - DNA, 36 bp, synthetic construct
  misc_feature 1..36: note = Description of Artificial Sequence: Synthetic oligonucleotide
  source 1..36: mol_type = other DNA
cttttacaatagcttaaatccttagaatactaaaac

SEQ ID NO: 11738 - DNA, 36 bp, synthetic construct
  misc_feature 1..36: note = Description of Artificial Sequence: Synthetic oligonucleotide
  source 1..36: mol_type = other DNA
cttttactaccctataaaattacactactctcaaac

SEQ ID NO: 11739 - DNA, 36 bp, synthetic construct
  misc_feature 1..36: note = Description of Artificial Sequence: Synthetic oligonucleotide
  source 1..36: mol_type = other DNA
cttttagtggtattcaaaataacaatactctcaaac

SEQ ID NO: 11740 - DNA, 36 bp, synthetic construct
  misc_feature 1..36: note = Description of Artificial Sequence: Synthetic oligonucleotide
  source 1..36: mol_type = other DNA
cttttatcttacttaaattttacaaggtactaaaac

SEQ ID NO: 11741 - DNA, 26 bp, synthetic construct
  misc_feature 1..26: note = Description of Artificial Sequence: Synthetic oligonucleotide
  source 1..26: mol_type = other DNA
ctttttgggtactacaaatttacatg

SEQ ID NO: 11742 - DNA, 37 bp, synthetic construct
  misc_feature 1..37: note = Description of Artificial Sequence: Synthetic oligonucleotide
  source 1..37: mol_type = other DNA
gaacctagcgacttggaaacagacgggtcaaccagac

SEQ ID NO: 11743 - DNA, 37 bp, synthetic construct
  misc_feature 1..37: note = Description of Artificial Sequence: Synthetic oligonucleotide
  source 1..37: mol_type = other DNA
gaactagcatgagggccgtcagagggccagccgtaac

SEQ ID NO: 11744 - DNA, 33 bp, synthetic construct
  misc_feature 1..33: note = Description of Artificial Sequence: Synthetic oligonucleotide
  source 1..33: mol_type = other DNA
gaagaaaaagtggcaatattgccaaaaattctt

SEQ ID NO: 11745 - DNA, 36 bp, synthetic construct
  misc_feature 1..36: note = Description of Artificial Sequence: Synthetic oligonucleotide
  source 1..36: mol_type = other DNA
gaagcttagcagggttaataagaactgattcccagc

SEQ ID NO: 11746 - DNA, 36 bp, synthetic construct
  misc_feature 1..36: note = Description of Artificial Sequence: Synthetic oligonucleotide
  source 1..36: mol_type = other DNA
gaagtatatctaaggttttgagagacgattctcagc

SEQ ID NO: 11747 - DNA, 36 bp, synthetic construct
  misc_feature 1..36: note = Description of Artificial Sequence: Synthetic oligonucleotide
  source 1..36: mol_type = other DNA
gaagtctaccagggggactgacgactgattcccagc

SEQ ID NO: 11748 - DNA, 36 bp, synthetic construct
  misc_feature 1..36: note = Description of Artificial Sequence: Synthetic oligonucleotide
  source 1..36: mol_type = other DNA
gaagtctactgcggagagacgaacgtacttcccaac

SEQ ID NO: 11749 - DNA, 37 bp, synthetic construct
  misc_feature 1..37: note = Description of Artificial Sequence: Synthetic oligonucleotide
  source 1..37: mol_type = other DNA
gaagtctacttgggagaaaggacgacaactcccaact

SEQ ID NO: 11750 - DNA, 36 bp, synthetic construct
  misc_feature 1..36: note = Description of Artificial Sequence: Synthetic oligonucleotide
  source 1..36: mol_type = other DNA
gaagtctagagctcccaggggaaacgggaactcaac

SEQ ID NO: 11751 - DNA, 36 bp, synthetic construct
  misc_feature 1..36: note = Description of Artificial Sequence: Synthetic oligonucleotide
  source 1..36: mol_type = other DNA
gaagtctatcaaagggaaaggtgactgattcccaac

SEQ ID NO: 11752 - DNA, 36 bp, synthetic construct
  misc_feature 1..36: note = Description of Artificial Sequence: Synthetic oligonucleotide
  source 1..36: mol_type = other DNA
gaagtctatcaaggggaatctgaactgatccccagc

SEQ ID NO: 11753 - DNA, 36 bp, synthetic construct
  misc_feature 1..36: note = Description of Artificial Sequence: Synthetic oligonucleotide
  source 1..36: mol_type = other DNA
gaagtctatcaaggggtcgggtgactgattcccagc

SEQ ID NO: 11754 - DNA, 36 bp, synthetic construct
  misc_feature 1..36: note = Description of Artificial Sequence: Synthetic oligonucleotide
  source 1..36: mol_type = other DNA
gaagtctatcaaggggtctggtgactgaatcccagc

SEQ ID NO: 11755 - DNA, 36 bp, synthetic construct
  misc_feature 1..36: note = Description of Artificial Sequence: Synthetic oligonucleotide
  source 1..36: mol_type = other DNA
gaagtctatcaaggggtctggtgactgattcccagc

SEQ ID NO: 11756 - DNA, 36 bp, synthetic construct
  misc_feature 1..36: note = Description of Artificial Sequence: Synthetic oligonucleotide
  source 1..36: mol_type = other DNA
gaataagtctatcaatatccatcagagaactaaaac

SEQ ID NO: 11757 - DNA, 36 bp, synthetic construct
  misc_feature 1..36: note = Description of Artificial Sequence: Synthetic oligonucleotide
  source 1..36: mol_type = other DNA
gaatcatacccatcatatttgacaacactctcaaac

SEQ ID NO: 11758 - DNA, 28 bp, synthetic construct
  misc_feature 1..28: note = Description of Artificial Sequence: Synthetic oligonucleotide
  source 1..28: mol_type = other DNA
gaatgatgtaaaaatgtatggtactcaa

SEQ ID NO: 11759 - DNA, 36 bp, synthetic construct
  misc_feature 1..36: note = Description of Artificial Sequence: Synthetic oligonucleotide
  source 1..36: mol_type = other DNA
gactcagtctcttcttaaagtttaatgatgtgatac

SEQ ID NO: 11760 - DNA, 31 bp, synthetic construct
  misc_feature 1..31: note = Description of Artificial Sequence: Synthetic oligonucleotide
  source 1..31: mol_type = other DNA
gagaaccttgtaaattatgatgggtaagaaa

SEQ ID NO: 11761 - DNA, 32 bp, synthetic construct
  misc_feature 1..32: note = Description of Artificial Sequence: Synthetic oligonucleotide
  source 1..32: mol_type = other DNA
gagaatagtgtaatttcataaggtagttaaac

SEQ ID NO: 11762 - DNA, 36 bp, synthetic construct
  misc_feature 1..36: note = Description of Artificial Sequence: Synthetic oligonucleotide
  source 1..36: mol_type = other DNA
gagaattacatcattgatttaacatccatctaaagc

SEQ ID NO: 11763 - DNA, 28 bp, synthetic construct
  misc_feature 1..28: note = Description of Artificial Sequence: Synthetic oligonucleotide
  source 1..28: mol_type = other DNA
gagagctttgttaattcagaagagtgta

SEQ ID NO: 11764 - DNA, 36 bp, synthetic construct
  misc_feature 1..36: note = Description of Artificial Sequence: Synthetic oligonucleotide
  source 1..36: mol_type = other DNA
gagatctaccttattggtttaacgtccttctaaaac

SEQ ID NO: 11765 - DNA, 37 bp, synthetic construct
  misc_feature 1..37: note = Description of Artificial Sequence: Synthetic oligonucleotide
  source 1..37: mol_type = other DNA
gagcataccgcttcagagatcgtggtccagcggcaac

SEQ ID NO: 11766 - DNA, 37 bp, synthetic construct
  misc_feature 1..37: note = Description of Artificial Sequence: Synthetic oligonucleotide
  source 1..37: mol_type = other DNA
gagcatccgccccccggaattggaatcaaggcaaagc

SEQ ID NO: 11767 - DNA, 37 bp, synthetic construct
  misc_feature 1..37: note = Description of Artificial Sequence: Synthetic oligonucleotide
  source 1..37: mol_type = other DNA
gagcctaccaatgggaagtcggtagggaaaccacggc

SEQ ID NO: 11768 - DNA, 37 bp, synthetic construct
  misc_feature 1..37: note = Description of Artificial Sequence: Synthetic oligonucleotide
  source 1..37: mol_type = other DNA
gagcctagcaggagcgaatccggagggaaaccacggc

SEQ ID NO: 11769 - DNA, 37 bp, synthetic construct
  misc_feature 1..37: note = Description of Artificial Sequence: Synthetic oligonucleotide
  source 1..37: mol_type = other DNA
gagcctctgctccgcggttttggaatcaaggcaaagc

SEQ ID NO: 11770 - DNA, 26 bp, synthetic construct
  misc_feature 1..26: note = Description of Artificial Sequence: Synthetic oligonucleotide
  source 1..26: mol_type = other DNA
gagcgcatttcccagtgatctagact

SEQ ID NO: 11771 - DNA, 37 bp, synthetic construct
  misc_feature 1..37: note = Description of Artificial Sequence: Synthetic oligonucleotide
  source 1..37: mol_type = other DNA
gagcgtaacagatcaggaaatgcgctctagccggaac

SEQ ID NO: 11772 - DNA, 37 bp, synthetic construct
  misc_feature 1..37: note = Description of Artificial Sequence: Synthetic oligonucleotide
  source 1..37: mol_type = other DNA
gagcgtaacagatcaggaaatgcgctctggccggaac

SEQ ID NO: 11773 - DNA, 37 bp, synthetic construct
  misc_feature 1..37: note = Description of Artificial Sequence: Synthetic oligonucleotide
  source 1..37: mol_type = other DNA
gagcgtagcagatcaggaaatgcgctctagccggaac

SEQ ID NO: 11774 - DNA, 37 bp, synthetic construct
  misc_feature 1..37: note = Description of Artificial Sequence: Synthetic oligonucleotide
  source 1..37: mol_type = other DNA
gagcgtagcagatcaggaattgcacactctcgggaac

SEQ ID NO: 11775 - DNA, 37 bp, synthetic construct
  misc_feature 1..37: note = Description of Artificial Sequence: Synthetic oligonucleotide
  source 1..37: mol_type = other DNA
gagcgtatcagcctttccgatggtggggtatcggaac

SEQ ID NO: 11776 - DNA, 37 bp, synthetic construct
  misc_feature 1..37: note = Description of Artificial Sequence: Synthetic oligonucleotide
  source 1..37: mol_type = other DNA
gagcgtatcaggctttccgatggtggggtatcggaac

SEQ ID NO: 11777 - DNA, 36 bp, synthetic construct
  misc_feature 1..36: note = Description of Artificial Sequence: Synthetic oligonucleotide
  source 1..36: mol_type = other DNA
gagctagcagttcagaaatcgcgggccaaccgcaac

SEQ ID NO: 11778 - DNA, 37 bp, synthetic construct
  misc_feature 1..37: note = Description of Artificial Sequence: Synthetic oligonucleotide
  source 1..37: mol_type = other DNA
gagcttaacagatcaggaattgcactcaagccagaac

SEQ ID NO: 11779 - DNA, 37 bp, synthetic construct
  misc_feature 1..37: note = Description of Artificial Sequence: Synthetic oligonucleotide
  source 1..37: mol_type = other DNA
gagcttagcatggatgggtctgcagggaacccatgac

SEQ ID NO: 11780 - DNA, 37 bp, synthetic construct
  misc_feature 1..37: note = Description of Artificial Sequence: Synthetic oligonucleotide
  source 1..37: mol_type = other DNA
gaggatagccgttcagaaatcggggtccagccgcaac

SEQ ID NO: 11781 - DNA, 37 bp, synthetic construct
  misc_feature 1..37: note = Description of Artificial Sequence: Synthetic oligonucleotide
  source 1..37: mol_type = other DNA
gaggctagcagatcaggatttgagcgctctcggaaac

SEQ ID NO: 11782 - DNA, 37 bp, synthetic construct
  misc_feature 1..37: note = Description of Artificial Sequence: Synthetic oligonucleotide
  source 1..37: mol_type = other DNA
gagtctaaccaaccccagcctgcgagcaatccgcaac

SEQ ID NO: 11783 - DNA, 37 bp, synthetic construct
  misc_feature 1..37: note = Description of Artificial Sequence: Synthetic oligonucleotide
  source 1..37: mol_type = other DNA
gagtctagtcgattgggaaatgcgctctgaccggaac

SEQ ID NO: 11784 - DNA, 37 bp, synthetic construct
  misc_feature 1..37: note = Description of Artificial Sequence: Synthetic oligonucleotide
  source 1..37: mol_type = other DNA
gagtctatccaatcccgacctgcaagcaatccgcaac

SEQ ID NO: 11785 - DNA, 37 bp, synthetic construct
  misc_feature 1..37: note = Description of Artificial Sequence: Synthetic oligonucleotide
  source 1..37: mol_type = other DNA
gagtgtagctatccggggtgagagagggagctacaac

SEQ ID NO: 11786 - DNA, 37 bp, synthetic construct
  misc_feature 1..37: note = Description of Artificial Sequence: Synthetic oligonucleotide
  source 1..37: mol_type = other DNA
gagtgtatcaagctttccgatggtggggtatcggaac

SEQ ID NO: 11787 - DNA, 38 bp, synthetic construct
  misc_feature 1..38: note = Description of Artificial Sequence: Synthetic oligonucleotide
  source 1..38: mol_type = other DNA
gagtgtatccgagcgacgattccccccaagccacagcg

SEQ ID NO: 11788 - DNA, 37 bp, synthetic construct
  misc_feature 1..37: note = Description of Artificial Sequence: Synthetic oligonucleotide
  source 1..37: mol_type = other DNA
gagtgtctgccccaaggaattggaatcaaggcaaagc

SEQ ID NO: 11789 - DNA, 37 bp, synthetic construct
  misc_feature 1..37: note = Description of Artificial Sequence: Synthetic oligonucleotide
  source 1..37: mol_type = other DNA
gagtttgaataagagttaatacggcatatatccaaac

SEQ ID NO: 11790 - DNA, 36 bp, synthetic construct
  misc_feature 1..36: note = Description of Artificial Sequence: Synthetic oligonucleotide
  source 1..36: mol_type = other DNA
gatacagactcttgataaatttgaataatgtaaaac

SEQ ID NO: 11791 - DNA, 36 bp, synthetic construct
  misc_feature 1..36: note = Description of Artificial Sequence: Synthetic oligonucleotide
  source 1..36: mol_type = other DNA
gataccagaatgctccggggggagcgagatcaaaac

SEQ ID NO: 11792 - DNA, 36 bp, synthetic construct
  misc_feature 1..36: note = Description of Artificial Sequence: Synthetic oligonucleotide
  source 1..36: mol_type = other DNA
gataccagactgcccttgtgggggcgagatcaaaac

SEQ ID NO: 11793 - DNA, 37 bp, synthetic construct
  misc_feature 1..37: note = Description of Artificial Sequence: Synthetic oligonucleotide
  source 1..37: mol_type = other DNA
gatactccgcgccgagtttttggaatcaaggcaaagc

SEQ ID NO: 11794 - DNA, 36 bp, synthetic construct
  misc_feature 1..36: note = Description of Artificial Sequence: Synthetic oligonucleotide
  source 1..36: mol_type = other DNA
gatatatcttactcttaaattacatcaaaccacaac

SEQ ID NO: 11795 - DNA, 36 bp, synthetic construct
  misc_feature 1..36: note = Description of Artificial Sequence: Synthetic oligonucleotide
  source 1..36: mol_type = other DNA
gatatcgaccccttgtaaaaaccattgtattagaac

SEQ ID NO: 11796 - DNA, 36 bp, synthetic construct
  misc_feature 1..36: note = Description of Artificial Sequence: Synthetic oligonucleotide
  source 1..36: mol_type = other DNA
gatatcgtgttttctaatctttaatcaaaccacaac

SEQ ID NO: 11797 - DNA, 36 bp, synthetic construct
  misc_feature 1..36: note = Description of Artificial Sequence: Synthetic oligonucleotide
  source 1..36: mol_type = other DNA
gatatcgttttttctaatctttaatcaaaccacaac

SEQ ID NO: 11798 - DNA, 37 bp, synthetic construct
  misc_feature 1..37: note = Description of Artificial Sequence: Synthetic oligonucleotide
  source 1..37: mol_type = other DNA
gatcaacgcctccccggaattggaatcaaggcaaagc

SEQ ID NO: 11799 - DNA, 36 bp, synthetic construct
  misc_feature 1..36: note = Description of Artificial Sequence: Synthetic oligonucleotide
  source 1..36: mol_type = other DNA
gatctagcactctggaaaagtaagaccaaccgcaac

SEQ ID NO: 11800 - DNA, 36 bp, synthetic construct
  misc_feature 1..36: note = Description of Artificial Sequence: Synthetic oligonucleotide
  source 1..36: mol_type = other DNA
gatctattcaaccacgacccgcagccaacccgcaac

SEQ ID NO: 11801 - DNA, 46 bp, synthetic construct
  misc_feature 1..46: note = Description of Artificial Sequence: Synthetic oligonucleotide
  source 1..46: mol_type = other DNA
gatgagacttatcacagtatgaatacatttgaaagcaattcacaac

SEQ ID NO: 11802 - DNA, 36 bp, synthetic construct
  misc_feature 1..36: note = Description of Artificial Sequence: Synthetic oligonucleotide
  source 1..36: mol_type = other DNA
gatgcaaaagaactaaagttgaaagcaaatcacaac

SEQ ID NO: 11803 - DNA, 37 bp, synthetic construct
  misc_feature 1..37: note = Description of Artificial Sequence: Synthetic oligonucleotide
  source 1..37: mol_type = other DNA
gatgcaaaagaactaagattgaaagcaaatcacaact

SEQ ID NO: 11804 - DNA, 46 bp, synthetic construct
  misc_feature 1..46: note = Description of Artificial Sequence: Synthetic oligonucleotide
  source 1..46: mol_type = other DNA
gatggtccagggctaagctacatcataattgaaagcaaaccataac

SEQ ID NO: 11805 - DNA, 47 bp, synthetic construct
  misc_feature 1..47: note = Description of Artificial Sequence: Synthetic oligonucleotide
  source 1..47: mol_type = other DNA
gatgtaaatgcctctgcaaagatactaatttttaagcaaatcacaac

SEQ ID NO: 11806 - DNA, 47 bp, synthetic construct
  misc_feature 1..47: note = Description of Artificial Sequence: Synthetic oligonucleotide
  source 1..47: mol_type = other DNA
gatgtatatgccatatgttagatacaagtttgaaagcaattcacaac

SEQ ID NO: 11807 - DNA, 36 bp, synthetic construct
  misc_feature 1..36: note = Description of Artificial Sequence: Synthetic oligonucleotide
  source 1..36: mol_type = other DNA
gatgtcaaagatcattcattgaaagcaaatcacaac

SEQ ID NO: 11808 - DNA, 47 bp, synthetic construct
  misc_feature 1..47: note = Description of Artificial Sequence: Synthetic oligonucleotide
  source 1..47: mol_type = other DNA
gatgtcaaaggtctatatcaatgttttcttttcaagcaattcacaac

SEQ ID NO: 11809 - DNA, 46 bp, synthetic construct
  misc_feature 1..46: note = Description of Artificial Sequence: Synthetic oligonucleotide
  source 1..46: mol_type = other DNA
gatgtcacagctcgtcaaagatcttgacctgaaagcctttcacaac

SEQ ID NO: 11810 - DNA, 47 bp, synthetic construct
  misc_feature 1..47: note = Description of Artificial Sequence: Synthetic oligonucleotide
  source 1..47: mol_type = other DNA
gatgtctatgccactgcaaaggtactaatttttcagcaaatcacaac

SEQ ID NO: 11811 - DNA, 47 bp, synthetic construct
  misc_feature 1..47: note = Description of Artificial Sequence: Synthetic oligonucleotide
  source 1..47: mol_type = other DNA
gatgtctgtgacaatgcaaagatactaatttttcagcaaatcacaac

SEQ ID NO: 11812 - DNA, 47 bp, synthetic construct
  misc_feature 1..47: note = Description of Artificial Sequence: Synthetic oligonucleotide
  source 1..47: mol_type = other DNA
gatgtctttgatataacaaaggtactaatttttcagcaaatcacaac

SEQ ID NO: 11813 - DNA, 43 bp, synthetic construct
  misc_feature 1..43: note = Description of Artificial Sequence: Synthetic oligonucleotide
  source 1..43: mol_type = other DNA
gatgtgaaagaactaagttaatatcaaaagttgaaagcaaatc

SEQ ID NO: 11814 - DNA, 41 bp, synthetic construct
  misc_feature 1..41: note = Description of Artificial Sequence: Synthetic oligonucleotide
  source 1..41: mol_type = other DNA
gatgtgaaagaactaagttaatatcaaatgttgaaagcaaa

SEQ ID NO: 11815 - DNA, 47 bp, synthetic construct
  misc_feature 1..47: note = Description of Artificial Sequence: Synthetic oligonucleotide
  source 1..47: mol_type = other DNA
gatgtgaaagaactaagttataaaaactcttgaaagcaaatcacaac

SEQ ID NO: 11816 - DNA, 46 bp, synthetic construct
  misc_feature 1..46: note = Description of Artificial Sequence: Synthetic oligonucleotide
  source 1..46: mol_type = other DNA
gatgtgaaagagctaagctacatctaaattgaaagcaaatcacaac

SEQ ID NO: 11817 - DNA, 47 bp, synthetic construct
  misc_feature 1..47: note = Description of Artificial Sequence: Synthetic oligonucleotide
  source 1..47: mol_type = other DNA
gatgtgatagaactcgataaagatacaatttgaaagcaaatcacaac

SEQ ID NO: 11818 - DNA, 47 bp, synthetic construct
  misc_feature 1..47: note = Description of Artificial Sequence: Synthetic oligonucleotide
  source 1..47: mol_type = other DNA
gatgtgatagaacttgataaagatacaatttgaaagcaaatcacaac

SEQ ID NO: 11819 - DNA, 47 bp, synthetic construct
  misc_feature 1..47: note = Description of Artificial Sequence: Synthetic oligonucleotide
  source 1..47: mol_type = other DNA
gatgtgcaataccctgcaaagatacaaatttgaaagcaattcacaac

SEQ ID NO: 11820 - DNA, 47 bp, synthetic construct
  misc_feature 1..47: note = Description of Artificial Sequence: Synthetic oligonucleotide
  source 1..47: mol_type = other DNA
gatgttaatgccactgcaaagatactaattttttagcaaatcacaac

SEQ ID NO: 11821 - DNA, 47 bp, synthetic construct
  misc_feature 1..47: note = Description of Artificial Sequence: Synthetic oligonucleotide
  source 1..47: mol_type = other DNA
gatgttattgctcttgcaaagatactaattttaaagcaaatcacaac

SEQ ID NO: 11822 - DNA, 47 bp, synthetic construct
  misc_feature 1..47: note = Description of Artificial Sequence: Synthetic oligonucleotide
  source 1..47: mol_type = other DNA
gatgttgtttgccctgcaaaggtacgaattttttagcaaatcacaac

SEQ ID NO: 11823 - DNA, 47 bp, synthetic construct
  misc_feature 1..47: note = Description of Artificial Sequence: Synthetic oligonucleotide
  source 1..47: mol_type = other DNA
gatgtttataccatacgttagatacaagtttgaaagcaattcacaac

SEQ ID NO: 11824 - DNA, 47 bp, synthetic construct
  misc_feature 1..47: note = Description of Artificial Sequence: Synthetic oligonucleotide
  source 1..47: mol_type = other DNA
gatgtttatcagtaagtcaaagatacattttgaaagcaaatcacaac

SEQ ID NO: 11825 - DNA, 47 bp, synthetic construct
  misc_feature 1..47: note = Description of Artificial Sequence: Synthetic oligonucleotide
  source 1..47: mol_type = other DNA
gatgtttatcagtaatctcaatgtactcttttcaagcaattcacaac

SEQ ID NO: 11826 - DNA, 47 bp, synthetic construct
  misc_feature 1..47: note = Description of Artificial Sequence: Synthetic oligonucleotide
  source 1..47: mol_type = other DNA
gatgtttatgatatttcttctgtactaatttgaaaggtattcacaac

SEQ ID NO: 11827 - DNA, 47 bp, synthetic construct
  misc_feature 1..47: note = Description of Artificial Sequence: Synthetic oligonucleotide
  source 1..47: mol_type = other DNA
gatgtttatgccactgcaaagatactaattttttagcaaatcacaac

SEQ ID NO: 11828 - DNA, 47 bp, synthetic construct
  misc_feature 1..47: note = Description of Artificial Sequence: Synthetic oligonucleotide
  source 1..47: mol_type = other DNA
gatgtttatgccactgcaaaggtactaatttttaagcaaatcacaac

SEQ ID NO: 11829 - DNA, 47 bp, synthetic construct
  misc_feature 1..47: note = Description of Artificial Sequence: Synthetic oligonucleotide
  source 1..47: mol_type = other DNA
gatgtttatgccactgcaaaggtactaatttttcagcaaatcacaac

SEQ ID NO: 11830 - DNA, 47 bp, synthetic construct
  misc_feature 1..47: note = Description of Artificial Sequence: Synthetic oligonucleotide
  source 1..47: mol_type = other DNA
gatgtttatgccactgcaaaggtactaattttttagcaaatcacaac

SEQ ID NO: 11831 - DNA, 47 bp, synthetic construct
  misc_feature 1..47: note = Description of Artificial Sequence: Synthetic oligonucleotide
  source 1..47: mol_type = other DNA
gatgtttatgcctctgcaaagatactaatttttcagcaaatcacaac

SEQ ID NO: 11832 - DNA, 47 bp, synthetic construct
  misc_feature 1..47: note = Description of Artificial Sequence: Synthetic oligonucleotide
  source 1..47: mol_type = other DNA
gatgtttatgcctctgcaaagatactaattttttagcaaatcacaac

SEQ ID NO: 11833 - DNA, 47 bp, synthetic construct
  misc_feature 1..47: note = Description of Artificial Sequence: Synthetic oligonucleotide
  source 1..47: mol_type = other DNA
gatgtttatgctactgcaaagatactaatttttcagcaaatcacaac

SEQ ID NO: 11834 - DNA, 47 bp, synthetic construct
  misc_feature 1..47: note = Description of Artificial Sequence: Synthetic oligonucleotide
  source 1..47: mol_type = other DNA
gatgtttatgcttgtgcaaagatactaattttttagcaaatcacaac

SEQ ID NO: 11835 - DNA, 47 bp, synthetic construct
  misc_feature 1..47: note = Description of Artificial Sequence: Synthetic oligonucleotide
  source 1..47: mol_type = other DNA
gatgtttccactatttcaaagatacgaatttgaaagctaatcacaac

SEQ ID NO: 11836 - DNA, 47 bp, synthetic construct
  misc_feature 1..47: note = Description of Artificial Sequence: Synthetic oligonucleotide
  source 1..47: mol_type = other DNA
gatgtttctgccactgcaaaggtactaattttttagcaaatcacaac

SEQ ID NO: 11837 - DNA, 47 bp, synthetic construct
  misc_feature 1..47: note = Description of Artificial Sequence: Synthetic oligonucleotide
  source 1..47: mol_type = other DNA
gatgtttctgccactgcaaaggtactattttttagcaaatcacaact

SEQ ID NO: 11838 - DNA, 47 bp, synthetic construct
  misc_feature 1..47: note = Description of Artificial Sequence: Synthetic oligonucleotide
  source 1..47: mol_type = other DNA
gatgtttgtcttagcgcaaagataagaattttaaagcaaatcacaac

SEQ ID NO: 11839 - DNA, 47 bp, synthetic construct
  misc_feature 1..47: note = Description of Artificial Sequence: Synthetic oligonucleotide
  source 1..47: mol_type = other DNA
gatgtttgtgatactgcaaaagtacgatttttcaagcaaatcacaac

SEQ ID NO: 11840 - DNA, 47 bp, synthetic construct
  misc_feature 1..47: note = Description of Artificial Sequence: Synthetic oligonucleotide
  source 1..47: mol_type = other DNA
gatgtttgttattatgcaaaggtaagaattttaaagcaaatcacaac

SEQ ID NO: 11841 - DNA, 36 bp, synthetic construct
  misc_feature 1..36: note = Description of Artificial Sequence: Synthetic oligonucleotide
  source 1..36: mol_type = other DNA
gatgtttttgatactaatttgaaagtcattcacaac

SEQ ID NO: 11842 - DNA, 43 bp, synthetic construct
  misc_feature 1..43: note = Description of Artificial Sequence: Synthetic oligonucleotide
  source 1..43: mol_type = other DNA
gattagctttcaaattcagtaccttcgatacagctaatacagc

SEQ ID NO: 11843 - DNA, 36 bp, synthetic construct
  misc_feature 1..36: note = Description of Artificial Sequence: Synthetic oligonucleotide
  source 1..36: mol_type = other DNA
gattagtcactatataagattacatcactctcaaac

SEQ ID NO: 11844 - DNA, 37 bp, synthetic construct
  misc_feature 1..37: note = Description of Artificial Sequence: Synthetic oligonucleotide
  source 1..37: mol_type = other DNA
gattataccaaacaaatgcctgtccgcaatccacaac

SEQ ID NO: 11845 - DNA, 38 bp, synthetic construct
  misc_feature 1..38: note = Description of Artificial Sequence: Synthetic oligonucleotide
  source 1..38: mol_type = other DNA
gattataccacaacgagaaataacagggaaccacaaca

SEQ ID NO: 11846 - DNA, 39 bp, synthetic construct
  misc_feature 1..39: note = Description of Artificial Sequence: Synthetic oligonucleotide
  source 1..39: mol_type = other DNA
gattataccataccagaaaacaaaagggaactataacaa

SEQ ID NO: 11847 - DNA, 36 bp, synthetic construct
  misc_feature 1..36: note = Description of Artificial Sequence: Synthetic oligonucleotide
  source 1..36: mol_type = other DNA
gattatatcagtcggaaaaaggggcgctgagacaac

SEQ ID NO: 11848 - DNA, 37 bp, synthetic construct
  misc_feature 1..37: note = Description of Artificial Sequence: Synthetic oligonucleotide
  source 1..37: mol_type = other DNA
gattcaatggtagcaaaaaagagccaagaactgaaac

SEQ ID NO: 11849 - DNA, 36 bp, synthetic construct
  misc_feature 1..36: note = Description of Artificial Sequence: Synthetic oligonucleotide
  source 1..36: mol_type = other DNA
gattgacatccctcagatttaacaacactctcaaac

SEQ ID NO: 11850 - DNA, 36 bp, synthetic construct
  misc_feature 1..36: note = Description of Artificial Sequence: Synthetic oligonucleotide
  source 1..36: mol_type = other DNA
gattgacatctctcctatttgacaacactctcaaac

SEQ ID NO: 11851 - DNA, 36 bp, synthetic construct
  misc_feature 1..36: note = Description of Artificial Sequence: Synthetic oligonucleotide
  source 1..36: mol_type = other DNA
gattgacttatctcatatttgacaacactctcaaac

SEQ ID NO: 11852 - DNA, 36 bp, synthetic construct
  misc_feature 1..36: note = Description of Artificial Sequence: Synthetic oligonucleotide
  source 1..36: mol_type = other DNA
gattgagacccctaagaaataacactgctctcaaac

SEQ ID NO: 11853 - DNA, 36 bp, synthetic construct
  misc_feature 1..36: note = Description of Artificial Sequence: Synthetic oligonucleotide
  source 1..36: mol_type = other DNA
gattgagctccctcgtatttgacaacactctcaaac

SEQ ID NO: 11854 - DNA, 28 bp, synthetic construct
  misc_feature 1..28: note = Description of Artificial Sequence: Synthetic oligonucleotide
  source 1..28: mol_type = other DNA
gattgcacgcaggcagaggtcggttata

SEQ ID NO: 11855 - DNA, 24 bp, synthetic construct
  misc_feature 1..24: note = Description of Artificial Sequence: Synthetic oligonucleotide
  source 1..24: mol_type = other DNA
gattgtaacactacgagataagag

SEQ ID NO: 11856 - DNA, 38 bp, synthetic construct
  misc_feature 1..38: note = Description of Artificial Sequence: Synthetic oligonucleotide
  source 1..38: mol_type = other DNA
gattgtagcactgtaagggatttcaaggaagctacaac

SEQ ID NO: 11857 - DNA, 37 bp, synthetic construct
  misc_feature 1..37: note = Description of Artificial Sequence: Synthetic oligonucleotide
  source 1..37: mol_type = other DNA
gattgtagccatccggggtgagagagggagctacaac

SEQ ID NO: 11858 - DNA, 37 bp, synthetic construct
  misc_feature 1..37: note = Description of Artificial Sequence: Synthetic oligonucleotide
  source 1..37: mol_type = other DNA
gattgtagccttccggggtgagagagggagctacaac

SEQ ID NO: 11859 - DNA, 37 bp, synthetic construct
  misc_feature 1..37: note = Description of Artificial Sequence: Synthetic oligonucleotide
  source 1..37: mol_type = other DNA
gattgtagctatccggggtgagagagggagctacaac

SEQ ID NO: 11860 - DNA, 37 bp, synthetic construct
  misc_feature 1..37: note = Description of Artificial Sequence: Synthetic oligonucleotide
  source 1..37: mol_type = other DNA
gattgtagctatccggggtgagagagggagctacgtc

SEQ ID NO: 11861 - DNA, 37 bp, synthetic construct
  misc_feature 1..37: note = Description of Artificial Sequence: Synthetic oligonucleotide
  source 1..37: mol_type = other DNA
gattgtagctttccggggtgagagagggagctacaac

SEQ ID NO: 11862 - DNA, 30 bp, synthetic construct
  misc_feature 1..30: note = Description of Artificial Sequence: Synthetic oligonucleotide
  source 1..30: mol_type = other DNA
gattgtatcaactggggagttgagcgggcg

SEQ ID NO: 11863 - DNA, 36 bp, synthetic construct
  misc_feature 1..36: note = Description of Artificial Sequence: Synthetic oligonucleotide
  source 1..36: mol_type = other DNA
gatttagacctctacagaattacactactctcaaac

SEQ ID NO: 11864 - DNA, 36 bp, synthetic construct
  misc_feature 1..36: note = Description of Artificial Sequence: Synthetic oligonucleotide
  source 1..36: mol_type = other DNA
gatttagcagtccgagcagcgcgggccaaccgcaac

SEQ ID NO: 11865 - DNA, 37 bp, synthetic construct
  misc_feature 1..37: note = Description of Artificial Sequence: Synthetic oligonucleotide
  source 1..37: mol_type = other DNA
gcaacactctacaacaaaaccgcttagctaatgaaac

SEQ ID NO: 11866 - DNA, 24 bp, synthetic construct
  misc_feature 1..24: note = Description of Artificial Sequence: Synthetic oligonucleotide
  source 1..24: mol_type = other DNA
gcaacactttatagcaaaaccgct

SEQ ID NO: 11867 - DNA, 36 bp, synthetic construct
  misc_feature 1..36: note = Description of Artificial Sequence: Synthetic oligonucleotide
  source 1..36: mol_type = other DNA
gcagtggtttgccgggaagcgtcgctcggatacact

SEQ ID NO: 11868 - DNA, 35 bp, synthetic construct
  misc_feature 1..35: note = Description of Artificial Sequence: Synthetic oligonucleotide
  source 1..35: mol_type = other DNA
gcatagcatcaccgtgtcggatgggaagctatggc

SEQ ID NO: 11869 - DNA, 36 bp, synthetic construct
  misc_feature 1..36: note = Description of Artificial Sequence: Synthetic oligonucleotide
  source 1..36: mol_type = other DNA
gcatccgaggcgttcgcgcctcggcctcattgaagc

SEQ ID NO: 11870 - DNA, 40 bp, synthetic construct
  misc_feature 1..40: note = Description of Artificial Sequence: Synthetic oligonucleotide
  source 1..40: mol_type = other DNA
gccaagtgcaaagatagtaaaactgaaagcaaatcacaac

SEQ ID NO: 11871 - DNA, 30 bp, synthetic construct
  misc_feature 1..30: note = Description of Artificial Sequence: Synthetic oligonucleotide
  source 1..30: mol_type = other DNA
gccagtgcgcatatctcaatgatttaaaat

SEQ ID NO: 11872 - DNA, 36 bp, synthetic construct
  misc_feature 1..36: note = Description of Artificial Sequence: Synthetic oligonucleotide
  source 1..36: mol_type = other DNA
gccataattcccctatgaactttgatgtgatatgat

SEQ ID NO: 11873 - DNA, 36 bp, synthetic construct
  misc_feature 1..36: note = Description of Artificial Sequence: Synthetic oligonucleotide
  source 1..36: mol_type = other DNA
gccataattcccctgtaaatcttgatgtgatatgat

SEQ ID NO: 11874 - DNA, 36 bp, synthetic construct
  misc_feature 1..36: note = Description of Artificial Sequence: Synthetic oligonucleotide
  source 1..36: mol_type = other DNA
gccctagcgcgttgccattccacaagctgctacaat

SEQ ID NO: 11875 - DNA, 36 bp, synthetic construct
  misc_feature 1..36: note = Description of Artificial Sequence: Synthetic oligonucleotide
  source 1..36: mol_type = other DNA
gccctagcggagtgccgttcattcagatgctagaat

SEQ ID NO: 11876 - DNA, 36 bp, synthetic construct
  misc_feature 1..36: note = Description of Artificial Sequence: Synthetic oligonucleotide
  source 1..36: mol_type = other DNA
gccctagcggagtgctattccttgaggtgctagaat

SEQ ID NO: 11877 - DNA, 36 bp, synthetic construct
  misc_feature 1..36: note = Description of Artificial Sequence: Synthetic oligonucleotide
  source 1..36: mol_type = other DNA
gccctagtgcgttgcaattcaatcagctgttataat

SEQ ID NO: 11878 - DNA, 36 bp, synthetic construct
  misc_feature 1..36: note = Description of Artificial Sequence: Synthetic oligonucleotide
  source 1..36: mol_type = other DNA
gccgtggcttccctaccgacttccctatggtaggct

SEQ ID NO: 11879 - DNA, 36 bp, synthetic construct
  misc_feature 1..36: note = Description of Artificial Sequence: Synthetic oligonucleotide
  source 1..36: mol_type = other DNA
gccgtggcttccctaccgatttccccgtcgtaggct

SEQ ID NO: 11880 - DNA, 36 bp, synthetic construct
  misc_feature 1..36: note = Description of Artificial Sequence: Synthetic oligonucleotide
  source 1..36: mol_type = other DNA
gccgtggcttccctaccgatttccccgtggtaggct

SEQ ID NO: 11881 - DNA, 36 bp, synthetic construct
  misc_feature 1..36: note = Description of Artificial Sequence: Synthetic oligonucleotide
  source 1..36: mol_type = other DNA
gccgtggcttccctaccgatttccctgtggtaggct

SEQ ID NO: 11882 - DNA, 36 bp, synthetic construct
  misc_feature 1..36: note = Description of Artificial Sequence: Synthetic oligonucleotide
  source 1..36: mol_type = other DNA
gccgtggcttccctagcgatttccctgtggtaggct

SEQ ID NO: 11883 - DNA, 36 bp, synthetic construct
  misc_feature 1..36: note = Description of Artificial Sequence: Synthetic oligonucleotide
  source 1..36: mol_type = other DNA
gccgtggcttgatcccaaattctaatgtgttaaggt

SEQ ID NO: 11884 - DNA, 36 bp, synthetic construct
  misc_feature 1..36: note = Description of Artificial Sequence: Synthetic oligonucleotide
  source 1..36: mol_type = other DNA
gccgtggtctcgcgggaagggccgctcaagtacact

SEQ ID NO: 11885 - DNA, 36 bp, synthetic construct
  misc_feature 1..36: note = Description of Artificial Sequence: Synthetic oligonucleotide
  source 1..36: mol_type = other DNA
gccgtggttgacctcctgatttcaagtcgctataat

SEQ ID NO: 11886 - DNA, 36 bp, synthetic construct
  misc_feature 1..36: note = Description of Artificial Sequence: Synthetic oligonucleotide
  source 1..36: mol_type = other DNA
gccgtggtttcccctcggctttccccctgctaagct

SEQ ID NO: 11887 - DNA, 36 bp, synthetic construct
  misc_feature 1..36: note = Description of Artificial Sequence: Synthetic oligonucleotide
  source 1..36: mol_type = other DNA
gccgtggtttccctaccgactcccaagaggtaggct

SEQ ID NO: 11888 - DNA, 36 bp, synthetic construct
  misc_feature 1..36: note = Description of Artificial Sequence: Synthetic oligonucleotide
  source 1..36: mol_type = other DNA
gccgtggtttccctaccgactcccaattggtaggct

SEQ ID NO: 11889 - DNA, 36 bp, synthetic construct
  misc_feature 1..36: note = Description of Artificial Sequence: Synthetic oligonucleotide
  source 1..36: mol_type = other DNA
gccgtggtttccctaccgactcccacttggtaggct

SEQ ID NO: 11890 - DNA, 36 bp, synthetic construct
  misc_feature 1..36: note = Description of Artificial Sequence: Synthetic oligonucleotide
  source 1..36: mol_type = other DNA
gccgtggtttccctaccgactcccatcgagtaggct

SEQ ID NO: 11891 - DNA, 36 bp, synthetic construct
  misc_feature 1..36: note = Description of Artificial Sequence: Synthetic oligonucleotide
  source 1..36: mol_type = other DNA
gccgtggtttccctaccgactcccatcgcgtaggct

SEQ ID NO: 11892 - DNA, 36 bp, synthetic construct
  misc_feature 1..36: note = Description of Artificial Sequence: Synthetic oligonucleotide
  source 1..36: mol_type = other DNA
gccgtggtttccctaccgactcccatcgggtaggct

SEQ ID NO: 11893 - DNA, 36 bp, synthetic construct
  misc_feature 1..36: note = Description of Artificial Sequence: Synthetic oligonucleotide
  source 1..36: mol_type = other DNA
gccgtggtttccctaccgactcccccttggtaggct

SEQ ID NO: 11894 - DNA, 36 bp, synthetic construct
  misc_feature 1..36: note = Description of Artificial Sequence: Synthetic oligonucleotide
  source 1..36: mol_type = other DNA
gccgtggtttccctaccgacttcccactggtaggct

SEQ ID NO: 11895 - DNA, 37 bp, synthetic construct
  misc_feature 1..37: note = Description of Artificial Sequence: Synthetic oligonucleotide
  source 1..37: mol_type = other DNA
gccgtggtttccctaccgacttcccattggtagagtg

SEQ ID NO: 11896 - DNA, 36 bp, synthetic construct
  misc_feature 1..36: note = Description of Artificial Sequence: Synthetic oligonucleotide
  source 1..36: mol_type = other DNA
gccgtggtttccctaccgacttcccattggtaggct

SEQ ID NO: 11897 - DNA, 36 bp, synthetic construct
  misc_feature 1..36: note = Description of Artificial Sequence: Synthetic oligonucleotide
  source 1..36: mol_type = other DNA
gccgtggtttccctaccgacttcccgatggtaggct

SEQ ID NO: 11898 - DNA, 36 bp, synthetic construct
  misc_feature 1..36: note = Description of Artificial Sequence: Synthetic oligonucleotide
  source 1..36: mol_type = other DNA
gccgtggtttccctaccgatttccccatggtaggct

SEQ ID NO: 11899 - DNA, 36 bp, synthetic construct
  misc_feature 1..36: note = Description of Artificial Sequence: Synthetic oligonucleotide
  source 1..36: mol_type = other DNA
gccgtggtttccctaccgatttcccggtggtaggct

SEQ ID NO: 11900 - DNA, 36 bp, synthetic construct
  misc_feature 1..36: note = Description of Artificial Sequence: Synthetic oligonucleotide
  source 1..36: mol_type = other DNA
gccgtggtttccctaccgatttccctgaggtaggct

SEQ ID NO: 11901 - DNA, 36 bp, synthetic construct
  misc_feature 1..36: note = Description of Artificial Sequence: Synthetic oligonucleotide
  source 1..36: mol_type = other DNA
gccgtggtttccctaccgatttccttatggtagaat

SEQ ID NO: 11902 - DNA, 36 bp, synthetic construct
  misc_feature 1..36: note = Description of Artificial Sequence: Synthetic oligonucleotide
  source 1..36: mol_type = other DNA
gccgtggtttccctaccgatttgcccatggtaggac

SEQ ID NO: 11903 - DNA, 36 bp, synthetic construct
  misc_feature 1..36: note = Description of Artificial Sequence: Synthetic oligonucleotide
  source 1..36: mol_type = other DNA
gccgtggtttccctaccgatttgcccatggtaggat

SEQ ID NO: 11904 - DNA, 36 bp, synthetic construct
  misc_feature 1..36: note = Description of Artificial Sequence: Synthetic oligonucleotide
  source 1..36: mol_type = other DNA
gccgtggtttccctaccgatttgcccgtggtaggac

SEQ ID NO: 11905 - DNA, 36 bp, synthetic construct
  misc_feature 1..36: note = Description of Artificial Sequence: Synthetic oligonucleotide
  source 1..36: mol_type = other DNA
gccgtggtttccctaccgattttcctgtggtaggct

SEQ ID NO: 11906 - DNA, 36 bp, synthetic construct
  misc_feature 1..36: note = Description of Artificial Sequence: Synthetic oligonucleotide
  source 1..36: mol_type = other DNA
gccgtggtttccctacggacttcccccctgtaggct

SEQ ID NO: 11907 - DNA, 36 bp, synthetic construct
  misc_feature 1..36: note = Description of Artificial Sequence: Synthetic oligonucleotide
  source 1..36: mol_type = other DNA
gccgtggtttccctgccgacttcccagtggtaggct

SEQ ID NO: 11908 - DNA, 36 bp, synthetic construct
  misc_feature 1..36: note = Description of Artificial Sequence: Synthetic oligonucleotide
  source 1..36: mol_type = other DNA
gccgtggtttccctgccgatttccctcaggtagact

SEQ ID NO: 11909 - DNA, 36 bp, synthetic construct
  misc_feature 1..36: note = Description of Artificial Sequence: Synthetic oligonucleotide
  source 1..36: mol_type = other DNA
gccgtggtttccttaccgacttcgcagtggtaagct

SEQ ID NO: 11910 - DNA, 36 bp, synthetic construct
  misc_feature 1..36: note = Description of Artificial Sequence: Synthetic oligonucleotide
  source 1..36: mol_type = other DNA
gcctagatcccctctgaaacagcactactcctagac

SEQ ID NO: 11911 - DNA, 37 bp, synthetic construct
  misc_feature 1..37: note = Description of Artificial Sequence: Synthetic oligonucleotide
  source 1..37: mol_type = other DNA
gcctcaccagtataaccgattaccgcgcaattgaaac

SEQ ID NO: 11912 - DNA, 46 bp, synthetic construct
  misc_feature 1..46: note = Description of Artificial Sequence: Synthetic oligonucleotide
  source 1..46: mol_type = other DNA
gcctgtgaattatcgataaaaataccaaattgaaagcaattcacaa

SEQ ID NO: 11913 - DNA, 31 bp, synthetic construct
  misc_feature 1..31: note = Description of Artificial Sequence: Synthetic oligonucleotide
  source 1..31: mol_type = other DNA
gccttgattccaaaatctctgacggcaaaat

SEQ ID NO: 11914 - DNA, 37 bp, synthetic construct
  misc_feature 1..37: note = Description of Artificial Sequence: Synthetic oligonucleotide
  source 1..37: mol_type = other DNA
gcgaagatcataatgctacgagctatagcactgaaac

SEQ ID NO: 11915 - DNA, 37 bp, synthetic construct
  misc_feature 1..37: note = Description of Artificial Sequence: Synthetic oligonucleotide
  source 1..37: mol_type = other DNA
gcgacacatcataacctagtaagccagcgactgaaac

SEQ ID NO: 11916 - DNA, 27 bp, synthetic construct
  misc_feature 1..27: note = Description of Artificial Sequence: Synthetic oligonucleotide
  source 1..27: mol_type = other DNA
gcggctggcgcacgatttcctatcggc

SEQ ID NO: 11917 - DNA, 33 bp, synthetic construct
  misc_feature 1..33: note = Description of Artificial Sequence: Synthetic oligonucleotide
  source 1..33: mol_type = other DNA
gcgggttgcgcccaaattcgaatgatctaagct

SEQ ID NO: 11918 - DNA, 28 bp, synthetic construct
  misc_feature 1..28: note = Description of Artificial Sequence: Synthetic oligonucleotide
  source 1..28: mol_type = other DNA
gcgggttgcgctcaaagtcggatgatct

SEQ ID NO: 11919 - DNA, 37 bp, synthetic construct
  misc_feature 1..37: note = Description of Artificial Sequence: Synthetic oligonucleotide
  source 1..37: mol_type = other DNA
gctacagattctatcccaagaaacccgcaactgaaac

SEQ ID NO: 11920 - DNA, 36 bp, synthetic construct
  misc_feature 1..36: note = Description of Artificial Sequence: Synthetic oligonucleotide
  source 1..36: mol_type = other DNA
gctacggattgcgcccgtctctcgatttgctactct

SEQ ID NO: 11921 - DNA, 47 bp, synthetic construct
  misc_feature 1..47: note = Description of Artificial Sequence: Synthetic oligonucleotide
  source 1..47: mol_type = other DNA
gctagaaaaccctatttcaaagatacatactgaaagcaattcacaac

SEQ ID NO: 11922 - DNA, 36 bp, synthetic construct
  misc_feature 1..36: note = Description of Artificial Sequence: Synthetic oligonucleotide
  source 1..36: mol_type = other DNA
gctagggatggccgggattcaccgctcaagtacact

SEQ ID NO: 11923 - DNA, 36 bp, synthetic construct
  misc_feature 1..36: note = Description of Artificial Sequence: Synthetic oligonucleotide
  source 1..36: mol_type = other DNA
gctagggtttgccgggaaccgctcctgagatacact

SEQ ID NO: 11924 - DNA, 42 bp, synthetic construct
  misc_feature 1..42: note = Description of Artificial Sequence: Synthetic oligonucleotide
  source 1..42: mol_type = other DNA
gctataaatcaatatgtcaaagatacaaaatgtaagcaaatc

SEQ ID NO: 11925 - DNA, 36 bp, synthetic construct
  misc_feature 1..36: note = Description of Artificial Sequence: Synthetic oligonucleotide
  source 1..36: mol_type = other DNA
gctatagttgcctgtccaaatcgaccctgctagaat

SEQ ID NO: 11926 - DNA, 36 bp, synthetic construct
  misc_feature 1..36: note = Description of Artificial Sequence: Synthetic oligonucleotide
  source 1..36: mol_type = other DNA
gctatagtttccttacaaaatcggctaaactaaaat

SEQ ID NO: 11927 - DNA, 36 bp, synthetic construct
  misc_feature 1..36: note = Description of Artificial Sequence: Synthetic oligonucleotide
  source 1..36: mol_type = other DNA
gctatagtttcctttcgaaagattatattgtataat

SEQ ID NO: 11928 - DNA, 36 bp, synthetic construct
  misc_feature 1..36: note = Description of Artificial Sequence: Synthetic oligonucleotide
  source 1..36: mol_type = other DNA
gctatatgcctgatctaatgctttctactgtataat

SEQ ID NO: 11929 - DNA, 47 bp, synthetic construct
  misc_feature 1..47: note = Description of Artificial Sequence: Synthetic oligonucleotide
  source 1..47: mol_type = other DNA
gctatctctaataccttcaaagatacataatgtaatcaaatcacaac

SEQ ID NO: 11930 - DNA, 47 bp, synthetic construct
  misc_feature 1..47: note = Description of Artificial Sequence: Synthetic oligonucleotide
  source 1..47: mol_type = other DNA
gctatgatgtatccacaaagttaaagaatttgaaagcaactcacaac

SEQ ID NO: 11931 - DNA, 36 bp, synthetic construct
  misc_feature 1..36: note = Description of Artificial Sequence: Synthetic oligonucleotide
  source 1..36: mol_type = other DNA
gctatggcctgccgagaatcacggcttcgatacact

SEQ ID NO: 11932 - DNA, 36 bp, synthetic construct
  misc_feature 1..36: note = Description of Artificial Sequence: Synthetic oligonucleotide
  source 1..36: mol_type = other DNA
gctatggcctgccgagagttccggcttcgatatact

SEQ ID NO: 11933 - DNA, 36 bp, synthetic construct
  misc_feature 1..36: note = Description of Artificial Sequence: Synthetic oligonucleotide
  source 1..36: mol_type = other DNA
gctatggtttgccgggaaccgcttctgagatacact

SEQ ID NO: 11934 - DNA, 36 bp, synthetic construct
  misc_feature 1..36: note = Description of Artificial Sequence: Synthetic oligonucleotide
  source 1..36: mol_type = other DNA
gctatggtttgccgggaatcgccgctgaggtacact

SEQ ID NO: 11935 - DNA, 36 bp, synthetic construct
  misc_feature 1..36: note = Description of Artificial Sequence: Synthetic oligonucleotide
  source 1..36: mol_type = other DNA
gctatggtttgccgggaatcgcggctgagatacact

SEQ ID NO: 11936 - DNA, 30 bp, synthetic construct
  misc_feature 1..30: note = Description of Artificial Sequence: Synthetic oligonucleotide
  source 1..30: mol_type = other DNA
gctccctctctcaccccggatagctacact

SEQ ID NO: 11937 - DNA, 36 bp, synthetic construct
  misc_feature 1..36: note = Description of Artificial Sequence: Synthetic oligonucleotide
  source 1..36: mol_type = other DNA
gctctggttgaactacaaaatcccaactgttagaat

SEQ ID NO: 11938 - DNA, 36 bp, synthetic construct
  misc_feature 1..36: note = Description of Artificial Sequence: Synthetic oligonucleotide
  source 1..36: mol_type = other DNA
gctcttgaactgattgattcgacatctacctgagac

SEQ ID NO: 11939 - DNA, 36 bp, synthetic construct
  misc_feature 1..36: note = Description of Artificial Sequence: Synthetic oligonucleotide
  source 1..36: mol_type = other DNA
gctcttgaactgattgattcgacatctacctgagat

SEQ ID NO: 11940 - DNA, 36 bp, synthetic construct
  misc_feature 1..36: note = Description of Artificial Sequence: Synthetic oligonucleotide
  source 1..36: mol_type = other DNA
gctgaaccacaaatccaaaacgcatcaaatcacaac

SEQ ID NO: 11941 - DNA, 47 bp, synthetic construct
  misc_feature 1..47: note = Description of Artificial Sequence: Synthetic oligonucleotide
  source 1..47: mol_type = other DNA
gctgagagaagctttaaaaattgtattacctttacgtcctaaacagc

SEQ ID NO: 11942 - DNA, 35 bp, synthetic construct
  misc_feature 1..35: note = Description of Artificial Sequence: Synthetic oligonucleotide
  source 1..35: mol_type = other DNA
gctgataaatatcaaaggtagttcaaagaacgaaa

SEQ ID NO: 11943 - DNA, 47 bp, synthetic construct
  misc_feature 1..47: note = Description of Artificial Sequence: Synthetic oligonucleotide
  source 1..47: mol_type = other DNA
gctgattatcaataggtcaaagatacaattcgaaaccaattcacaac

SEQ ID NO: 11944 - DNA, 46 bp, synthetic construct
  misc_feature 1..46: note = Description of Artificial Sequence: Synthetic oligonucleotide
  source 1..46: mol_type = other DNA
gctgatttcaatatttcaaagatacaatttgaaagcaattcacaac

SEQ ID NO: 11945 - DNA, 47 bp, synthetic construct
  misc_feature 1..47: note = Description of Artificial Sequence: Synthetic oligonucleotide
  source 1..47: mol_type = other DNA
gctgcaaacgcttttgcaaagttatcaaaatgttagcaattcacaac

SEQ ID NO: 11946 - DNA, 46 bp, synthetic construct
  misc_feature 1..46: note = Description of Artificial Sequence: Synthetic oligonucleotide
  source 1..46: mol_type = other DNA
gctgcaattgccggactaaaaatacaaaatgtaatcaattcacaac

SEQ ID NO: 11947 - DNA, 36 bp, synthetic construct
  misc_feature 1..36: note = Description of Artificial Sequence: Synthetic oligonucleotide
  source 1..36: mol_type = other DNA
gctgcggattgaccgcaggcagtgatcaattaccat

SEQ ID NO: 11948 - DNA, 36 bp, synthetic construct
  misc_feature 1..36: note = Description of Artificial Sequence: Synthetic oligonucleotide
  source 1..36: mol_type = other DNA
gctgcggattgactgcaagcagtgatcaattaccat

SEQ ID NO: 11949 - DNA, 36 bp, synthetic construct
  misc_feature 1..36: note = Description of Artificial Sequence: Synthetic oligonucleotide
  source 1..36: mol_type = other DNA
gctgcggattgcagccccttttcgttctgctagaac

SEQ ID NO: 11950 - DNA, 36 bp, synthetic construct
  misc_feature 1..36: note = Description of Artificial Sequence: Synthetic oligonucleotide
  source 1..36: mol_type = other DNA
gctgcggattgcagccctctctcgttctgctaaaac

SEQ ID NO: 11951 - DNA, 36 bp, synthetic construct
  misc_feature 1..36: note = Description of Artificial Sequence: Synthetic oligonucleotide
  source 1..36: mol_type = other DNA
gctgcggattgcagccctttctcgttctgctagaac

SEQ ID NO: 11952 - DNA, 36 bp, synthetic construct
  misc_feature 1..36: note = Description of Artificial Sequence: Synthetic oligonucleotide
  source 1..36: mol_type = other DNA
gctgcggattgcagccctttctcgttctgctagaat

SEQ ID NO: 11953 - DNA, 36 bp, synthetic construct
  misc_feature 1..36: note = Description of Artificial Sequence: Synthetic oligonucleotide
  source 1..36: mol_type = other DNA
gctgcggattgcgatcgtctctcgtcttgctacaat

SEQ ID NO: 11954 - DNA, 36 bp, synthetic construct
  misc_feature 1..36: note = Description of Artificial Sequence: Synthetic oligonucleotide
  source 1..36: mol_type = other DNA
gctgcggattgcgccggcccttcgtcttgctacagt

SEQ ID NO: 11955 - DNA, 36 bp, synthetic construct
  misc_feature 1..36: note = Description of Artificial Sequence: Synthetic oligonucleotide
  source 1..36: mol_type = other DNA
gctgcggattgcggccgtctctcgatttgctactct

SEQ ID NO: 11956 - DNA, 36 bp, synthetic construct
  misc_feature 1..36: note = Description of Artificial Sequence: Synthetic oligonucleotide
  source 1..36: mol_type = other DNA
gctgcggattgcggccgtctctcgttttgctacgct

SEQ ID NO: 11957 - DNA, 36 bp, synthetic construct
  misc_feature 1..36: note = Description of Artificial Sequence: Synthetic oligonucleotide
  source 1..36: mol_type = other DNA
gctgcggattgcggccgtctctcgttttgctactct

SEQ ID NO: 11958 - DNA, 36 bp, synthetic construct
  misc_feature 1..36: note = Description of Artificial Sequence: Synthetic oligonucleotide
  source 1..36: mol_type = other DNA
gctgcggctggaccacgatttctgaaatgctactct

SEQ ID NO: 11959 - DNA, 36 bp, synthetic construct
  misc_feature 1..36: note = Description of Artificial Sequence: Synthetic oligonucleotide
  source 1..36: mol_type = other DNA
gctgcggctggaccacgatttctgaagtgctactct

SEQ ID NO: 11960 - DNA, 36 bp, synthetic construct
  misc_feature 1..36: note = Description of Artificial Sequence: Synthetic oligonucleotide
  source 1..36: mol_type = other DNA
gctgcggcttgaccgcattttctgattagctatact

SEQ ID NO: 11961 - DNA, 36 bp, synthetic construct
  misc_feature 1..36: note = Description of Artificial Sequence: Synthetic oligonucleotide
  source 1..36: mol_type = other DNA
gctgcggcttgcgatcgcctctcgtcttgttaccct

SEQ ID NO: 11962 - DNA, 36 bp, synthetic construct
  misc_feature 1..36: note = Description of Artificial Sequence: Synthetic oligonucleotide
  source 1..36: mol_type = other DNA
gctgcggcttgcggtcgcccctcgttttgctacaac

SEQ ID NO: 11963 - DNA, 36 bp, synthetic construct
  misc_feature 1..36: note = Description of Artificial Sequence: Synthetic oligonucleotide
  source 1..36: mol_type = other DNA
gctgcggcttgcggtcgctcctcgttttgctacaac

SEQ ID NO: 11964 - DNA, 36 bp, synthetic construct
  misc_feature 1..36: note = Description of Artificial Sequence: Synthetic oligonucleotide
  source 1..36: mol_type = other DNA
gctgcggtctgcggtcgttcctaggtctgctacaat

SEQ ID NO: 11965 - DNA, 36 bp, synthetic construct
  misc_feature 1..36: note = Description of Artificial Sequence: Synthetic oligonucleotide
  source 1..36: mol_type = other DNA
gctgcggttcgcggccaatctcggatttgctagagt

SEQ ID NO: 11966 - DNA, 36 bp, synthetic construct
  misc_feature 1..36: note = Description of Artificial Sequence: Synthetic oligonucleotide
  source 1..36: mol_type = other DNA
gctgcggttggaccacgatctcgtgaatgctatgac

SEQ ID NO: 11967 - DNA, 36 bp, synthetic construct
  misc_feature 1..36: note = Description of Artificial Sequence: Synthetic oligonucleotide
  source 1..36: mol_type = other DNA
gctgcggtttgcggtcgttcgtcggttcgctacact

SEQ ID NO: 11968 - DNA, 36 bp, synthetic construct
  misc_feature 1..36: note = Description of Artificial Sequence: Synthetic oligonucleotide
  source 1..36: mol_type = other DNA
gctgcggtttgcggtcgttcgtcggttcgctacatt

SEQ ID NO: 11969 - DNA, 36 bp, synthetic construct
  misc_feature 1..36: note = Description of Artificial Sequence: Synthetic oligonucleotide
  source 1..36: mol_type = other DNA
gctgcggtttgcggtgattccgggatttgctacact

SEQ ID NO: 11970 - DNA, 47 bp, synthetic construct
  misc_feature 1..47: note = Description of Artificial Sequence: Synthetic oligonucleotide
  source 1..47: mol_type = other DNA
gctggacgccaagatattcagtcaaagaactgaaagcaaatcacaac

SEQ ID NO: 11971 - DNA, 46 bp, synthetic construct
  misc_feature 1..46: note = Description of Artificial Sequence: Synthetic oligonucleotide
  source 1..46: mol_type = other DNA
gctggacttaaaatatcaattcaaagaactgaaagcaaactacaac

SEQ ID NO: 11972 - DNA, 36 bp, synthetic construct
  misc_feature 1..36: note = Description of Artificial Sequence: Synthetic oligonucleotide
  source 1..36: mol_type = other DNA
gctggagctcgtcggcaaccaccgctcaggtacaac

SEQ ID NO: 11973 - DNA, 36 bp, synthetic construct
  misc_feature 1..36: note = Description of Artificial Sequence: Synthetic oligonucleotide
  source 1..36: mol_type = other DNA
gctggagcttgtagagaatcccgatttcagtacagt

SEQ ID NO: 11974 - DNA, 36 bp, synthetic construct
  misc_feature 1..36: note = Description of Artificial Sequence: Synthetic oligonucleotide
  source 1..36: mol_type = other DNA
gctgggaatcaatcaccaatcccctttgatacactt

SEQ ID NO: 11975 - DNA, 35 bp, synthetic construct
  misc_feature 1..35: note = Description of Artificial Sequence: Synthetic oligonucleotide
  source 1..35: mol_type = other DNA
gctgggaatcaatcaccaatcccctttgatatact

SEQ ID NO: 11976 - DNA, 36 bp, synthetic construct
  misc_feature 1..36: note = Description of Artificial Sequence: Synthetic oligonucleotide
  source 1..36: mol_type = other DNA
gctgggaatcaatcaccaatcccctttgatatactg

SEQ ID NO: 11977 - DNA, 36 bp, synthetic construct
  misc_feature 1..36: note = Description of Artificial Sequence: Synthetic oligonucleotide
  source 1..36: mol_type = other DNA
gctgggaatcaatcacccatcccctttgatacactt

SEQ ID NO: 11978 - DNA, 36 bp, synthetic construct
  misc_feature 1..36: note = Description of Artificial Sequence: Synthetic oligonucleotide
  source 1..36: mol_type = other DNA
gctgggaatcaatcacctctcccccctgatatactt

SEQ ID NO: 11979 - DNA, 36 bp, synthetic construct
  misc_feature 1..36: note = Description of Artificial Sequence: Synthetic oligonucleotide
  source 1..36: mol_type = other DNA
gctgggaatcaatcatccatcccctttgatatactg

SEQ ID NO: 11980 - DNA, 36 bp, synthetic construct
  misc_feature 1..36: note = Description of Artificial Sequence: Synthetic oligonucleotide
  source 1..36: mol_type = other DNA
gctgggaatcagtcaccagaccccttgatagacttc

SEQ ID NO: 11981 - DNA, 36 bp, synthetic construct
  misc_feature 1..36: note = Description of Artificial Sequence: Synthetic oligonucleotide
  source 1..36: mol_type = other DNA
gctgggaatcagtcctcagtccccctggtagactcc

SEQ ID NO: 11982 - DNA, 36 bp, synthetic construct
  misc_feature 1..36: note = Description of Artificial Sequence: Synthetic oligonucleotide
  source 1..36: mol_type = other DNA
gctgggaatcagtcttcaatccccctggtaggcttc

SEQ ID NO: 11983 - DNA, 36 bp, synthetic construct
  misc_feature 1..36: note = Description of Artificial Sequence: Synthetic oligonucleotide
  source 1..36: mol_type = other DNA
gctgggaatcagttcacgatccccttggcagacttc

SEQ ID NO: 11984 - DNA, 36 bp, synthetic construct
  misc_feature 1..36: note = Description of Artificial Sequence: Synthetic oligonucleotide
  source 1..36: mol_type = other DNA
gctgggaatcagttcacgatcttcccgataggcttc

SEQ ID NO: 11985 - DNA, 36 bp, synthetic construct
  misc_feature 1..36: note = Description of Artificial Sequence: Synthetic oligonucleotide
  source 1..36: mol_type = other DNA
gctgggaatcagttcacttcccctctgctagacttg

SEQ ID NO: 11986 - DNA, 36 bp, synthetic construct
  misc_feature 1..36: note = Description of Artificial Sequence: Synthetic oligonucleotide
  source 1..36: mol_type = other DNA
gctgggaatcagttctcaattcccccagtagacttg

SEQ ID NO: 11987 - DNA, 36 bp, synthetic construct
  misc_feature 1..36: note = Description of Artificial Sequence: Synthetic oligonucleotide
  source 1..36: mol_type = other DNA
gctgggaattagcattcacccttcttgataagcttg

SEQ ID NO: 11988 - DNA, 36 bp, synthetic construct
  misc_feature 1..36: note = Description of Artificial Sequence: Synthetic oligonucleotide
  source 1..36: mol_type = other DNA
gctgggacttgacgtaaaccgccgcttgagtacatt

SEQ ID NO: 11989 - DNA, 36 bp, synthetic construct
  misc_feature 1..36: note = Description of Artificial Sequence: Synthetic oligonucleotide
  source 1..36: mol_type = other DNA
gctgggattcaatcgtgattcccctttgatacactt

SEQ ID NO: 11990 - DNA, 36 bp, synthetic construct
  misc_feature 1..36: note = Description of Artificial Sequence: Synthetic oligonucleotide
  source 1..36: mol_type = other DNA
gctgggattcagtcaccagaccccttgatagacttc

SEQ ID NO: 11991 - DNA, 36 bp, synthetic construct
  misc_feature 1..36: note = Description of Artificial Sequence: Synthetic oligonucleotide
  source 1..36: mol_type = other DNA
gctgggattcagtcacctatccccttgatatacttg

SEQ ID NO: 11992 - DNA, 37 bp, synthetic construct
  misc_feature 1..37: note = Description of Artificial Sequence: Synthetic oligonucleotide
  source 1..37: mol_type = other DNA
gctgggattcagttcttatttacccctgatatgcttg

SEQ ID NO: 11993 - DNA, 36 bp, synthetic construct
  misc_feature 1..36: note = Description of Artificial Sequence: Synthetic oligonucleotide
  source 1..36: mol_type = other DNA
gctggggatcaactctcaaaccccctggtagacttc

SEQ ID NO: 11994 - DNA, 36 bp, synthetic construct
  misc_feature 1..36: note = Description of Artificial Sequence: Synthetic oligonucleotide
  source 1..36: mol_type = other DNA
gctggggatcaattctcgttttccctgatatacttg

SEQ ID NO: 11995 - DNA, 36 bp, synthetic construct
  misc_feature 1..36: note = Description of Artificial Sequence: Synthetic oligonucleotide
  source 1..36: mol_type = other DNA
gctggggatcagttcacatttcccctgatagactcc

SEQ ID NO: 11996 - DNA, 36 bp, synthetic construct
  misc_feature 1..36: note = Description of Artificial Sequence: Synthetic oligonucleotide
  source 1..36: mol_type = other DNA
gctggggatggccaagaatcaccgctcatgtacact

SEQ ID NO: 11997 - DNA, 36 bp, synthetic construct
  misc_feature 1..36: note = Description of Artificial Sequence: Synthetic oligonucleotide
  source 1..36: mol_type = other DNA
gctggggatggccaggaatcaccgctcacgtacact

SEQ ID NO: 11998 - DNA, 36 bp, synthetic construct
  misc_feature 1..36: note = Description of Artificial Sequence: Synthetic oligonucleotide
  source 1..36: mol_type = other DNA
gctggggatggccgagaatcgcagctcaagtacact

SEQ ID NO: 11999 - DNA, 36 bp, synthetic construct
  misc_feature 1..36: note = Description of Artificial Sequence: Synthetic oligonucleotide
  source 1..36: mol_type = other DNA
gctggggatggccgggaaccgccgctcaagtacact

SEQ ID NO: 12000 - DNA, 36 bp, synthetic construct
  misc_feature 1..36: note = Description of Artificial Sequence: Synthetic oligonucleotide
  source 1..36: mol_type = other DNA
gctggggatggccgggaattgccgctcacgtacact

SEQ ID NO: 12001 - DNA, 36 bp, synthetic construct
  misc_feature 1..36: note = Description of Artificial Sequence: Synthetic oligonucleotide
  source 1..36: mol_type = other DNA
gctggggatggccgggattcaccgctcaagtacact

SEQ ID NO: 12002 - DNA, 36 bp, synthetic construct
  misc_feature 1..36: note = Description of Artificial Sequence: Synthetic oligonucleotide
  source 1..36: mol_type = other DNA
gctggggatggtcgagaatcgccgctcaagtacact

SEQ ID NO: 12003 - DNA, 36 bp, synthetic construct
  misc_feature 1..36: note = Description of Artificial Sequence: Synthetic oligonucleotide
  source 1..36: mol_type = other DNA
gctggggatggtcgagaatcgcggctcaggtacact

SEQ ID NO: 12004 - DNA, 36 bp, synthetic construct
  misc_feature 1..36: note = Description of Artificial Sequence: Synthetic oligonucleotide
  source 1..36: mol_type = other DNA
gctggggattggttctcatttcccctgatagacttc

SEQ ID NO: 12005 - DNA, 36 bp, synthetic construct
  misc_feature 1..36: note = Description of Artificial Sequence: Synthetic oligonucleotide
  source 1..36: mol_type = other DNA
gctggggcttgacaagaatcgccgctcagatacact

SEQ ID NO: 12006 - DNA, 36 bp, synthetic construct
  misc_feature 1..36: note = Description of Artificial Sequence: Synthetic oligonucleotide
  source 1..36: mol_type = other DNA
gctggggcttgacgtgaaccgccgcttaagtacatt

SEQ ID NO: 12007 - DNA, 36 bp, synthetic construct
  misc_feature 1..36: note = Description of Artificial Sequence: Synthetic oligonucleotide
  source 1..36: mol_type = other DNA
gctggggcttgactacaaaatcgtttcaagtagaat

SEQ ID NO: 12008 - DNA, 36 bp, synthetic construct
  misc_feature 1..36: note = Description of Artificial Sequence: Synthetic oligonucleotide
  source 1..36: mol_type = other DNA
gctggggcttgactacagccgccgatcaagtacatt

SEQ ID NO: 12009 - DNA, 36 bp, synthetic construct
  misc_feature 1..36: note = Description of Artificial Sequence: Synthetic oligonucleotide
  source 1..36: mol_type = other DNA
gctggggcttgaggacaatcgccgctcaggtacaat

SEQ ID NO: 12010 - DNA, 36 bp, synthetic construct
  misc_feature 1..36: note = Description of Artificial Sequence: Synthetic oligonucleotide
  source 1..36: mol_type = other DNA
gctggggcttgatatcaatcgccgctcaggtacact

SEQ ID NO: 12011 - DNA, 36 bp, synthetic construct
  misc_feature 1..36: note = Description of Artificial Sequence: Synthetic oligonucleotide
  source 1..36: mol_type = other DNA
gctggggcttgccgcaaaccgccgctcaggtataat

SEQ ID NO: 12012 - DNA, 23 bp, synthetic construct
  misc_feature 1..23: note = Description of Artificial Sequence: Synthetic oligonucleotide
  source 1..23: mol_type = other DNA
gctggggcttgtaaaggttttcg

SEQ ID NO: 12013 - DNA, 36 bp, synthetic construct
  misc_feature 1..36: note = Description of Artificial Sequence: Synthetic oligonucleotide
  source 1..36: mol_type = other DNA
gctggggcttgtaaagttttttgaattttgtatatt

SEQ ID NO: 12014 - DNA, 36 bp, synthetic construct
  misc_feature 1..36: note = Description of Artificial Sequence: Synthetic oligonucleotide
  source 1..36: mol_type = other DNA
gctggggcttgtagagtatttcaagttgaattaaat

SEQ ID NO: 12015 - DNA, 36 bp, synthetic construct
  misc_feature 1..36: note = Description of Artificial Sequence: Synthetic oligonucleotide
  source 1..36: mol_type = other DNA
gctggggcttgtagagtttgaaaatggtgctatatt

SEQ ID NO: 12016 - DNA, 36 bp, synthetic construct
  misc_feature 1..36: note = Description of Artificial Sequence: Synthetic oligonucleotide
  source 1..36: mol_type = other DNA
gctggggcttgtagagtttttcaagttgaattaaat

SEQ ID NO: 12017 - DNA, 36 bp, synthetic construct
  misc_feature 1..36: note = Description of Artificial Sequence: Synthetic oligonucleotide
  source 1..36: mol_type = other DNA
gctgggggaggctgagaagcgccactcaactacact

SEQ ID NO: 12018 - DNA, 37 bp, synthetic construct
  misc_feature 1..37: note = Description of Artificial Sequence: Synthetic oligonucleotide
  source 1..37: mol_type = other DNA
gctggggttcaactcttacactccctgatatacttgt

SEQ ID NO: 12019 - DNA, 36 bp, synthetic construct
  misc_feature 1..36: note = Description of Artificial Sequence: Synthetic oligonucleotide
  source 1..36: mol_type = other DNA
gctggggttcaactcttacactccctgatgtacttg

SEQ ID NO: 12020 - DNA, 36 bp, synthetic construct
  misc_feature 1..36: note = Description of Artificial Sequence: Synthetic oligonucleotide
  source 1..36: mol_type = other DNA
gctggggttcaactcttaccctccctgatatacttg

SEQ ID NO: 12021 - DNA, 36 bp, synthetic construct
  misc_feature 1..36: note = Description of Artificial Sequence: Synthetic oligonucleotide
  source 1..36: mol_type = other DNA
gctggggttcaacttctaaatcccctgatatacttg

SEQ ID NO: 12022 - DNA, 36 bp, synthetic construct
  misc_feature 1..36: note = Description of Artificial Sequence: Synthetic oligonucleotide
  source 1..36: mol_type = other DNA
gctggggttcagttctcattacccctgatagacttc

SEQ ID NO: 12023 - DNA, 36 bp, synthetic construct
  misc_feature 1..36: note = Description of Artificial Sequence: Synthetic oligonucleotide
  source 1..36: mol_type = other DNA
gctggggttcagttctcattacccctgatatacttc

SEQ ID NO: 12024 - DNA, 36 bp, synthetic construct
  misc_feature 1..36: note = Description of Artificial Sequence: Synthetic oligonucleotide
  source 1..36: mol_type = other DNA
gctggggttcgactctaataatccctgatatacttg

SEQ ID NO: 12025 - DNA, 36 bp, synthetic construct
  misc_feature 1..36: note = Description of Artificial Sequence: Synthetic oligonucleotide
  source 1..36: mol_type = other DNA
gctggggttcgactctagataatccctgatatgctt

SEQ ID NO: 12026 - DNA, 36 bp, synthetic construct
  misc_feature 1..36: note = Description of Artificial Sequence: Synthetic oligonucleotide
  source 1..36: mol_type = other DNA
gctggggttggaagaaaatcgccgctcaggtatact

SEQ ID NO: 12027 - DNA, 36 bp, synthetic construct
  misc_feature 1..36: note = Description of Artificial Sequence: Synthetic oligonucleotide
  source 1..36: mol_type = other DNA
gctggggttggaagagaatcgccgctcaggtataat

SEQ ID NO: 12028 - DNA, 36 bp, synthetic construct
  misc_feature 1..36: note = Description of Artificial Sequence: Synthetic oligonucleotide
  source 1..36: mol_type = other DNA
gctggggttggccgagaatcaccgctcatgtacact

SEQ ID NO: 12029 - DNA, 36 bp, synthetic construct
  misc_feature 1..36: note = Description of Artificial Sequence: Synthetic oligonucleotide
  source 1..36: mol_type = other DNA
gctggggttggccggcaatcaccgctcaagtacaat

SEQ ID NO: 12030 - DNA, 36 bp, synthetic construct
  misc_feature 1..36: note = Description of Artificial Sequence: Synthetic oligonucleotide
  source 1..36: mol_type = other DNA
gctggggttggccgggggtcgccgctcaggtacact

SEQ ID NO: 12031 - DNA, 36 bp, synthetic construct
  misc_feature 1..36: note = Description of Artificial Sequence: Synthetic oligonucleotide
  source 1..36: mol_type = other DNA
gctggggtttaactcttacactccctgatatacttg

SEQ ID NO: 12032 - DNA, 36 bp, synthetic construct
  misc_feature 1..36: note = Description of Artificial Sequence: Synthetic oligonucleotide
  source 1..36: mol_type = other DNA
gctggggtttgacgtcatctaaaggtctgctacaat

SEQ ID NO: 12033 - DNA, 36 bp, synthetic construct
  misc_feature 1..36: note = Description of Artificial Sequence: Synthetic oligonucleotide
  source 1..36: mol_type = other DNA
gctggggtttgcagggaatcgacgctcggatacact

SEQ ID NO: 12034 - DNA, 36 bp, synthetic construct
  misc_feature 1..36: note = Description of Artificial Sequence: Synthetic oligonucleotide
  source 1..36: mol_type = other DNA
gctggggtttggcatcctctaaagctctgctataat

SEQ ID NO: 12035 - DNA, 47 bp, synthetic construct
  misc_feature 1..47: note = Description of Artificial Sequence: Synthetic oligonucleotide
  source 1..47: mol_type = other DNA
gctggtaaatgcctatgcgaagatacaatttgaaagcaactcacaac

SEQ ID NO: 12036 - DNA, 36 bp, synthetic construct
  misc_feature 1..36: note = Description of Artificial Sequence: Synthetic oligonucleotide
  source 1..36: mol_type = other DNA
gctggttatcatttcaaagaactgtcaatccacaac

SEQ ID NO: 12037 - DNA, 47 bp, synthetic construct
  misc_feature 1..47: note = Description of Artificial Sequence: Synthetic oligonucleotide
  source 1..47: mol_type = other DNA
gctggttgctatagtgcaaagataagaatttgtaagcaaatcacaac

SEQ ID NO: 12038 - DNA, 36 bp, synthetic construct
  misc_feature 1..36: note = Description of Artificial Sequence: Synthetic oligonucleotide
  source 1..36: mol_type = other DNA
gctgtaaaagtaccattttcgttaccaatccacaac

SEQ ID NO: 12039 - DNA, 47 bp, synthetic construct
  misc_feature 1..47: note = Description of Artificial Sequence: Synthetic oligonucleotide
  source 1..47: mol_type = other DNA
gctgtaaattggtttcataaatttgtatctttgtagtctcaaacagc

SEQ ID NO: 12040 - DNA, 46 bp, synthetic construct
  misc_feature 1..46: note = Description of Artificial Sequence: Synthetic oligonucleotide
  source 1..46: mol_type = other DNA
gctgtaacaaatatcgtcaaagaacaattcgaaagctaatcacaac

SEQ ID NO: 12041 - DNA, 47 bp, synthetic construct
  misc_feature 1..47: note = Description of Artificial Sequence: Synthetic oligonucleotide
  source 1..47: mol_type = other DNA
gctgtaattaatcacaataaaaatacaatttgaaagctaatcacaac

SEQ ID NO: 12042 - DNA, 36 bp, synthetic construct
  misc_feature 1..36: note = Description of Artificial Sequence: Synthetic oligonucleotide
  source 1..36: mol_type = other DNA
gctgtaattgactggtaaccaccgcttaggtacact

SEQ ID NO: 12043 - DNA, 47 bp, synthetic construct
  misc_feature 1..47: note = Description of Artificial Sequence: Synthetic oligonucleotide
  source 1..47: mol_type = other DNA
gctgtactagctattacgaaggtactgaattgaaagctaatcacaac

SEQ ID NO: 12044 - DNA, 36 bp, synthetic construct
  misc_feature 1..36: note = Description of Artificial Sequence: Synthetic oligonucleotide
  source 1..36: mol_type = other DNA
gctgtagctcccgctctcaccccggaaagctacaat

SEQ ID NO: 12045 - DNA, 37 bp, synthetic construct
  misc_feature 1..37: note = Description of Artificial Sequence: Synthetic oligonucleotide
  source 1..37: mol_type = other DNA
gctgtagctccctctctcaccccggatacgctataat

SEQ ID NO: 12046 - DNA, 36 bp, synthetic construct
  misc_feature 1..36: note = Description of Artificial Sequence: Synthetic oligonucleotide
  source 1..36: mol_type = other DNA
gctgtagctccctttctcatttcgcagtgctacaat

SEQ ID NO: 12047 - DNA, 36 bp, synthetic construct
  misc_feature 1..36: note = Description of Artificial Sequence: Synthetic oligonucleotide
  source 1..36: mol_type = other DNA
gctgtagctgacgggaaaccgccgttggggtacaag

SEQ ID NO: 12048 - DNA, 36 bp, synthetic construct
  misc_feature 1..36: note = Description of Artificial Sequence: Synthetic oligonucleotide
  source 1..36: mol_type = other DNA
gctgtagctgacggggaaccgccgttggggtacaac

SEQ ID NO: 12049 - DNA, 36 bp, synthetic construct
  misc_feature 1..36: note = Description of Artificial Sequence: Synthetic oligonucleotide
  source 1..36: mol_type = other DNA
gctgtagctgctctccaaatcagcatgtgctacagt

SEQ ID NO: 12050 - DNA, 36 bp, synthetic construct
  misc_feature 1..36: note = Description of Artificial Sequence: Synthetic oligonucleotide
  source 1..36: mol_type = other DNA
gctgtagtaggcaaggaaccgctgctcggatactct

SEQ ID NO: 12051 - DNA, 36 bp, synthetic construct
  misc_feature 1..36: note = Description of Artificial Sequence: Synthetic oligonucleotide
  source 1..36: mol_type = other DNA
gctgtagttcccggttattacttggtatggtataat

SEQ ID NO: 12052 - DNA, 36 bp, synthetic construct
  misc_feature 1..36: note = Description of Artificial Sequence: Synthetic oligonucleotide
  source 1..36: mol_type = other DNA
gctgtagttccctgttgttacttggtatgatataat

SEQ ID NO: 12053 - DNA, 36 bp, synthetic construct
  misc_feature 1..36: note = Description of Artificial Sequence: Synthetic oligonucleotide
  source 1..36: mol_type = other DNA
gctgtagttggccgggaatcgtcgctctggtacaat

SEQ ID NO: 12054 - DNA, 36 bp, synthetic construct
  misc_feature 1..36: note = Description of Artificial Sequence: Synthetic oligonucleotide
  source 1..36: mol_type = other DNA
gctgtagtttcggggaactcgtcgctttggtacact

SEQ ID NO: 12055 - DNA, 36 bp, synthetic construct
  misc_feature 1..36: note = Description of Artificial Sequence: Synthetic oligonucleotide
  source 1..36: mol_type = other DNA
gctgtagtttgaagggactcgctgtttggttacact

SEQ ID NO: 12056 - DNA, 36 bp, synthetic construct
  misc_feature 1..36: note = Description of Artificial Sequence: Synthetic oligonucleotide
  source 1..36: mol_type = other DNA
gctgtagttttggggaactcgtcgctttggtacact

SEQ ID NO: 12057 - DNA, 36 bp, synthetic construct
  misc_feature 1..36: note = Description of Artificial Sequence: Synthetic oligonucleotide
  source 1..36: mol_type = other DNA
gctgtatatcttcttatccctacatcaaaccgcaac

SEQ ID NO: 12058 - DNA, 47 bp, synthetic construct
  misc_feature 1..47: note = Description of Artificial Sequence: Synthetic oligonucleotide
  source 1..47: mol_type = other DNA
gctgtatcctatagcacaaaagtaataaaaagtaagcaaattacaac

SEQ ID NO: 12059 - DNA, 46 bp, synthetic construct
  misc_feature 1..46: note = Description of Artificial Sequence: Synthetic oligonucleotide
  source 1..46: mol_type = other DNA
gctgtatgtgatagaacgaaaatacaatttgaaacctattcacaac

SEQ ID NO: 12060 - DNA, 31 bp, synthetic construct
  misc_feature 1..31: note = Description of Artificial Sequence: Synthetic oligonucleotide
  source 1..31: mol_type = other DNA
gctgtattagcaagtatgaaggtacgaaatc

SEQ ID NO: 12061 - DNA, 42 bp, synthetic construct
  misc_feature 1..42: note = Description of Artificial Sequence: Synthetic oligonucleotide
  source 1..42: mol_type = other DNA
gctgtattagctatatcgaaagtactgaatttgaaagctaat

SEQ ID NO: 12062 - DNA, 33 bp, synthetic construct
  misc_feature 1..33: note = Description of Artificial Sequence: Synthetic oligonucleotide
  source 1..33: mol_type = other DNA
gctgtattagctgtatcgaaggtactgaatttg

SEQ ID NO: 12063 - DNA, 47 bp, synthetic construct
  misc_feature 1..47: note = Description of Artificial Sequence: Synthetic oligonucleotide
  source 1..47: mol_type = other DNA
gctgtattcaatatgacaaagatataagtttgaaagcaaatcacaac

SEQ ID NO: 12064 - DNA, 47 bp, synthetic construct
  misc_feature 1..47: note = Description of Artificial Sequence: Synthetic oligonucleotide
  source 1..47: mol_type = other DNA
gctgtattcaatggttcaaagatactaatttgaaagcaaatcacaac

SEQ ID NO: 12065 - DNA, 47 bp, synthetic construct
  misc_feature 1..47: note = Description of Artificial Sequence: Synthetic oligonucleotide
  source 1..47: mol_type = other DNA
gctgtatttaacccgtcaaagatacaattttgaaagcaattcacaac

SEQ ID NO: 12066 - DNA, 47 bp, synthetic construct
  misc_feature 1..47: note = Description of Artificial Sequence: Synthetic oligonucleotide
  source 1..47: mol_type = other DNA
gctgtatttcaagaatcaaagatactaatttgaaagcaattcacaac

SEQ ID NO: 12067 - DNA, 47 bp, synthetic construct
  misc_feature 1..47: note = Description of Artificial Sequence: Synthetic oligonucleotide
  source 1..47: mol_type = other DNA
gctgtatttcatagagctaaagtacaattttgaaagcaaatcacaac

SEQ ID NO: 12068 - DNA, 36 bp, synthetic construct
  misc_feature 1..36: note = Description of Artificial Sequence: Synthetic oligonucleotide
  source 1..36: mol_type = other DNA
gctgtcaaagatactaatttgattgcgaatcacaac

SEQ ID NO: 12069 - DNA, 35 bp, synthetic construct
  misc_feature 1..35: note = Description of Artificial Sequence: Synthetic oligonucleotide
  source 1..35: mol_type = other DNA
gctgtcaaagatctgtgctggtgtcaatccacagc

SEQ ID NO: 12070 - DNA, 46 bp, synthetic construct
  misc_feature 1..46: note = Description of Artificial Sequence: Synthetic oligonucleotide
  source 1..46: mol_type = other DNA
gctgtcaacgacagctaaaaatacaattttgaaagcaattcacaac

SEQ ID NO: 12071 - DNA, 34 bp, synthetic construct
  misc_feature 1..34: note = Description of Artificial Sequence: Synthetic oligonucleotide
  source 1..34: mol_type = other DNA
gctgtcacagcccccgtaaagataacaacttgga

SEQ ID NO: 12072 - DNA, 46 bp, synthetic construct
  misc_feature 1..46: note = Description of Artificial Sequence: Synthetic oligonucleotide
  source 1..46: mol_type = other DNA
gctgtcagcgctactgcaaagatacattttgaaagcaattcacaac

SEQ ID NO: 12073 - DNA, 47 bp, synthetic construct
  misc_feature 1..47: note = Description of Artificial Sequence: Synthetic oligonucleotide
  source 1..47: mol_type = other DNA
gctgtgaatacccctataaaataataaatatgaaaccaattcacaac

SEQ ID NO: 12074 - DNA, 36 bp, synthetic construct
  misc_feature 1..36: note = Description of Artificial Sequence: Synthetic oligonucleotide
  source 1..36: mol_type = other DNA
gctgtgaatggtcggggagcgccttttggatacact

SEQ ID NO: 12075 - DNA, 36 bp, synthetic construct
  misc_feature 1..36: note = Description of Artificial Sequence: Synthetic oligonucleotide
  source 1..36: mol_type = other DNA
gctgtgaattagctttcatcctctttggtaaaatag

SEQ ID NO: 12076 - DNA, 47 bp, synthetic construct
  misc_feature 1..47: note = Description of Artificial Sequence: Synthetic oligonucleotide
  source 1..47: mol_type = other DNA
gctgtgaattctcaccaaaaatactaaaaatgaaagcaaatcacaac

SEQ ID NO: 12077 - DNA, 46 bp, synthetic construct
  misc_feature 1..46: note = Description of Artificial Sequence: Synthetic oligonucleotide
  source 1..46: mol_type = other DNA
gctgtgaattgctttcaaatttgtaactttggctatagcaaacagt

SEQ ID NO: 12078 - DNA, 46 bp, synthetic construct
  misc_feature 1..46: note = Description of Artificial Sequence: Synthetic oligonucleotide
  source 1..46: mol_type = other DNA
gctgtgacaaatattgtaaaaagaacttttgaaagcaaatcacaac

SEQ ID NO: 12079 - DNA, 46 bp, synthetic construct
  misc_feature 1..46: note = Description of Artificial Sequence: Synthetic oligonucleotide
  source 1..46: mol_type = other DNA
gctgtgaccaatatttcaaagatacaatctgaaagcaattcacaac

SEQ ID NO: 12080 - DNA, 46 bp, synthetic construct
  misc_feature 1..46: note = Description of Artificial Sequence: Synthetic oligonucleotide
  source 1..46: mol_type = other DNA
gctgtgaccagtatgtcaaagatacaatttgaaagcaattcacaac

SEQ ID NO: 12081 - DNA, 47 bp, synthetic construct
  misc_feature 1..47: note = Description of Artificial Sequence: Synthetic oligonucleotide
  source 1..47: mol_type = other DNA
gctgtgactaatcacgaagataataaattttgaaagcaattcacaac

SEQ ID NO: 12082 - DNA, 47 bp, synthetic construct
  misc_feature 1..47: note = Description of Artificial Sequence: Synthetic oligonucleotide
  source 1..47: mol_type = other DNA
gctgtgactaatcacgaagataataatttttgaaagcaattcacaac

SEQ ID NO: 12083 - DNA, 47 bp, synthetic construct
  misc_feature 1..47: note = Description of Artificial Sequence: Synthetic oligonucleotide
  source 1..47: mol_type = other DNA
gctgtgactaatcacgaagatagtaaattttgaaagcaattcacaac

SEQ ID NO: 12084 - DNA, 47 bp, synthetic construct
  misc_feature 1..47: note = Description of Artificial Sequence: Synthetic oligonucleotide
  source 1..47: mol_type = other DNA
gctgtgactcatcacgaagataataatttttgaaagcaattcacaac

SEQ ID NO: 12085 - DNA, 47 bp, synthetic construct
  misc_feature 1..47: note = Description of Artificial Sequence: Synthetic oligonucleotide
  source 1..47: mol_type = other DNA
gctgtgactgctatgtcaaagatacaattttgaaagcgaatcacaac

SEQ ID NO: 12086 - DNA, 36 bp, synthetic construct
  misc_feature 1..36: note = Description of Artificial Sequence: Synthetic oligonucleotide
  source 1..36: mol_type = other DNA
gctgtgacttgacaggaatcgccgcttaggtacact

SEQ ID NO: 12087 - DNA, 47 bp, synthetic construct
  misc_feature 1..47: note = Description of Artificial Sequence: Synthetic oligonucleotide
  source 1..47: mol_type = other DNA
gctgtgatcaatcacgaagataataatttttgaaagcaattcacaac

SEQ ID NO: 12088 - DNA, 36 bp, synthetic construct
  misc_feature 1..36: note = Description of Artificial Sequence: Synthetic oligonucleotide
  source 1..36: mol_type = other DNA
gctgtgatctgataccgactcgcgttctttgagagg

SEQ ID NO: 12089 - DNA, 47 bp, synthetic construct
  misc_feature 1..47: note = Description of Artificial Sequence: Synthetic oligonucleotide
  source 1..47: mol_type = other DNA
gctgtgatgtatccacaaagttaaagaatttgaaagcaactcacaac

SEQ ID NO: 12090 - DNA, 47 bp, synthetic construct
  misc_feature 1..47: note = Description of Artificial Sequence: Synthetic oligonucleotide
  source 1..47: mol_type = other DNA
gctgtgattcaacacatcaaaaatacaaattgcaagctaatcacaac

SEQ ID NO: 12091 - DNA, 47 bp, synthetic construct
  misc_feature 1..47: note = Description of Artificial Sequence: Synthetic oligonucleotide
  source 1..47: mol_type = other DNA
gctgtgattcaccacgctaaagatacattttgaaagctaatcacaac

SEQ ID NO: 12092 - DNA, 36 bp, synthetic construct
  misc_feature 1..36: note = Description of Artificial Sequence: Synthetic oligonucleotide
  source 1..36: mol_type = other DNA
gctgtgattggcaaataaaggccgctcgaatacatt

SEQ ID NO: 12093 - DNA, 36 bp, synthetic construct
  misc_feature 1..36: note = Description of Artificial Sequence: Synthetic oligonucleotide
  source 1..36: mol_type = other DNA
gctgtgattggctggggatggccgttcagatacact

SEQ ID NO: 12094 - DNA, 46 bp, synthetic construct
  misc_feature 1..46: note = Description of Artificial Sequence: Synthetic oligonucleotide
  source 1..46: mol_type = other DNA
gctgtgatttccctaggaaagtaacattttgaaagcaattcacaac

SEQ ID NO: 12095 - DNA, 36 bp, synthetic construct
  misc_feature 1..36: note = Description of Artificial Sequence: Synthetic oligonucleotide
  source 1..36: mol_type = other DNA
gctgtgatttgatgcactctttttagtttcaacaat

SEQ ID NO: 12096 - DNA, 47 bp, synthetic construct
  misc_feature 1..47: note = Description of Artificial Sequence: Synthetic oligonucleotide
  source 1..47: mol_type = other DNA
gctgtgatttgctttcaaaattgtatctttgacttacttcatacagc

SEQ ID NO: 12097 - DNA, 45 bp, synthetic construct
  misc_feature 1..45: note = Description of Artificial Sequence: Synthetic oligonucleotide
  source 1..45: mol_type = other DNA
gctgtgcctaatatcagtaaatcaaagaatgaaagcaaatcacaa

SEQ ID NO: 12098 - DNA, 46 bp, synthetic construct
  misc_feature 1..46: note = Description of Artificial Sequence: Synthetic oligonucleotide
  source 1..46: mol_type = other DNA
gctgtgcctaatatcagtaaatcaaagaatgaaagcaaatcacaac

SEQ ID NO: 12099 - DNA, 47 bp, synthetic construct
  misc_feature 1..47: note = Description of Artificial Sequence: Synthetic oligonucleotide
  source 1..47: mol_type = other DNA
gctgtgcgacattaagtcaaagatacaatttgaaagcaattcacaac

SEQ ID NO: 12100 - DNA, 47 bp, synthetic construct
  misc_feature 1..47: note = Description of Artificial Sequence: Synthetic oligonucleotide
  source 1..47: mol_type = other DNA
gctgtgcgagacctaagctacagaataatttgaaagcaaatcacaac

SEQ ID NO: 12101 - DNA, 46 bp, synthetic construct
  misc_feature 1..46: note = Description of Artificial Sequence: Synthetic oligonucleotide
  source 1..46: mol_type = other DNA
gctgtgcgttgcaacaaaaatactaaatctgaaagctattcccagt

SEQ ID NO: 12102 - DNA, 36 bp, synthetic construct
  misc_feature 1..36: note = Description of Artificial Sequence: Synthetic oligonucleotide
  source 1..36: mol_type = other DNA
gctgtgctaaaatacaatttgaaagcgaatcacaac

SEQ ID NO: 12103 - DNA, 36 bp, synthetic construct
  misc_feature 1..36: note = Description of Artificial Sequence: Synthetic oligonucleotide
  source 1..36: mol_type = other DNA
gctgtgctaaattaagatttgaaagctaatcacaac

SEQ ID NO: 12104 - DNA, 36 bp, synthetic construct
  misc_feature 1..36: note = Description of Artificial Sequence: Synthetic oligonucleotide
  source 1..36: mol_type = other DNA
gctgtgctaaattacaatttgaaagcgattcacaac

SEQ ID NO: 12105 - DNA, 36 bp, synthetic construct
  misc_feature 1..36: note = Description of Artificial Sequence: Synthetic oligonucleotide
  source 1..36: mol_type = other DNA
gctgtggactgtggccaatcctcgctctggtatact

SEQ ID NO: 12106 - DNA, 36 bp, synthetic construct
  misc_feature 1..36: note = Description of Artificial Sequence: Synthetic oligonucleotide
  source 1..36: mol_type = other DNA
gctgtggatggtcggggagcgcctcttggatacact

SEQ ID NO: 12107 - DNA, 36 bp, synthetic construct
  misc_feature 1..36: note = Description of Artificial Sequence: Synthetic oligonucleotide
  source 1..36: mol_type = other DNA
gctgtggccagaagagagcgcccactcagttacact

SEQ ID NO: 12108 - DNA, 36 bp, synthetic construct
  misc_feature 1..36: note = Description of Artificial Sequence: Synthetic oligonucleotide
  source 1..36: mol_type = other DNA
gctgtggcccgccgagagcgcccgctcaagtacact

SEQ ID NO: 12109 - DNA, 36 bp, synthetic construct
  misc_feature 1..36: note = Description of Artificial Sequence: Synthetic oligonucleotide
  source 1..36: mol_type = other DNA
gctgtggccggaagagagcccccgctcagttacact

SEQ ID NO: 12110 - DNA, 36 bp, synthetic construct
  misc_feature 1..36: note = Description of Artificial Sequence: Synthetic oligonucleotide
  source 1..36: mol_type = other DNA
gctgtggccggaagagagcgctcgctcagttacact

SEQ ID NO: 12111 - DNA, 36 bp, synthetic construct
  misc_feature 1..36: note = Description of Artificial Sequence: Synthetic oligonucleotide
  source 1..36: mol_type = other DNA
gctgtggccgggagcgatcgcccgcttcgttacact

SEQ ID NO: 12112 - DNA, 36 bp, synthetic construct
  misc_feature 1..36: note = Description of Artificial Sequence: Synthetic oligonucleotide
  source 1..36: mol_type = other DNA
gctgtggcctgcgggtagccgtcgctcaggtacact

SEQ ID NO: 12113 - DNA, 37 bp, synthetic construct
  misc_feature 1..37: note = Description of Artificial Sequence: Synthetic oligonucleotide
  source 1..37: mol_type = other DNA
gctgtggctcgaagggaatcgctgctcggatacactg

SEQ ID NO: 12114 - DNA, 36 bp, synthetic construct
  misc_feature 1..36: note = Description of Artificial Sequence: Synthetic oligonucleotide
  source 1..36: mol_type = other DNA
gctgtggctggccgggaatcgtcgctcaggtacact

SEQ ID NO: 12115 - DNA, 36 bp, synthetic construct
  misc_feature 1..36: note = Description of Artificial Sequence: Synthetic oligonucleotide
  source 1..36: mol_type = other DNA
gctgtggcttgacagcaatcgccgctcaggtgcact

SEQ ID NO: 12116 - DNA, 36 bp, synthetic construct
  misc_feature 1..36: note = Description of Artificial Sequence: Synthetic oligonucleotide
  source 1..36: mol_type = other DNA
gctgtggcttgacaggaatcgccgctcaggtacact

SEQ ID NO: 12117 - DNA, 36 bp, synthetic construct
  misc_feature 1..36: note = Description of Artificial Sequence: Synthetic oligonucleotide
  source 1..36: mol_type = other DNA
gctgtggcttgacgggaatcgccgctttggtacact

SEQ ID NO: 12118 - DNA, 36 bp, synthetic construct
  misc_feature 1..36: note = Description of Artificial Sequence: Synthetic oligonucleotide
  source 1..36: mol_type = other DNA
gctgtggcttgacgggaattgaggcttaggtacact

SEQ ID NO: 12119 - DNA, 36 bp, synthetic construct
  misc_feature 1..36: note = Description of Artificial Sequence: Synthetic oligonucleotide
  source 1..36: mol_type = other DNA
gctgtggcttgacgggactcgccgttcaggtacact

SEQ ID NO: 12120 - DNA, 36 bp, synthetic construct
  misc_feature 1..36: note = Description of Artificial Sequence: Synthetic oligonucleotide
  source 1..36: mol_type = other DNA
gctgtggcttgcagggaatcgtcgaagtgccacact

SEQ ID NO: 12121 - DNA, 36 bp, synthetic construct
  misc_feature 1..36: note = Description of Artificial Sequence: Synthetic oligonucleotide
  source 1..36: mol_type = other DNA
gctgtggcttgcagggaatcgtcgttcggatacact

SEQ ID NO: 12122 - DNA, 36 bp, synthetic construct
  misc_feature 1..36: note = Description of Artificial Sequence: Synthetic oligonucleotide
  source 1..36: mol_type = other DNA
gctgtggcttgccgggaaacgtcgctcagatacact

SEQ ID NO: 12123 - DNA, 36 bp, synthetic construct
  misc_feature 1..36: note = Description of Artificial Sequence: Synthetic oligonucleotide
  source 1..36: mol_type = other DNA
gctgtggcttgcggattccccccgcccagatacact

SEQ ID NO: 12124 - DNA, 36 bp, synthetic construct
  misc_feature 1..36: note = Description of Artificial Sequence: Synthetic oligonucleotide
  source 1..36: mol_type = other DNA
gctgtggcttgcgggaaatcgccgctcggatacact

SEQ ID NO: 12125 - DNA, 36 bp, synthetic construct
  misc_feature 1..36: note = Description of Artificial Sequence: Synthetic oligonucleotide
  source 1..36: mol_type = other DNA
gctgtggcttgcggggaatcgccgctctggtacact

SEQ ID NO: 12126 - DNA, 36 bp, synthetic construct
  misc_feature 1..36: note = Description of Artificial Sequence: Synthetic oligonucleotide
  source 1..36: mol_type = other DNA
gctgtggcttgcggggaatcgtcgctcggatacact

SEQ ID NO: 12127 - DNA, 36 bp, synthetic construct
  misc_feature 1..36: note = Description of Artificial Sequence: Synthetic oligonucleotide
  source 1..36: mol_type = other DNA
gctgtggcttgcggggaatcgtcgctctggtacact

SEQ ID NO: 12128 - DNA, 36 bp, synthetic construct
  misc_feature 1..36: note = Description of Artificial Sequence: Synthetic oligonucleotide
  source 1..36: mol_type = other DNA
gctgtggcttgcgggggatcgtcgctctggtacact

SEQ ID NO: 12129 - DNA, 36 bp, synthetic construct
  misc_feature 1..36: note = Description of Artificial Sequence: Synthetic oligonucleotide
  source 1..36: mol_type = other DNA
gctgtggcttgtagggaatcgtcgctcggatacact

SEQ ID NO: 12130 - DNA, 36 bp, synthetic construct
  misc_feature 1..36: note = Description of Artificial Sequence: Synthetic oligonucleotide
  source 1..36: mol_type = other DNA
gctgtgggttgacaggaatcgccgctcaggtacact

SEQ ID NO: 12131 - DNA, 36 bp, synthetic construct
  misc_feature 1..36: note = Description of Artificial Sequence: Synthetic oligonucleotide
  source 1..36: mol_type = other DNA
gctgtggttcgcaaggaatgaccactcggatacact

SEQ ID NO: 12132 - DNA, 36 bp, synthetic construct
  misc_feature 1..36: note = Description of Artificial Sequence: Synthetic oligonucleotide
  source 1..36: mol_type = other DNA
gctgtggttcgcatggaagcactgcttggatacact

SEQ ID NO: 12133 - DNA, 36 bp, synthetic construct
  misc_feature 1..36: note = Description of Artificial Sequence: Synthetic oligonucleotide
  source 1..36: mol_type = other DNA
gctgtggttggcagccaatggccgctcagatacatt

SEQ ID NO: 12134 - DNA, 36 bp, synthetic construct
  misc_feature 1..36: note = Description of Artificial Sequence: Synthetic oligonucleotide
  source 1..36: mol_type = other DNA
gctgtggttggcagccaatggccgttcagatacact

SEQ ID NO: 12135 - DNA, 36 bp, synthetic construct
  misc_feature 1..36: note = Description of Artificial Sequence: Synthetic oligonucleotide
  source 1..36: mol_type = other DNA
gctgtggttggccgagaaacgtcgctcagatacact

SEQ ID NO: 12136 - DNA, 36 bp, synthetic construct
  misc_feature 1..36: note = Description of Artificial Sequence: Synthetic oligonucleotide
  source 1..36: mol_type = other DNA
gctgtggttggtggggaatccccgctcaggtatact

SEQ ID NO: 12137 - DNA, 36 bp, synthetic construct
  misc_feature 1..36: note = Description of Artificial Sequence: Synthetic oligonucleotide
  source 1..36: mol_type = other DNA
gctgtggtttaaagcaagcgcctgctcaagtacaat

SEQ ID NO: 12138 - DNA, 47 bp, synthetic construct
  misc_feature 1..47: note = Description of Artificial Sequence: Synthetic oligonucleotide
  source 1..47: mol_type = other DNA
gctgtggtttcctatgtcaaagatacaatctgaaagcaattcacaac

SEQ ID NO: 12139 - DNA, 46 bp, synthetic construct
  misc_feature 1..46: note = Description of Artificial Sequence: Synthetic oligonucleotide
  source 1..46: mol_type = other DNA
gctgtggtttctgtttcaaagatacaatctaaaagcaattcacaac

SEQ ID NO: 12140 - DNA, 36 bp, synthetic construct
  misc_feature 1..36: note = Description of Artificial Sequence: Synthetic oligonucleotide
  source 1..36: mol_type = other DNA
gctgtggtttgaaagcagtcgccgcttaggtacaat

SEQ ID NO: 12141 - DNA, 36 bp, synthetic construct
  misc_feature 1..36: note = Description of Artificial Sequence: Synthetic oligonucleotide
  source 1..36: mol_type = other DNA
gctgtggtttgacgggaaccgccggtcggatacact

SEQ ID NO: 12142 - DNA, 36 bp, synthetic construct
  misc_feature 1..36: note = Description of Artificial Sequence: Synthetic oligonucleotide
  source 1..36: mol_type = other DNA
gctgtggtttgaggagaatctccgctcaggtatact

SEQ ID NO: 12143 - DNA, 31 bp, synthetic construct
  misc_feature 1..31: note = Description of Artificial Sequence: Synthetic oligonucleotide
  source 1..31: mol_type = other DNA
gctgtggtttgatgactaaaaccgatattga

SEQ ID NO: 12144 - DNA, 36 bp, synthetic construct
  misc_feature 1..36: note = Description of Artificial Sequence: Synthetic oligonucleotide
  source 1..36: mol_type = other DNA
gctgtggtttgatggcaatcgccgctcaggtatact

SEQ ID NO: 12145 - DNA, 36 bp, synthetic construct
  misc_feature 1..36: note = Description of Artificial Sequence: Synthetic oligonucleotide
  source 1..36: mol_type = other DNA
gctgtggtttgatgggaatccccgctcaggtatact

SEQ ID NO: 12146 - DNA, 36 bp, synthetic construct
  misc_feature 1..36: note = Description of Artificial Sequence: Synthetic oligonucleotide
  source 1..36: mol_type = other DNA
gctgtggtttgccgggaagcgtcgctcggatacact

SEQ ID NO: 12147 - DNA, 36 bp, synthetic construct
  misc_feature 1..36: note = Description of Artificial Sequence: Synthetic oligonucleotide
  source 1..36: mol_type = other DNA
gctgtggtttgcggggaatctccgatcaggtatact

SEQ ID NO: 12148 - DNA, 36 bp, synthetic construct
  misc_feature 1..36: note = Description of Artificial Sequence: Synthetic oligonucleotide
  source 1..36: mol_type = other DNA
gctgtggtttgctgggaagctccgctcgaatacact

SEQ ID NO: 12149 - DNA, 36 bp, synthetic construct
  misc_feature 1..36: note = Description of Artificial Sequence: Synthetic oligonucleotide
  source 1..36: mol_type = other DNA
gctgtggtttgtggggaatctccgatcaggtatact

SEQ ID NO: 12150 - DNA, 46 bp, synthetic construct
  misc_feature 1..46: note = Description of Artificial Sequence: Synthetic oligonucleotide
  source 1..46: mol_type = other DNA
gctgtgtaaatatagtaagaactaaaaattgaaagcaaatcacaac

SEQ ID NO: 12151 - DNA, 47 bp, synthetic construct
  misc_feature 1..47: note = Description of Artificial Sequence: Synthetic oligonucleotide
  source 1..47: mol_type = other DNA
gctgtgtaagaactaagttacaatacattttgaaagcaaatcacaac

SEQ ID NO: 12152 - DNA, 46 bp, synthetic construct
  misc_feature 1..46: note = Description of Artificial Sequence: Synthetic oligonucleotide
  source 1..46: mol_type = other DNA
gctgtgtcaaatatcgggaaatcacaatttgaaagcaaatcacaac

SEQ ID NO: 12153 - DNA, 47 bp, synthetic construct
  misc_feature 1..47: note = Description of Artificial Sequence: Synthetic oligonucleotide
  source 1..47: mol_type = other DNA
gctgtgtcatccgatacaaagatacaaatttgaaagcaattcacaac

SEQ ID NO: 12154 - DNA, 46 bp, synthetic construct
  misc_feature 1..46: note = Description of Artificial Sequence: Synthetic oligonucleotide
  source 1..46: mol_type = other DNA
gctgtgttagatcgaagatacacttaatttgaaagcaaatcacaac

SEQ ID NO: 12155 - DNA, 46 bp, synthetic construct
  misc_feature 1..46: note = Description of Artificial Sequence: Synthetic oligonucleotide
  source 1..46: mol_type = other DNA
gctgtgttcaataagtcaaagatacaatctgaaagcaattcacaac

SEQ ID NO: 12156 - DNA, 46 bp, synthetic construct
  misc_feature 1..46: note = Description of Artificial Sequence: Synthetic oligonucleotide
  source 1..46: mol_type = other DNA
gctgtgttcaatatttcaaagatacaatttgagagcaattcacaac

SEQ ID NO: 12157 - DNA, 46 bp, synthetic construct
  misc_feature 1..46: note = Description of Artificial Sequence: Synthetic oligonucleotide
  source 1..46: mol_type = other DNA
gctgttaaagagctaagctacaacaaatttgaaagctaatcacaac

SEQ ID NO: 12158 - DNA, 47 bp, synthetic construct
  misc_feature 1..47: note = Description of Artificial Sequence: Synthetic oligonucleotide
  source 1..47: mol_type = other DNA
gctgttaatcaagtcaaagatacaaaataatgaaagcaaatcacaac

SEQ ID NO: 12159 - DNA, 46 bp, synthetic construct
  misc_feature 1..46: note = Description of Artificial Sequence: Synthetic oligonucleotide
  source 1..46: mol_type = other DNA
gctgttaatcaagtcaaagatacaaattttgaaagcaagtcacaac

SEQ ID NO: 12160 - DNA, 47 bp, synthetic construct
  misc_feature 1..47: note = Description of Artificial Sequence: Synthetic oligonucleotide
  source 1..47: mol_type = other DNA
gctgttaatcacgtcaaagatacaaagttctgaaagcaagtcacaac

SEQ ID NO: 12161 - DNA, 36 bp, synthetic construct
  misc_feature 1..36: note = Description of Artificial Sequence: Synthetic oligonucleotide
  source 1..36: mol_type = other DNA
gctgttaatcatttcaaagaactgtcaatccacaac

SEQ ID NO: 12162 - DNA, 30 bp, synthetic construct
  misc_feature 1..30: note = Description of Artificial Sequence: Synthetic oligonucleotide
  source 1..30: mol_type = other DNA
gctgttataaacgtcaaagatacaattttt

SEQ ID NO: 12163 - DNA, 46 bp, synthetic construct
  misc_feature 1..46: note = Description of Artificial Sequence: Synthetic oligonucleotide
  source 1..46: mol_type = other DNA
gctgttatatgatatcaaagatactaatttgaaagcaatctacaac

SEQ ID NO: 12164 - DNA, 47 bp, synthetic construct
  misc_feature 1..47: note = Description of Artificial Sequence: Synthetic oligonucleotide
  source 1..47: mol_type = other DNA
gctgttatcaatgtgtcaaagataagaattagagagcaaatcacaac

SEQ ID NO: 12165 - DNA, 47 bp, synthetic construct
  misc_feature 1..47: note = Description of Artificial Sequence: Synthetic oligonucleotide
  source 1..47: mol_type = other DNA
gctgttccttatagtacaaagttattaaattgaaagcaaatcacaac

SEQ ID NO: 12166 - DNA, 47 bp, synthetic construct
  misc_feature 1..47: note = Description of Artificial Sequence: Synthetic oligonucleotide
  source 1..47: mol_type = other DNA
gctgttctctataatgcaaagatactaatttgaaagcaaatcacaac

SEQ ID NO: 12167 - DNA, 47 bp, synthetic construct
  misc_feature 1..47: note = Description of Artificial Sequence: Synthetic oligonucleotide
  source 1..47: mol_type = other DNA
gctgttctttatggttcaaagatactaatttgaaagcaaatcacaac

SEQ ID NO: 12168 - DNA, 46 bp, synthetic construct
  misc_feature 1..46: note = Description of Artificial Sequence: Synthetic oligonucleotide
  source 1..46: mol_type = other DNA
gctgttgcaaatatcatgaaaagtaagaactaaagcaaatcacaac

SEQ ID NO: 12169 - DNA, 47 bp, synthetic construct
  misc_feature 1..47: note = Description of Artificial Sequence: Synthetic oligonucleotide
  source 1..47: mol_type = other DNA
gctgttgcatacctcgataatacaataatttgaaatctaatcacaac

SEQ ID NO: 12170 - DNA, 45 bp, synthetic construct
  misc_feature 1..45: note = Description of Artificial Sequence: Synthetic oligonucleotide
  source 1..45: mol_type = other DNA
gctgttgctattaggacaaagatacaattttgaaagcaaatcaca

SEQ ID NO: 12171 - DNA, 46 bp, synthetic construct
  misc_feature 1..46: note = Description of Artificial Sequence: Synthetic oligonucleotide
  source 1..46: mol_type = other DNA
gctgttgtaaatattatcaaataacaaattgaaagcaaatcacaac

SEQ ID NO: 12172 - DNA, 47 bp, synthetic construct
  misc_feature 1..47: note = Description of Artificial Sequence: Synthetic oligonucleotide
  source 1..47: mol_type = other DNA
gctgttgtatgtggtacaaagatactaatttgaaagcaaatcacaac

SEQ ID NO: 12173 - DNA, 47 bp, synthetic construct
  misc_feature 1..47: note = Description of Artificial Sequence: Synthetic oligonucleotide
  source 1..47: mol_type = other DNA
gctgttgtgaacgaattcaaagatacaaaataaaagcaaatcacaac

SEQ ID NO: 12174 - DNA, 47 bp, synthetic construct
  misc_feature 1..47: note = Description of Artificial Sequence: Synthetic oligonucleotide
  source 1..47: mol_type = other DNA
gctgttgttgacctaaggtactgataaatttgaaagtaaatcacaac

SEQ ID NO: 12175 - DNA, 47 bp, synthetic construct
  misc_feature 1..47: note = Description of Artificial Sequence: Synthetic oligonucleotide
  source 1..47: mol_type = other DNA
gctgttgtttatatagcaaaggtaagaattttagagcaaatcacaac

SEQ ID NO: 12176 - DNA, 46 bp, synthetic construct
  misc_feature 1..46: note = Description of Artificial Sequence: Synthetic oligonucleotide
  source 1..46: mol_type = other DNA
gctgtttataatatcaaagatacaatttttgaaagctaatcacaac

SEQ ID NO: 12177 - DNA, 47 bp, synthetic construct
  misc_feature 1..47: note = Description of Artificial Sequence: Synthetic oligonucleotide
  source 1..47: mol_type = other DNA
gctgtttattcctctacaaaggtaatcaattttttgctaatcacaac

SEQ ID NO: 12178 - DNA, 47 bp, synthetic construct
  misc_feature 1..47: note = Description of Artificial Sequence: Synthetic oligonucleotide
  source 1..47: mol_type = other DNA
gctgtttccaatggttcaaagatactaaaatgaaagcaaatcacaac

SEQ ID NO: 12179 - DNA, 47 bp, synthetic construct
  misc_feature 1..47: note = Description of Artificial Sequence: Synthetic oligonucleotide
  source 1..47: mol_type = other DNA
gctgtttccaatggttcaaagatactaatttgaaagcaaatcacaac

SEQ ID NO: 12180 - DNA, 47 bp, synthetic construct
  misc_feature 1..47: note = Description of Artificial Sequence: Synthetic oligonucleotide
  source 1..47: mol_type = other DNA
gctgtttcctatagagcaaagttactaaattgaaagcaaatcacaac

SEQ ID NO: 12181 - DNA, 47 bp, synthetic construct
  misc_feature 1..47: note = Description of Artificial Sequence: Synthetic oligonucleotide
  source 1..47: mol_type = other DNA
gctgtttctaatggttcaaatatactaaaatgaaagcaaatcacaac

SEQ ID NO: 12182 - DNA, 47 bp, synthetic construct
  misc_feature 1..47: note = Description of Artificial Sequence: Synthetic oligonucleotide
  source 1..47: mol_type = other DNA
gctgtttctgatatgtcaaagataaaattttgaaagcaaatcacaac

SEQ ID NO: 12183 - DNA, 46 bp, synthetic construct
  misc_feature 1..46: note = Description of Artificial Sequence: Synthetic oligonucleotide
  source 1..46: mol_type = other DNA
gctgtttgcgatatatcaaagatacgaaatgtagtcaattcacaac

SEQ ID NO: 12184 - DNA, 46 bp, synthetic construct
  misc_feature 1..46: note = Description of Artificial Sequence: Synthetic oligonucleotide
  source 1..46: mol_type = other DNA
gctgttttaaactttgtcaaaaaacaaattgaaagcaaatcacaac

SEQ ID NO: 12185 - DNA, 47 bp, synthetic construct
  misc_feature 1..47: note = Description of Artificial Sequence: Synthetic oligonucleotide
  source 1..47: mol_type = other DNA
gctgttttagaactttatcgaattcaaaattgaaggatatacacaac

SEQ ID NO: 12186 - DNA, 46 bp, synthetic construct
  misc_feature 1..46: note = Description of Artificial Sequence: Synthetic oligonucleotide
  source 1..46: mol_type = other DNA
gctgttttatggtgcaaagttacaaattttgaatgatatacacaac

SEQ ID NO: 12187 - DNA, 47 bp, synthetic construct
  misc_feature 1..47: note = Description of Artificial Sequence: Synthetic oligonucleotide
  source 1..47: mol_type = other DNA
gctgttttcaaagagcaaagatacgttaaatgaaagcaattcacaac

SEQ ID NO: 12188 - DNA, 46 bp, synthetic construct
  misc_feature 1..46: note = Description of Artificial Sequence: Synthetic oligonucleotide
  source 1..46: mol_type = other DNA
gctgtttttaaaaatatcaaataacaattagaaagcaaatcacaac

SEQ ID NO: 12189 - DNA, 47 bp, synthetic construct
  misc_feature 1..47: note = Description of Artificial Sequence: Synthetic oligonucleotide
  source 1..47: mol_type = other DNA
gctgtttttatagactcaaaattacaaaattgaaagcaattcacaac

SEQ ID NO: 12190 - DNA, 47 bp, synthetic construct
  misc_feature 1..47: note = Description of Artificial Sequence: Synthetic oligonucleotide
  source 1..47: mol_type = other DNA
gctgtttttcaaatatcaaagatactaatttgaaagcaattcacaac

SEQ ID NO: 12191 - DNA, 36 bp, synthetic construct
  misc_feature 1..36: note = Description of Artificial Sequence: Synthetic oligonucleotide
  source 1..36: mol_type = other DNA
gcttaagtaccacacatctttacatcattctcaaac

SEQ ID NO: 12192 - DNA, 34 bp, synthetic construct
  misc_feature 1..34: note = Description of Artificial Sequence: Synthetic oligonucleotide
  source 1..34: mol_type = other DNA
gcttacccctattatatgacacatatcccaaaca

SEQ ID NO: 12193 - DNA, 33 bp, synthetic construct
  misc_feature 1..33: note = Description of Artificial Sequence: Synthetic oligonucleotide
  source 1..33: mol_type = other DNA
gcttacctctattatatgacacatatcccaaac

SEQ ID NO: 12194 - DNA, 36 bp, synthetic construct
  misc_feature 1..36: note = Description of Artificial Sequence: Synthetic oligonucleotide
  source 1..36: mol_type = other DNA
gcttagttactttactgattttcaaggttctcaaac

SEQ ID NO: 12195 - DNA, 36 bp, synthetic construct
  misc_feature 1..36: note = Description of Artificial Sequence: Synthetic oligonucleotide
  source 1..36: mol_type = other DNA
gcttcaatactacattcttctaacaactactgaaac

SEQ ID NO: 12196 - DNA, 27 bp, synthetic construct
  misc_feature 1..27: note = Description of Artificial Sequence: Synthetic oligonucleotide
  source 1..27: mol_type = other DNA
gcttcaatcgtacattctttcaataac

SEQ ID NO: 12197 - DNA, 37 bp, synthetic construct
  misc_feature 1..37: note = Description of Artificial Sequence: Synthetic oligonucleotide
  source 1..37: mol_type = other DNA
gcttcaccagtatagccagtcacctagaaactgaaac

SEQ ID NO: 12198 - DNA, 37 bp, synthetic construct
  misc_feature 1..37: note = Description of Artificial Sequence: Synthetic oligonucleotide
  source 1..37: mol_type = other DNA
gcttcagtagtataacacatttcccagcaactgaaac

SEQ ID NO: 12199 - DNA, 36 bp, synthetic construct
  misc_feature 1..36: note = Description of Artificial Sequence: Synthetic oligonucleotide
  source 1..36: mol_type = other DNA
gcttcatcaccttcaaaacttacatggttctcaaac

SEQ ID NO: 12200 - DNA, 36 bp, synthetic construct
  misc_feature 1..36: note = Description of Artificial Sequence: Synthetic oligonucleotide
  source 1..36: mol_type = other DNA
gcttcgcaggtaccgcgcttcgagcagttacttgcc

SEQ ID NO: 12201 - DNA, 36 bp, synthetic construct
  misc_feature 1..36: note = Description of Artificial Sequence: Synthetic oligonucleotide
  source 1..36: mol_type = other DNA
gcttcgctaccagctgaattcacatagctctcaaac

SEQ ID NO: 12202 - DNA, 36 bp, synthetic construct
  misc_feature 1..36: note = Description of Artificial Sequence: Synthetic oligonucleotide
  source 1..36: mol_type = other DNA
gcttgaataccatacatttttacatcattctcaaac

SEQ ID NO: 12203 - DNA, 36 bp, synthetic construct
  misc_feature 1..36: note = Description of Artificial Sequence: Synthetic oligonucleotide
  source 1..36: mol_type = other DNA
gcttgaccaccatatgaatttacactactctcaaac

SEQ ID NO: 12204 - DNA, 36 bp, synthetic construct
  misc_feature 1..36: note = Description of Artificial Sequence: Synthetic oligonucleotide
  source 1..36: mol_type = other DNA
gcttgactaccataagaaattacaccactctcaaac

SEQ ID NO: 12205 - DNA, 36 bp, synthetic construct
  misc_feature 1..36: note = Description of Artificial Sequence: Synthetic oligonucleotide
  source 1..36: mol_type = other DNA
gcttgactaccatatagaattacaccattctcaaac

SEQ ID NO: 12206 - DNA, 36 bp, synthetic construct
  misc_feature 1..36: note = Description of Artificial Sequence: Synthetic oligonucleotide
  source 1..36: mol_type = other DNA
gcttgagaaccctctgaattagcacttctctcaaac

SEQ ID NO: 12207 - DNA, 36 bp, synthetic construct
  misc_feature 1..36: note = Description of Artificial Sequence: Synthetic oligonucleotide
  source 1..36: mol_type = other DNA
gcttgagagtattgttaaatcagaatcatctctaac

SEQ ID NO: 12208 - DNA, 36 bp, synthetic construct
  misc_feature 1..36: note = Description of Artificial Sequence: Synthetic oligonucleotide
  source 1..36: mol_type = other DNA
gcttgagtaccatacatatttacatcattctcaaac

SEQ ID NO: 12209 - DNA, 36 bp, synthetic construct
  misc_feature 1..36: note = Description of Artificial Sequence: Synthetic oligonucleotide
  source 1..36: mol_type = other DNA
gcttgagtaccatacatttttacatcattctcaaac

SEQ ID NO: 12210 - DNA, 36 bp, synthetic construct
  misc_feature 1..36: note = Description of Artificial Sequence: Synthetic oligonucleotide
  source 1..36: mol_type = other DNA
gcttgataccctataaaaattacatcactctcaaac

SEQ ID NO: 12211 - DNA, 36 bp, synthetic construct
  misc_feature 1..36: note = Description of Artificial Sequence: Synthetic oligonucleotide
  source 1..36: mol_type = other DNA
gcttgatatccctatgaatttacattactctcaaac

SEQ ID NO: 12212 - DNA, 36 bp, synthetic construct
  misc_feature 1..36: note = Description of Artificial Sequence: Synthetic oligonucleotide
  source 1..36: mol_type = other DNA
gcttgatatccctatgaatttacattgctctcaaac

SEQ ID NO: 12213 - DNA, 36 bp, synthetic construct
  misc_feature 1..36: note = Description of Artificial Sequence: Synthetic oligonucleotide
  source 1..36: mol_type = other DNA
gctttaacctactttcaaatccccatttgatataat

SEQ ID NO: 12214 - DNA, 36 bp, synthetic construct
  misc_feature 1..36: note = Description of Artificial Sequence: Synthetic oligonucleotide
  source 1..36: mol_type = other DNA
gctttacacccatctgaattaacaaagctctcaaac

SEQ ID NO: 12215 - DNA, 36 bp, synthetic construct
  misc_feature 1..36: note = Description of Artificial Sequence: Synthetic oligonucleotide
  source 1..36: mol_type = other DNA
gctttacacctatctgaactaacaaagctctcaaac

SEQ ID NO: 12216 - DNA, 36 bp, synthetic construct
  misc_feature 1..36: note = Description of Artificial Sequence: Synthetic oligonucleotide
  source 1..36: mol_type = other DNA
gctttacacctatctgaattaacaaagctctcaaac

SEQ ID NO: 12217 - DNA, 36 bp, synthetic construct
  misc_feature 1..36: note = Description of Artificial Sequence: Synthetic oligonucleotide
  source 1..36: mol_type = other DNA
gctttacagtattactgatttacaaggttctcaaac

SEQ ID NO: 12218 - DNA, 36 bp, synthetic construct
  misc_feature 1..36: note = Description of Artificial Sequence: Synthetic oligonucleotide
  source 1..36: mol_type = other DNA
gctttataacactcaaatttcacagcatcctaaaac

SEQ ID NO: 12219 - DNA, 38 bp, synthetic construct
  misc_feature 1..38: note = Description of Artificial Sequence: Synthetic oligonucleotide
  source 1..38: mol_type = other DNA
gctttcagattccgtaccttcacacttgctaatacagc

SEQ ID NO: 12220 - DNA, 36 bp, synthetic construct
  misc_feature 1..36: note = Description of Artificial Sequence: Synthetic oligonucleotide
  source 1..36: mol_type = other DNA
gctttgcacctttatttacttacaaagttctcaaac

SEQ ID NO: 12221 - DNA, 36 bp, synthetic construct
  misc_feature 1..36: note = Description of Artificial Sequence: Synthetic oligonucleotide
  source 1..36: mol_type = other DNA
gctttgccatagatcacttttcaaactgagctgaac

SEQ ID NO: 12222 - DNA, 36 bp, synthetic construct
  misc_feature 1..36: note = Description of Artificial Sequence: Synthetic oligonucleotide
  source 1..36: mol_type = other DNA
gctttgccatagttcagatttcaaaccaagcgaacc

SEQ ID NO: 12223 - DNA, 36 bp, synthetic construct
  misc_feature 1..36: note = Description of Artificial Sequence: Synthetic oligonucleotide
  source 1..36: mol_type = other DNA
gctttgccatagttcgtatttcgaggtaaacaatcc

SEQ ID NO: 12224 - DNA, 36 bp, synthetic construct
  misc_feature 1..36: note = Description of Artificial Sequence: Synthetic oligonucleotide
  source 1..36: mol_type = other DNA
gctttgccttgaatccaaagccggggggggaaagat

SEQ ID NO: 12225 - DNA, 36 bp, synthetic construct
  misc_feature 1..36: note = Description of Artificial Sequence: Synthetic oligonucleotide
  source 1..36: mol_type = other DNA
gctttgccttgaatcccttttaagggcggacagaat

SEQ ID NO: 12226 - DNA, 36 bp, synthetic construct
  misc_feature 1..36: note = Description of Artificial Sequence: Synthetic oligonucleotide
  source 1..36: mol_type = other DNA
gctttgccttgaatctattttcgaagtcggaagact

SEQ ID NO: 12227 - DNA, 37 bp, synthetic construct
  misc_feature 1..37: note = Description of Artificial Sequence: Synthetic oligonucleotide
  source 1..37: mol_type = other DNA
gctttgccttgagtcaaaattcgtgggggacagcatc

SEQ ID NO: 12228 - DNA, 36 bp, synthetic construct
  misc_feature 1..36: note = Description of Artificial Sequence: Synthetic oligonucleotide
  source 1..36: mol_type = other DNA
gctttgccttgagtccaattcagaggctggcagaat

SEQ ID NO: 12229 - DNA, 29 bp, synthetic construct
  misc_feature 1..29: note = Description of Artificial Sequence: Synthetic oligonucleotide
  source 1..29: mol_type = other DNA
gctttgccttgattacaaagccggggggg

SEQ ID NO: 12230 - DNA, 36 bp, synthetic construct
  misc_feature 1..36: note = Description of Artificial Sequence: Synthetic oligonucleotide
  source 1..36: mol_type = other DNA
gctttgccttgattcaaaaacaggagggagcatcct

SEQ ID NO: 12231 - DNA, 36 bp, synthetic construct
  misc_feature 1..36: note = Description of Artificial Sequence: Synthetic oligonucleotide
  source 1..36: mol_type = other DNA
gctttgccttgattcaaaagtcgaagagtgcaatct

SEQ ID NO: 12232 - DNA, 36 bp, synthetic construct
  misc_feature 1..36: note = Description of Artificial Sequence: Synthetic oligonucleotide
  source 1..36: mol_type = other DNA
gctttgccttgattcaaaatccgagtgagcgactct

SEQ ID NO: 12233 - DNA, 37 bp, synthetic construct
  misc_feature 1..37: note = Description of Artificial Sequence: Synthetic oligonucleotide
  source 1..37: mol_type = other DNA
gctttgccttgattcaaattccggcgcgtggaagctc

SEQ ID NO: 12234 - DNA, 36 bp, synthetic construct
  misc_feature 1..36: note = Description of Artificial Sequence: Synthetic oligonucleotide
  source 1..36: mol_type = other DNA
gctttgccttgattccaaaaaccgggcgagcatact

SEQ ID NO: 12235 - DNA, 36 bp, synthetic construct
  misc_feature 1..36: note = Description of Artificial Sequence: Synthetic oligonucleotide
  source 1..36: mol_type = other DNA
gctttgccttgattccaaaaacgagggcggcaaact

SEQ ID NO: 12236 - DNA, 36 bp, synthetic construct
  misc_feature 1..36: note = Description of Artificial Sequence: Synthetic oligonucleotide
  source 1..36: mol_type = other DNA
gctttgccttgattccaaaaacgggcggcgcaaact

SEQ ID NO: 12237 - DNA, 36 bp, synthetic construct
  misc_feature 1..36: note = Description of Artificial Sequence: Synthetic oligonucleotide
  source 1..36: mol_type = other DNA
gctttgccttgattccaaaaacggggggagcaaact

SEQ ID NO: 12238 - DNA, 36 bp, synthetic construct
  misc_feature 1..36: note = Description of Artificial Sequence: Synthetic oligonucleotide
  source 1..36: mol_type = other DNA
gctttgccttgattccaaaaacgggggtggcaaact

SEQ ID NO: 12239 - DNA, 36 bp, synthetic construct
  misc_feature 1..36: note = Description of Artificial Sequence: Synthetic oligonucleotide
  source 1..36: mol_type = other DNA
gctttgccttgattccaaaaacgggtgcggcaaact

SEQ ID NO: 12240 - DNA, 36 bp, synthetic construct
  misc_feature 1..36: note = Description of Artificial Sequence: Synthetic oligonucleotide
  source 1..36: mol_type = other DNA
gctttgccttgattccaaaaatgggcgcggcagaat

SEQ ID NO: 12241 - DNA, 36 bp, synthetic construct
  misc_feature 1..36: note = Description of Artificial Sequence: Synthetic oligonucleotide
  source 1..36: mol_type = other DNA
gctttgccttgattccaaaaccggggagagcagagt

SEQ ID NO: 12242 - DNA, 36 bp, synthetic construct
  misc_feature 1..36: note = Description of Artificial Sequence: Synthetic oligonucleotide
  source 1..36: mol_type = other DNA
gctttgccttgattccaaagacggggggtgcaaaat

SEQ ID NO: 12243 - DNA, 36 bp, synthetic construct
  misc_feature 1..36: note = Description of Artificial Sequence: Synthetic oligonucleotide
  source 1..36: mol_type = other DNA
gctttgccttgattccaaatccggggggggcacaat

SEQ ID NO: 12244 - DNA, 36 bp, synthetic construct
  misc_feature 1..36: note = Description of Artificial Sequence: Synthetic oligonucleotide
  source 1..36: mol_type = other DNA
gctttgccttgattccaaatcttagacaggcaacat

SEQ ID NO: 12245 - DNA, 36 bp, synthetic construct
  misc_feature 1..36: note = Description of Artificial Sequence: Synthetic oligonucleotide
  source 1..36: mol_type = other DNA
gctttgccttgattccaaattcagtgcgagcaaact

SEQ ID NO: 12246 - DNA, 37 bp, synthetic construct
  misc_feature 1..37: note = Description of Artificial Sequence: Synthetic oligonucleotide
  source 1..37: mol_type = other DNA
gctttgccttgattccaaattcgcggagcggagcatc

SEQ ID NO: 12247 - DNA, 36 bp, synthetic construct
  misc_feature 1..36: note = Description of Artificial Sequence: Synthetic oligonucleotide
  source 1..36: mol_type = other DNA
gctttgccttgattccaacgacggggggtgcagaat

SEQ ID NO: 12248 - DNA, 36 bp, synthetic construct
  misc_feature 1..36: note = Description of Artificial Sequence: Synthetic oligonucleotide
  source 1..36: mol_type = other DNA
gctttgccttgattccaatcccggcggcggcaacgt

SEQ ID NO: 12249 - DNA, 36 bp, synthetic construct
  misc_feature 1..36: note = Description of Artificial Sequence: Synthetic oligonucleotide
  source 1..36: mol_type = other DNA
gctttgccttgattccaatcgcggggctggcagaat

SEQ ID NO: 12250 - DNA, 37 bp, synthetic construct
  misc_feature 1..37: note = Description of Artificial Sequence: Synthetic oligonucleotide
  source 1..37: mol_type = other DNA
gctttgccttgattccaatgacggggggggcagcatc

SEQ ID NO: 12251 - DNA, 36 bp, synthetic construct
  misc_feature 1..36: note = Description of Artificial Sequence: Synthetic oligonucleotide
  source 1..36: mol_type = other DNA
gctttgccttgattccaattcaaaggcgtagaaact

SEQ ID NO: 12252 - DNA, 36 bp, synthetic construct
  misc_feature 1..36: note = Description of Artificial Sequence: Synthetic oligonucleotide
  source 1..36: mol_type = other DNA
gctttgccttgattccaattcacaggctgagaaact

SEQ ID NO: 12253 - DNA, 36 bp, synthetic construct
  misc_feature 1..36: note = Description of Artificial Sequence: Synthetic oligonucleotide
  source 1..36: mol_type = other DNA
gctttgccttgattccaattcaggggcagagaaact

SEQ ID NO: 12254 - DNA, 37 bp, synthetic construct
  misc_feature 1..37: note = Description of Artificial Sequence: Synthetic oligonucleotide
  source 1..37: mol_type = other DNA
gctttgccttgattccaattccgaggggtggatgctc

SEQ ID NO: 12255 - DNA, 37 bp, synthetic construct
  misc_feature 1..37: note = Description of Artificial Sequence: Synthetic oligonucleotide
  source 1..37: mol_type = other DNA
gctttgccttgattccaattccggggggcggatgctc

SEQ ID NO: 12256 - DNA, 36 bp, synthetic construct
  misc_feature 1..36: note = Description of Artificial Sequence: Synthetic oligonucleotide
  source 1..36: mol_type = other DNA
gctttgccttgattccaattccgggtggagcagaat

SEQ ID NO: 12257 - DNA, 36 bp, synthetic construct
  misc_feature 1..36: note = Description of Artificial Sequence: Synthetic oligonucleotide
  source 1..36: mol_type = other DNA
gctttgccttgattccaattcttaggcagacaaact

SEQ ID NO: 12258 - DNA, 37 bp, synthetic construct
  misc_feature 1..37: note = Description of Artificial Sequence: Synthetic oligonucleotide
  source 1..37: mol_type = other DNA
gctttgccttgattccaatttcgagtagagcagtatc

SEQ ID NO: 12259 - DNA, 37 bp, synthetic construct
  misc_feature 1..37: note = Description of Artificial Sequence: Synthetic oligonucleotide
  source 1..37: mol_type = other DNA
gctttgccttgattccaatttcgcggagcggaagctc

SEQ ID NO: 12260 - DNA, 36 bp, synthetic construct
  misc_feature 1..36: note = Description of Artificial Sequence: Synthetic oligonucleotide
  source 1..36: mol_type = other DNA
gctttgccttgattccacttcctgacggagcaaagt

SEQ ID NO: 12261 - DNA, 36 bp, synthetic construct
  misc_feature 1..36: note = Description of Artificial Sequence: Synthetic oligonucleotide
  source 1..36: mol_type = other DNA
gctttgccttgattccagttctttgcagggcaatct

SEQ ID NO: 12262 - DNA, 36 bp, synthetic construct
  misc_feature 1..36: note = Description of Artificial Sequence: Synthetic oligonucleotide
  source 1..36: mol_type = other DNA
gctttgccttgattccatttcgtaggcagggaaact

SEQ ID NO: 12263 - DNA, 36 bp, synthetic construct
  misc_feature 1..36: note = Description of Artificial Sequence: Synthetic oligonucleotide
  source 1..36: mol_type = other DNA
gctttgccttgattccattttcgagtgatgtaaaat

SEQ ID NO: 12264 - DNA, 37 bp, synthetic construct
  misc_feature 1..37: note = Description of Artificial Sequence: Synthetic oligonucleotide
  source 1..37: mol_type = other DNA
gctttgccttgatttcaattccggggggtggagtatc

SEQ ID NO: 12265 - DNA, 36 bp, synthetic construct
  misc_feature 1..36: note = Description of Artificial Sequence: Synthetic oligonucleotide
  source 1..36: mol_type = other DNA
gctttgccttggtacaaatcccggggggggtaaaac

SEQ ID NO: 12266 - DNA, 36 bp, synthetic construct
  misc_feature 1..36: note = Description of Artificial Sequence: Synthetic oligonucleotide
  source 1..36: mol_type = other DNA
gctttgccttggttcaaaaggcgggggcagtaggct

SEQ ID NO: 12267 - DNA, 37 bp, synthetic construct
  misc_feature 1..37: note = Description of Artificial Sequence: Synthetic oligonucleotide
  source 1..37: mol_type = other DNA
gctttgccttggttccaaatttgaggtatgctgagtg

SEQ ID NO: 12268 - DNA, 38 bp, synthetic construct
  misc_feature 1..38: note = Description of Artificial Sequence: Synthetic oligonucleotide
  source 1..38: mol_type = other DNA
gctttgccttggttccaacgacgggggaagcggggtca

SEQ ID NO: 12269 - DNA, 36 bp, synthetic construct
  misc_feature 1..36: note = Description of Artificial Sequence: Synthetic oligonucleotide
  source 1..36: mol_type = other DNA
gctttgccttggttccgattaagaggctggtaagat

SEQ ID NO: 12270 - DNA, 37 bp, synthetic construct
  misc_feature 1..37: note = Description of Artificial Sequence: Synthetic oligonucleotide
  source 1..37: mol_type = other DNA
gctttggatggctgggaatcgcggctttgatagactt

SEQ ID NO: 12271 - DNA, 36 bp, synthetic construct
  misc_feature 1..36: note = Description of Artificial Sequence: Synthetic oligonucleotide
  source 1..36: mol_type = other DNA
gctttggatgtctgtcaatttaatgagtttcagaac

SEQ ID NO: 12272 - DNA, 37 bp, synthetic construct
  misc_feature 1..37: note = Description of Artificial Sequence: Synthetic oligonucleotide
  source 1..37: mol_type = other DNA
gctttggctggttgggaatcgcctctttgataaactc

SEQ ID NO: 12273 - DNA, 36 bp, synthetic construct
  misc_feature 1..36: note = Description of Artificial Sequence: Synthetic oligonucleotide
  source 1..36: mol_type = other DNA
gctttgtacccctctggatttacacagctctcaaac

SEQ ID NO: 12274 - DNA, 36 bp, synthetic construct
  misc_feature 1..36: note = Description of Artificial Sequence: Synthetic oligonucleotide
  source 1..36: mol_type = other DNA
gctttgtcttgattcagattcagagcgagggatgat

SEQ ID NO: 12275 - DNA, 24 bp, synthetic construct
  misc_feature 1..24: note = Description of Artificial Sequence: Synthetic oligonucleotide
  source 1..24: mol_type = other DNA
ggacaggcgccgatcagttacact

SEQ ID NO: 12276 - DNA, 46 bp, synthetic construct
  misc_feature 1..46: note = Description of Artificial Sequence: Synthetic oligonucleotide
  source 1..46: mol_type = other DNA
ggagctcaccgaaggtaattagtaccttgcgaggagcaagcacaac

SEQ ID NO: 12277 - DNA, 34 bp, synthetic construct
  misc_feature 1..34: note = Description of Artificial Sequence: Synthetic oligonucleotide
  source 1..34: mol_type = other DNA
ggagtctagcagggagagtggacagatcccccca

SEQ ID NO: 12278 - DNA, 36 bp, synthetic construct
  misc_feature 1..36: note = Description of Artificial Sequence: Synthetic oligonucleotide
  source 1..36: mol_type = other DNA
ggattagcagttcagaaatcgggggccaaccgcaac

SEQ ID NO: 12279 - DNA, 36 bp, synthetic construct
  misc_feature 1..36: note = Description of Artificial Sequence: Synthetic oligonucleotide
  source 1..36: mol_type = other DNA
ggcctagcagctcagaaatcgcaggccaacggcaac

SEQ ID NO: 12280 - DNA, 36 bp, synthetic construct
  misc_feature 1..36: note = Description of Artificial Sequence: Synthetic oligonucleotide
  source 1..36: mol_type = other DNA
ggcctagcagttcagaaatcgcaggccaaccgcaac

SEQ ID NO: 12281 - DNA, 36 bp, synthetic construct
  misc_feature 1..36: note = Description of Artificial Sequence: Synthetic oligonucleotide
  source 1..36: mol_type = other DNA
ggcctagcagttcagaaatcgcgggccaaccgcaac

SEQ ID NO: 12282 - DNA, 36 bp, synthetic construct
  misc_feature 1..36: note = Description of Artificial Sequence: Synthetic oligonucleotide
  source 1..36: mol_type = other DNA
ggcctagcatttcagagatcgagggccaaccgcaac

SEQ ID NO: 12283 - DNA, 39 bp, synthetic construct
  misc_feature 1..39: note = Description of Artificial Sequence: Synthetic oligonucleotide
  source 1..39: mol_type = other DNA
ggcgttgcggttggccctcaatcaccagaccgctaagat

SEQ ID NO: 12284 - DNA, 37 bp, synthetic construct
  misc_feature 1..37: note = Description of Artificial Sequence: Synthetic oligonucleotide
  source 1..37: mol_type = other DNA
ggctacttaaagcctgtaatttctactatttgtagat

SEQ ID NO: 12285 - DNA, 36 bp, synthetic construct
  misc_feature 1..36: note = Description of Artificial Sequence: Synthetic oligonucleotide
  source 1..36: mol_type = other DNA
ggcttagcagttcagaaatcgggcgccaaccgcaac

SEQ ID NO: 12286 - DNA, 36 bp, synthetic construct
  misc_feature 1..36: note = Description of Artificial Sequence: Synthetic oligonucleotide
  source 1..36: mol_type = other DNA
ggcttctagagggggatgttgagcgcccgccgggac

SEQ ID NO: 12287 - DNA, 37 bp, synthetic construct
  misc_feature 1..37: note = Description of Artificial Sequence: Synthetic oligonucleotide
  source 1..37: mol_type = other DNA
gggagaagtagatcaggaaatgcgttctcgccggaac

SEQ ID NO: 12288 - DNA, 46 bp, synthetic construct
  misc_feature 1..46: note = Description of Artificial Sequence: Synthetic oligonucleotide
  source 1..46: mol_type = other DNA
gggatgatttgctttcatttagttctttgaagatatttaaaacaac

SEQ ID NO: 12289 - DNA, 36 bp, synthetic construct
  misc_feature 1..36: note = Description of Artificial Sequence: Synthetic oligonucleotide
  source 1..36: mol_type = other DNA
ggtaacgggggtgtctgctttcgagggtccgacaac

SEQ ID NO: 12290 - DNA, 36 bp, synthetic construct
  misc_feature 1..36: note = Description of Artificial Sequence: Synthetic oligonucleotide
  source 1..36: mol_type = other DNA
ggtaagtagctgcccgaagcgcggtacctgcgaagt

SEQ ID NO: 12291 - DNA, 30 bp, synthetic construct
  misc_feature 1..30: note = Description of Artificial Sequence: Synthetic oligonucleotide
  source 1..30: mol_type = other DNA
ggtataaccgctcagagatcgcggtccagc

SEQ ID NO: 12292 - DNA, 46 bp, synthetic construct
  misc_feature 1..46: note = Description of Artificial Sequence: Synthetic oligonucleotide
  source 1..46: mol_type = other DNA
ggtattacagctcgtcaaagatcttgacctgaaagcctttcacaac

SEQ ID NO: 12293 - DNA, 36 bp, synthetic construct
  misc_feature 1..36: note = Description of Artificial Sequence: Synthetic oligonucleotide
  source 1..36: mol_type = other DNA
ggtcagtaaccctatgagataacacctatctcaaac

SEQ ID NO: 12294 - DNA, 47 bp, synthetic construct
  misc_feature 1..47: note = Description of Artificial Sequence: Synthetic oligonucleotide
  source 1..47: mol_type = other DNA
ggtccgacacaaaatacaattcgatcaaggtgaaagcaaatcggaac

SEQ ID NO: 12295 - DNA, 36 bp, synthetic construct
  misc_feature 1..36: note = Description of Artificial Sequence: Synthetic oligonucleotide
  source 1..36: mol_type = other DNA
ggtctagcagttcagaaatcgagggccaaccgcaac

SEQ ID NO: 12296 - DNA, 36 bp, synthetic construct
  misc_feature 1..36: note = Description of Artificial Sequence: Synthetic oligonucleotide
  source 1..36: mol_type = other DNA
ggtctagcagttcagaaatcgcaggccaaccgcaac

SEQ ID NO: 12297 - DNA, 31 bp, synthetic construct
  misc_feature 1..31: note = Description of Artificial Sequence: Synthetic oligonucleotide
  source 1..31: mol_type = other DNA
ggtctatcttaacaaaaatcagcggtcatcc

SEQ ID NO: 12298 - DNA, 36 bp, synthetic construct
  misc_feature 1..36: note = Description of Artificial Sequence: Synthetic oligonucleotide
  source 1..36: mol_type = other DNA
ggtgaatatcatttcaattttacatcaaaccacaac

SEQ ID NO: 12299 - DNA, 44 bp, synthetic construct
  misc_feature 1..44: note = Description of Artificial Sequence: Synthetic oligonucleotide
  source 1..44: mol_type = other DNA
ggtgattatcagtaggtcaaagatacaatttgaaagcaaatcac

SEQ ID NO: 12300 - DNA, 36 bp, synthetic construct
  misc_feature 1..36: note = Description of Artificial Sequence: Synthetic oligonucleotide
  source 1..36: mol_type = other DNA
ggtgcggaggtggtctcgttctgccgggtccacaac

SEQ ID NO: 12301 - DNA, 37 bp, synthetic construct
  misc_feature 1..37: note = Description of Artificial Sequence: Synthetic oligonucleotide
  source 1..37: mol_type = other DNA
ggtggacgagtaggtttacttccttgaggtctccaac

SEQ ID NO: 12302 - DNA, 47 bp, synthetic construct
  misc_feature 1..47: note = Description of Artificial Sequence: Synthetic oligonucleotide
  source 1..47: mol_type = other DNA
ggtggatcaggtccttgtcaaagatcgcattgagagcaaaccacgac

SEQ ID NO: 12303 - DNA, 36 bp, synthetic construct
  misc_feature 1..36: note = Description of Artificial Sequence: Synthetic oligonucleotide
  source 1..36: mol_type = other DNA
ggtggatcatgtagtagaaaagaacctattaacatc

SEQ ID NO: 12304 - DNA, 36 bp, synthetic construct
  misc_feature 1..36: note = Description of Artificial Sequence: Synthetic oligonucleotide
  source 1..36: mol_type = other DNA
ggtgtagcaaaacgagagacggccgcaatccgcagc

SEQ ID NO: 12305 - DNA, 36 bp, synthetic construct
  misc_feature 1..36: note = Description of Artificial Sequence: Synthetic oligonucleotide
  source 1..36: mol_type = other DNA
ggtgtatatcattcgtttcctacatcaaaccacaac

SEQ ID NO: 12306 - DNA, 47 bp, synthetic construct
  misc_feature 1..47: note = Description of Artificial Sequence: Synthetic oligonucleotide
  source 1..47: mol_type = other DNA
ggtgtatcacccaatacaaaaatacaaatttgaaagcaaatcacaac

SEQ ID NO: 12307 - DNA, 36 bp, synthetic construct
  misc_feature 1..36: note = Description of Artificial Sequence: Synthetic oligonucleotide
  source 1..36: mol_type = other DNA
ggtgtatcgatccgttcgtttgcggcagaccacagc

SEQ ID NO: 12308 - DNA, 47 bp, synthetic construct
  misc_feature 1..47: note = Description of Artificial Sequence: Synthetic oligonucleotide
  source 1..47: mol_type = other DNA
ggtgtctgcgataatgcaaagatactaatttttaagcaaatcacaac

SEQ ID NO: 12309 - DNA, 47 bp, synthetic construct
  misc_feature 1..47: note = Description of Artificial Sequence: Synthetic oligonucleotide
  source 1..47: mol_type = other DNA
ggtgtcttaggacttattcatttacaaatttgaaaggtatacacaac

SEQ ID NO: 12310 - DNA, 47 bp, synthetic construct
  misc_feature 1..47: note = Description of Artificial Sequence: Synthetic oligonucleotide
  source 1..47: mol_type = other DNA
ggtgtgattcacagtgcaaagataagaattttcagacaaatcacaac

SEQ ID NO: 12311 - DNA, 36 bp, synthetic construct
  misc_feature 1..36: note = Description of Artificial Sequence: Synthetic oligonucleotide
  source 1..36: mol_type = other DNA
ggtgtgattcagtcctgaaattacaattttgaaagc

SEQ ID NO: 12312 - DNA, 46 bp, synthetic construct
  misc_feature 1..46: note = Description of Artificial Sequence: Synthetic oligonucleotide
  source 1..46: mol_type = other DNA
ggtgtgctcaatacttcaaagatacaattcaaaagcaattcacaac

SEQ ID NO: 12313 - DNA, 46 bp, synthetic construct
  misc_feature 1..46: note = Description of Artificial Sequence: Synthetic oligonucleotide
  source 1..46: mol_type = other DNA
ggtgtggtaaatatcagtagttcaaagaatgaaagcaaatcacaac

SEQ ID NO: 12314 - DNA, 46 bp, synthetic construct
  misc_feature 1..46: note = Description of Artificial Sequence: Synthetic oligonucleotide
  source 1..46: mol_type = other DNA
ggtgtgtcaaagatcgttaaaccacaaattgaaagcaattcacaac

SEQ ID NO: 12315 - DNA, 46 bp, synthetic construct
  misc_feature 1..46: note = Description of Artificial Sequence: Synthetic oligonucleotide
  source 1..46: mol_type = other DNA
ggtgttaccagttcctcaaagatacaatttgaaagcaattcacaac

SEQ ID NO: 12316 - DNA, 47 bp, synthetic construct
  misc_feature 1..47: note = Description of Artificial Sequence: Synthetic oligonucleotide
  source 1..47: mol_type = other DNA
ggtgttagtcattatacataatatcgattctgaaagcaattcccaac

SEQ ID NO: 12317 - DNA, 36 bp, synthetic construct
  misc_feature 1..36: note = Description of Artificial Sequence: Synthetic oligonucleotide
  source 1..36: mol_type = other DNA
ggtgttcttccctagagtttgaaatcagttcacagc

SEQ ID NO: 12318 - DNA, 47 bp, synthetic construct
  misc_feature 1..47: note = Description of Artificial Sequence: Synthetic oligonucleotide
  source 1..47: mol_type = other DNA
ggtgttgttgaccttacaaaggtacaaaatttttagcaaatcacaac

SEQ ID NO: 12319 - DNA, 36 bp, synthetic construct
  misc_feature 1..36: note = Description of Artificial Sequence: Synthetic oligonucleotide
  source 1..36: mol_type = other DNA
ggtgtttaacgtgtatgtatgcaagccatttacaat

SEQ ID NO: 12320 - DNA, 47 bp, synthetic construct
  misc_feature 1..47: note = Description of Artificial Sequence: Synthetic oligonucleotide
  source 1..47: mol_type = other DNA
ggtgtttacactatttcaaagatacgaatttgaaagcaaatcacaac

SEQ ID NO: 12321 - DNA, 47 bp, synthetic construct
  misc_feature 1..47: note = Description of Artificial Sequence: Synthetic oligonucleotide
  source 1..47: mol_type = other DNA
ggtgtttatcaataagtcaaagatacattttgaaagcaaatcacaac

SEQ ID NO: 12322 - DNA, 47 bp, synthetic construct
  misc_feature 1..47: note = Description of Artificial Sequence: Synthetic oligonucleotide
  source 1..47: mol_type = other DNA
ggtgtttatcactctgcaaagatacgaaattttaagcaaatcacaac

SEQ ID NO: 12323 - DNA, 47 bp, synthetic construct
  misc_feature 1..47: note = Description of Artificial Sequence: Synthetic oligonucleotide
  source 1..47: mol_type = other DNA
ggtgtttatcagtgtgtcaaagatacaatttgaaagcaaatcacaac

SEQ ID NO: 12324 - DNA, 47 bp, synthetic construct
  misc_feature 1..47: note = Description of Artificial Sequence: Synthetic oligonucleotide
  source 1..47: mol_type = other DNA
ggtgtttatcctatttcaaagatacgaatttgaaagcaaatcacaac

SEQ ID NO: 12325 - DNA, 47 bp, synthetic construct
  misc_feature 1..47: note = Description of Artificial Sequence: Synthetic oligonucleotide
  source 1..47: mol_type = other DNA
ggtgtttatcgtaagtgtcaatgtcctctttttaagcaattcacaac

SEQ ID NO: 12326 - DNA, 47 bp, synthetic construct
  misc_feature 1..47: note = Description of Artificial Sequence: Synthetic oligonucleotide
  source 1..47: mol_type = other DNA
ggtgtttatcgtatgtgtcaatgtcctctttttaagcaattcacaac

SEQ ID NO: 12327 - DNA, 36 bp, synthetic construct
  misc_feature 1..36: note = Description of Artificial Sequence: Synthetic oligonucleotide
  source 1..36: mol_type = other DNA
ggtgtttatctgtctattcctacatcaaaccacaac

SEQ ID NO: 12328 - DNA, 47 bp, synthetic construct
  misc_feature 1..47: note = Description of Artificial Sequence: Synthetic oligonucleotide
  source 1..47: mol_type = other DNA
ggtgtttatgatagtgcaaagatgaagaatttcaagcaattcacaac

SEQ ID NO: 12329 - DNA, 47 bp, synthetic construct
  misc_feature 1..47: note = Description of Artificial Sequence: Synthetic oligonucleotide
  source 1..47: mol_type = other DNA
ggtgtttatgatggttcaaagatgaagaatttcaagcaattcacaac

SEQ ID NO: 12330 - DNA, 47 bp, synthetic construct
  misc_feature 1..47: note = Description of Artificial Sequence: Synthetic oligonucleotide
  source 1..47: mol_type = other DNA
ggtgtttatgccgctgcaaaggtactaattttttagcaaatcacaac

SEQ ID NO: 12331 - DNA, 47 bp, synthetic construct
  misc_feature 1..47: note = Description of Artificial Sequence: Synthetic oligonucleotide
  source 1..47: mol_type = other DNA
ggtgtttatggtcacacaaagatactaatttgaaagcaattcacaac

SEQ ID NO: 12332 - DNA, 47 bp, synthetic construct
  misc_feature 1..47: note = Description of Artificial Sequence: Synthetic oligonucleotide
  source 1..47: mol_type = other DNA
ggtgtttcagacctaccaaagatacaattttgagagcaaatcacaac

SEQ ID NO: 12333 - DNA, 36 bp, synthetic construct
  misc_feature 1..36: note = Description of Artificial Sequence: Synthetic oligonucleotide
  source 1..36: mol_type = other DNA
ggtgtttccgatgggaaattgaaatccattcacaac

SEQ ID NO: 12334 - DNA, 36 bp, synthetic construct
  misc_feature 1..36: note = Description of Artificial Sequence: Synthetic oligonucleotide
  source 1..36: mol_type = other DNA
ggtgtttcttatctttattttcaatagacatccaac

SEQ ID NO: 12335 - DNA, 47 bp, synthetic construct
  misc_feature 1..47: note = Description of Artificial Sequence: Synthetic oligonucleotide
  source 1..47: mol_type = other DNA
ggtgtttgttatcttgcaaagatacgaattttaaagcaaatcacaac

SEQ ID NO: 12336 - DNA, 36 bp, synthetic construct
  misc_feature 1..36: note = Description of Artificial Sequence: Synthetic oligonucleotide
  source 1..36: mol_type = other DNA
ggtgttttaaaccctaaaacgaaatcaattcacaac

SEQ ID NO: 12337 - DNA, 33 bp, synthetic construct
  misc_feature 1..33: note = Description of Artificial Sequence: Synthetic oligonucleotide
  source 1..33: mol_type = other DNA
ggtgttttacatctttgtttgaaagcaatctac

SEQ ID NO: 12338 - DNA, 37 bp, synthetic construct
  misc_feature 1..37: note = Description of Artificial Sequence: Synthetic oligonucleotide
  source 1..37: mol_type = other DNA
ggttcagttatacgctattttgacacgattctcaaac

SEQ ID NO: 12339 - DNA, 37 bp, synthetic construct
  misc_feature 1..37: note = Description of Artificial Sequence: Synthetic oligonucleotide
  source 1..37: mol_type = other DNA
ggttctagcagaacgagaaagggctgcaatccgcagc

SEQ ID NO: 12340 - DNA, 37 bp, synthetic construct
  misc_feature 1..37: note = Description of Artificial Sequence: Synthetic oligonucleotide
  source 1..37: mol_type = other DNA
ggttctagtttaatcgattttaataggagtcggtatc

SEQ ID NO: 12341 - DNA, 36 bp, synthetic construct
  misc_feature 1..36: note = Description of Artificial Sequence: Synthetic oligonucleotide
  source 1..36: mol_type = other DNA
ggttgactaccagtcagtttgtcactgctccaaaac

SEQ ID NO: 12342 - DNA, 37 bp, synthetic construct
  misc_feature 1..37: note = Description of Artificial Sequence: Synthetic oligonucleotide
  source 1..37: mol_type = other DNA
ggttgcggattgatttcaggccagggtcgattacact

SEQ ID NO: 12343 - DNA, 35 bp, synthetic construct
  misc_feature 1..35: note = Description of Artificial Sequence: Synthetic oligonucleotide
  source 1..35: mol_type = other DNA
ggttggttactatcagaaattacaatggtctcaaa

SEQ ID NO: 12344 - DNA, 37 bp, synthetic construct
  misc_feature 1..37: note = Description of Artificial Sequence: Synthetic oligonucleotide
  source 1..37: mol_type = other DNA
ggttgtaaatcttccttattctacatcaaaccacaac

SEQ ID NO: 12345 - DNA, 37 bp, synthetic construct
  misc_feature 1..37: note = Description of Artificial Sequence: Synthetic oligonucleotide
  source 1..37: mol_type = other DNA
ggttgtagcccccgctctcaccccggaacgctacaat

SEQ ID NO: 12346 - DNA, 47 bp, synthetic construct
  misc_feature 1..47: note = Description of Artificial Sequence: Synthetic oligonucleotide
  source 1..47: mol_type = other DNA
ggttgtcaaagacctttaaaattcaaagatagaaagcaattcacaac

SEQ ID NO: 12347 - DNA, 36 bp, synthetic construct
  misc_feature 1..36: note = Description of Artificial Sequence: Synthetic oligonucleotide
  source 1..36: mol_type = other DNA
ggttgtgaatagctgaaaaatcgtatcatatacaac

SEQ ID NO: 12348 - DNA, 37 bp, synthetic construct
  misc_feature 1..37: note = Description of Artificial Sequence: Synthetic oligonucleotide
  source 1..37: mol_type = other DNA
ggttgtgaattgctcttagtccttagtcggatacact

SEQ ID NO: 12349 - DNA, 38 bp, synthetic construct
  misc_feature 1..38: note = Description of Artificial Sequence: Synthetic oligonucleotide
  source 1..38: mol_type = other DNA
ggttgtgatttgcggttagaccttagtcggttacaata

SEQ ID NO: 12350 - DNA, 47 bp, synthetic construct
  misc_feature 1..47: note = Description of Artificial Sequence: Synthetic oligonucleotide
  source 1..47: mol_type = other DNA
ggttgtgatttgctttcatttcgtatctttgatttattgataacaac

SEQ ID NO: 12351 - DNA, 37 bp, synthetic construct
  misc_feature 1..37: note = Description of Artificial Sequence: Synthetic oligonucleotide
  source 1..37: mol_type = other DNA
ggttgtggtttgcgggcaggcatcagtcagttatatt

SEQ ID NO: 12352 - DNA, 47 bp, synthetic construct
  misc_feature 1..47: note = Description of Artificial Sequence: Synthetic oligonucleotide
  source 1..47: mol_type = other DNA
ggttgtgtatatccgtaaagttaaaaaatctgaaagcaaatcacaac

SEQ ID NO: 12353 - DNA, 36 bp, synthetic construct
  misc_feature 1..36: note = Description of Artificial Sequence: Synthetic oligonucleotide
  source 1..36: mol_type = other DNA
ggtttagcactctggaaaaggcgagccaaccgcaac

SEQ ID NO: 12354 - DNA, 38 bp, synthetic construct
  misc_feature 1..38: note = Description of Artificial Sequence: Synthetic oligonucleotide
  source 1..38: mol_type = other DNA
ggtttcaaactaagtgtttactagatataatttgttag

SEQ ID NO: 12355 - DNA, 37 bp, synthetic construct
  misc_feature 1..37: note = Description of Artificial Sequence: Synthetic oligonucleotide
  source 1..37: mol_type = other DNA
ggtttgagagctttgttaattcgataggttactaaac

SEQ ID NO: 12356 - DNA, 36 bp, synthetic construct
  misc_feature 1..36: note = Description of Artificial Sequence: Synthetic oligonucleotide
  source 1..36: mol_type = other DNA
ggtttgctcacctcgtttttggaaccaaggcaaagc

SEQ ID NO: 12357 - DNA, 36 bp, synthetic construct
  misc_feature 1..36: note = Description of Artificial Sequence: Synthetic oligonucleotide
  source 1..36: mol_type = other DNA
ggtttggaaccctttaaattaacaacactctcaaac

SEQ ID NO: 12358 - DNA, 38 bp, synthetic construct
  misc_feature 1..38: note = Description of Artificial Sequence: Synthetic oligonucleotide
  source 1..38: mol_type = other DNA
ggttttacatccttttgaattaacaaagctctcaaacc

SEQ ID NO: 12359 - DNA, 47 bp, synthetic construct
  misc_feature 1..47: note = Description of Artificial Sequence: Synthetic oligonucleotide
  source 1..47: mol_type = other DNA
ggttttgaattgctttcaattttagaaaaaaagtatctttgacatat

SEQ ID NO: 12360 - DNA, 37 bp, synthetic construct
  misc_feature 1..37: note = Description of Artificial Sequence: Synthetic oligonucleotide
  source 1..37: mol_type = other DNA
ggttttggagtcattcaaaacaacacagctctaaaac

SEQ ID NO: 12361 - DNA, 44 bp, synthetic construct
  misc_feature 1..44: note = Description of Artificial Sequence: Synthetic oligonucleotide
  source 1..44: mol_type = other DNA
gtaaaagaactaagctacataaaaatttgaaagcaattcacaac

SEQ ID NO: 12362 - DNA, 23 bp, synthetic construct
  misc_feature 1..23: note = Description of Artificial Sequence: Synthetic oligonucleotide
  source 1..23: mol_type = other DNA
gtaaaatcaaatggttccaaagg

SEQ ID NO: 12363 - DNA, 36 bp, synthetic construct
  misc_feature 1..36: note = Description of Artificial Sequence: Synthetic oligonucleotide
  source 1..36: mol_type = other DNA
gtaactatcattcctttttactcatcaaaccacaac

SEQ ID NO: 12364 - DNA, 36 bp, synthetic construct
  misc_feature 1..36: note = Description of Artificial Sequence: Synthetic oligonucleotide
  source 1..36: mol_type = other DNA
gtaagagaaccagctgaatcggcacaactctgaaac

SEQ ID NO: 12365 - DNA, 36 bp, synthetic construct
  misc_feature 1..36: note = Description of Artificial Sequence: Synthetic oligonucleotide
  source 1..36: mol_type = other DNA
gtaagagaaccaggtgatctggcacggctctgaaac

SEQ ID NO: 12366 - DNA, 36 bp, synthetic construct
  misc_feature 1..36: note = Description of Artificial Sequence: Synthetic oligonucleotide
  source 1..36: mol_type = other DNA
gtaagagtcataccttgttttacattactctcaaac

SEQ ID NO: 12367 - DNA, 38 bp, synthetic construct
  misc_feature 1..38: note = Description of Artificial Sequence: Synthetic oligonucleotide
  source 1..38: mol_type = other DNA
gtaattataccatgcagttttggaagggctggtatgag

SEQ ID NO: 12368 - DNA, 47 bp, synthetic construct
  misc_feature 1..47: note = Description of Artificial Sequence: Synthetic oligonucleotide
  source 1..47: mol_type = other DNA
gtaattctactctgtaaatctacaaaaatttgaaaggaattcacaac

SEQ ID NO: 12369 - DNA, 36 bp, synthetic construct
  misc_feature 1..36: note = Description of Artificial Sequence: Synthetic oligonucleotide
  source 1..36: mol_type = other DNA
gtacaagtttaccaatatccatcagagaactaaaac

SEQ ID NO: 12370 - DNA, 36 bp, synthetic construct
  misc_feature 1..36: note = Description of Artificial Sequence: Synthetic oligonucleotide
  source 1..36: mol_type = other DNA
gtactcggaactactgatctgacactcatccaagac

SEQ ID NO: 12371 - DNA, 36 bp, synthetic construct
  misc_feature 1..36: note = Description of Artificial Sequence: Synthetic oligonucleotide
  source 1..36: mol_type = other DNA
gtagaagataattctgatttaacaagactctcaaac

SEQ ID NO: 12372 - DNA, 36 bp, synthetic construct
  misc_feature 1..36: note = Description of Artificial Sequence: Synthetic oligonucleotide
  source 1..36: mol_type = other DNA
gtagcagtttaatcgaaatcttcaggagttggaatc

SEQ ID NO: 12373 - DNA, 36 bp, synthetic construct
  misc_feature 1..36: note = Description of Artificial Sequence: Synthetic oligonucleotide
  source 1..36: mol_type = other DNA
gtagcagtttaatctaaatcttcaggagttggaatc

SEQ ID NO: 12374 - DNA, 36 bp, synthetic construct
  misc_feature 1..36: note = Description of Artificial Sequence: Synthetic oligonucleotide
  source 1..36: mol_type = other DNA
gtagtagaaccatctggaatgacatagttccaaaac

SEQ ID NO: 12375 - DNA, 36 bp, synthetic construct
  misc_feature 1..36: note = Description of Artificial Sequence: Synthetic oligonucleotide
  source 1..36: mol_type = other DNA
gtagtatatcttttgactcctacatcaaaccacaac

SEQ ID NO: 12376 - DNA, 28 bp, synthetic construct
  misc_feature 1..28: note = Description of Artificial Sequence: Synthetic oligonucleotide
  source 1..28: mol_type = other DNA
gtagtgtaaattcagatggttcttaaac

SEQ ID NO: 12377 - DNA, 36 bp, synthetic construct
  misc_feature 1..36: note = Description of Artificial Sequence: Synthetic oligonucleotide
  source 1..36: mol_type = other DNA
gtataagtctatcaatatccatcagagaaccaaaac

SEQ ID NO: 12378 - DNA, 36 bp, synthetic construct
  misc_feature 1..36: note = Description of Artificial Sequence: Synthetic oligonucleotide
  source 1..36: mol_type = other DNA
gtataagtttatcaatatccaacagagtactaaaac

SEQ ID NO: 12379 - DNA, 36 bp, synthetic construct
  misc_feature 1..36: note = Description of Artificial Sequence: Synthetic oligonucleotide
  source 1..36: mol_type = other DNA
gtataagtttatcaatatccatcagagaactaaaac

SEQ ID NO: 12380 - DNA, 36 bp, synthetic construct
  misc_feature 1..36: note = Description of Artificial Sequence: Synthetic oligonucleotide
  source 1..36: mol_type = other DNA
gtataagtttatcaatattcatcagagagccaaaac

SEQ ID NO: 12381 - DNA, 36 bp, synthetic construct
  misc_feature 1..36: note = Description of Artificial Sequence: Synthetic oligonucleotide
  source 1..36: mol_type = other DNA
gtataagtttatcattgttcaacagagggctaaaac

SEQ ID NO: 12382 - DNA, 36 bp, synthetic construct
  misc_feature 1..36: note = Description of Artificial Sequence: Synthetic oligonucleotide
  source 1..36: mol_type = other DNA
gtatagtaatcatcatatttagcatacctagcaaac

SEQ ID NO: 12383 - DNA, 36 bp, synthetic construct
  misc_feature 1..36: note = Description of Artificial Sequence: Synthetic oligonucleotide
  source 1..36: mol_type = other DNA
gtatcacttatacctaaaattacagagtactaaaac

SEQ ID NO: 12384 - DNA, 36 bp, synthetic construct
  misc_feature 1..36: note = Description of Artificial Sequence: Synthetic oligonucleotide
  source 1..36: mol_type = other DNA
gtatcagtctcgccataaattacatgagcctcaaac

SEQ ID NO: 12385 - DNA, 36 bp, synthetic construct
  misc_feature 1..36: note = Description of Artificial Sequence: Synthetic oligonucleotide
  source 1..36: mol_type = other DNA
gtatcagtttacctatatccaacattgagctaaaac

SEQ ID NO: 12386 - DNA, 36 bp, synthetic construct
  misc_feature 1..36: note = Description of Artificial Sequence: Synthetic oligonucleotide
  source 1..36: mol_type = other DNA
gtatcagtttacctctatccaacagattactaaaac

SEQ ID NO: 12387 - DNA, 36 bp, synthetic construct
  misc_feature 1..36: note = Description of Artificial Sequence: Synthetic oligonucleotide
  source 1..36: mol_type = other DNA
gtatcagtttatcaatatccatcagagaaccaaaac

SEQ ID NO: 12388 - DNA, 36 bp, synthetic construct
  misc_feature 1..36: note = Description of Artificial Sequence: Synthetic oligonucleotide
  source 1..36: mol_type = other DNA
gtatccttataaccaaaaatttgagggtgccaaaac

SEQ ID NO: 12389 - DNA, 28 bp, synthetic construct
  misc_feature 1..28: note = Description of Artificial Sequence: Synthetic oligonucleotide
  source 1..28: mol_type = other DNA
gtatcggagaataccctgtgactataac

SEQ ID NO: 12390 - DNA, 36 bp, synthetic construct
  misc_feature 1..36: note = Description of Artificial Sequence: Synthetic oligonucleotide
  source 1..36: mol_type = other DNA
gtatcgggaataattgattttacattacactcaaac

SEQ ID NO: 12391 - DNA, 30 bp, synthetic construct
  misc_feature 1..30: note = Description of Artificial Sequence: Synthetic oligonucleotide
  source 1..30: mol_type = other DNA
gtattaatagtagcaaagtgtaatgtaaat

SEQ ID NO: 12392 - DNA, 31 bp, synthetic construct
  misc_feature 1..31: note = Description of Artificial Sequence: Synthetic oligonucleotide
  source 1..31: mol_type = other DNA
gtattaattgaatcaaactgaaatgtaaatt

SEQ ID NO: 12393 - DNA, 36 bp, synthetic construct
  misc_feature 1..36: note = Description of Artificial Sequence: Synthetic oligonucleotide
  source 1..36: mol_type = other DNA
gtattaattgtaagcaaattagcaggggttggaatc

SEQ ID NO: 12394 - DNA, 36 bp, synthetic construct
  misc_feature 1..36: note = Description of Artificial Sequence: Synthetic oligonucleotide
  source 1..36: mol_type = other DNA
gtattagaatagcaaaataatttagggtagcaaaac

SEQ ID NO: 12395 - DNA, 36 bp, synthetic construct
  misc_feature 1..36: note = Description of Artificial Sequence: Synthetic oligonucleotide
  source 1..36: mol_type = other DNA
gtattagaggcattcaaatcaacatggctctaaaac

SEQ ID NO: 12396 - DNA, 36 bp, synthetic construct
  misc_feature 1..36: note = Description of Artificial Sequence: Synthetic oligonucleotide
  source 1..36: mol_type = other DNA
gtattagtttatcaatattcatcagaggactaaaac

SEQ ID NO: 12397 - DNA, 37 bp, synthetic construct
  misc_feature 1..37: note = Description of Artificial Sequence: Synthetic oligonucleotide
  source 1..37: mol_type = other DNA
gtattagtttatcaatattcatcagaggactaaaacc

SEQ ID NO: 12398 - DNA, 29 bp, synthetic construct
  misc_feature 1..29: note = Description of Artificial Sequence: Synthetic oligonucleotide
  source 1..29: mol_type = other DNA
gtattccccacgcacgtgggggtgaaccg

SEQ ID NO: 12399 - DNA, 36 bp, synthetic construct
  misc_feature 1..36: note = Description of Artificial Sequence: Synthetic oligonucleotide
  source 1..36: mol_type = other DNA
gtatttaggtagcaaaaatttagagggtagcaaaac

SEQ ID NO: 12400 - DNA, 30 bp, synthetic construct
  misc_feature 1..30: note = Description of Artificial Sequence: Synthetic oligonucleotide
  source 1..30: mol_type = other DNA
gtcaaagcgcatatcccaatcgtctagact

SEQ ID NO: 12401 - DNA, 36 bp, synthetic construct
  misc_feature 1..36: note = Description of Artificial Sequence: Synthetic oligonucleotide
  source 1..36: mol_type = other DNA
gtcagtaacttagtaaaaagaaccatacttaaaatc

SEQ ID NO: 12402 - DNA, 36 bp, synthetic construct
  misc_feature 1..36: note = Description of Artificial Sequence: Synthetic oligonucleotide
  source 1..36: mol_type = other DNA
gtcatagaagtatcaatattcacatcattctcaaac

SEQ ID NO: 12403 - DNA, 36 bp, synthetic construct
  misc_feature 1..36: note = Description of Artificial Sequence: Synthetic oligonucleotide
  source 1..36: mol_type = other DNA
gtcatagcatttcagaaatcgcggtccagctgcaac

SEQ ID NO: 12404 - DNA, 36 bp, synthetic construct
  misc_feature 1..36: note = Description of Artificial Sequence: Synthetic oligonucleotide
  source 1..36: mol_type = other DNA
gtcatagcttcccatccgacacggctatgctatgat

SEQ ID NO: 12405 - DNA, 36 bp, synthetic construct
  misc_feature 1..36: note = Description of Artificial Sequence: Synthetic oligonucleotide
  source 1..36: mol_type = other DNA
gtcatagcttcccgtccgacacggctgtgcaatgat

SEQ ID NO: 12406 - DNA, 36 bp, synthetic construct
  misc_feature 1..36: note = Description of Artificial Sequence: Synthetic oligonucleotide
  source 1..36: mol_type = other DNA
gtcatagcttcccttccgacacggttatgctatgat

SEQ ID NO: 12407 - DNA, 36 bp, synthetic construct
  misc_feature 1..36: note = Description of Artificial Sequence: Synthetic oligonucleotide
  source 1..36: mol_type = other DNA
gtcatagttcccctgagattatcgctgtggtataat

SEQ ID NO: 12408 - DNA, 36 bp, synthetic construct
  misc_feature 1..36: note = Description of Artificial Sequence: Synthetic oligonucleotide
  source 1..36: mol_type = other DNA
gtcatatattactaaaaatgtatagggtcctgtaac

SEQ ID NO: 12409 - DNA, 36 bp, synthetic construct
  misc_feature 1..36: note = Description of Artificial Sequence: Synthetic oligonucleotide
  source 1..36: mol_type = other DNA
gtcatatcgatacccctaccaaagatatgatataat

SEQ ID NO: 12410 - DNA, 36 bp, synthetic construct
  misc_feature 1..36: note = Description of Artificial Sequence: Synthetic oligonucleotide
  source 1..36: mol_type = other DNA
gtcatgtcataccaaggaacatcagggagttacaac

SEQ ID NO: 12411 - DNA, 36 bp, synthetic construct
  misc_feature 1..36: note = Description of Artificial Sequence: Synthetic oligonucleotide
  source 1..36: mol_type = other DNA
gtccgggcttgaccaccccgcgccttatgctacaat

SEQ ID NO: 12412 - DNA, 36 bp, synthetic construct
  misc_feature 1..36: note = Description of Artificial Sequence: Synthetic oligonucleotide
  source 1..36: mol_type = other DNA
gtccgggcttggccacgccgcttcttctgctaggat

SEQ ID NO: 12413 - DNA, 36 bp, synthetic construct
  misc_feature 1..36: note = Description of Artificial Sequence: Synthetic oligonucleotide
  source 1..36: mol_type = other DNA
gtccgggtttgaccgcgtcgcgtcttctgctagaac

SEQ ID NO: 12414 - DNA, 36 bp, synthetic construct
  misc_feature 1..36: note = Description of Artificial Sequence: Synthetic oligonucleotide
  source 1..36: mol_type = other DNA
gtccgggtttggccgcgtcgcttcttctgctaggat

SEQ ID NO: 12415 - DNA, 37 bp, synthetic construct
  misc_feature 1..37: note = Description of Artificial Sequence: Synthetic oligonucleotide
  source 1..37: mol_type = other DNA
gtccggttgacctcgcagcttccaagtcgatacgttc

SEQ ID NO: 12416 - DNA, 36 bp, synthetic construct
  misc_feature 1..36: note = Description of Artificial Sequence: Synthetic oligonucleotide
  source 1..36: mol_type = other DNA
gtcctaccatcggcaaatcggtagggaaaccacggc

SEQ ID NO: 12417 - DNA, 36 bp, synthetic construct
  misc_feature 1..36: note = Description of Artificial Sequence: Synthetic oligonucleotide
  source 1..36: mol_type = other DNA
gtcctaccatcggcaagtcggtagggaaaccacggc

SEQ ID NO: 12418 - DNA, 36 bp, synthetic construct
  misc_feature 1..36: note = Description of Artificial Sequence: Synthetic oligonucleotide
  source 1..36: mol_type = other DNA
gtcctaccatgggcaaatcggtagggaaaccacggc

SEQ ID NO: 12419 - DNA, 33 bp, synthetic construct
  misc_feature 1..33: note = Description of Artificial Sequence: Synthetic oligonucleotide
  source 1..33: mol_type = other DNA
gtcgcaccccgcccggggtgcgtggattgaaac

SEQ ID NO: 12420 - DNA, 33 bp, synthetic construct
  misc_feature 1..33: note = Description of Artificial Sequence: Synthetic oligonucleotide
  source 1..33: mol_type = other DNA
gtcgcaccccgctcggggtgcgtggattgaaac

SEQ ID NO: 12421 - DNA, 36 bp, synthetic construct
  misc_feature 1..36: note = Description of Artificial Sequence: Synthetic oligonucleotide
  source 1..36: mol_type = other DNA
gtcggagacggcccgcaatctcttttctgataaact

SEQ ID NO: 12422 - DNA, 36 bp, synthetic construct
  misc_feature 1..36: note = Description of Artificial Sequence: Synthetic oligonucleotide
  source 1..36: mol_type = other DNA
gtcggggtaggacgccctctcgggttcagtagactc

SEQ ID NO: 12423 - DNA, 36 bp, synthetic construct
  misc_feature 1..36: note = Description of Artificial Sequence: Synthetic oligonucleotide
  source 1..36: mol_type = other DNA
gtcgggtgcgggcaccaaatcgggttcagctaacct

SEQ ID NO: 12424 - DNA, 36 bp, synthetic construct
  misc_feature 1..36: note = Description of Artificial Sequence: Synthetic oligonucleotide
  source 1..36: mol_type = other DNA
gtcgtagttcccaattttctctcgtagtggtataat

SEQ ID NO: 12425 - DNA, 36 bp, synthetic construct
  misc_feature 1..36: note = Description of Artificial Sequence: Synthetic oligonucleotide
  source 1..36: mol_type = other DNA
gtcgtagttccccgttttctctcgtagtggtataac

SEQ ID NO: 12426 - DNA, 36 bp, synthetic construct
  misc_feature 1..36: note = Description of Artificial Sequence: Synthetic oligonucleotide
  source 1..36: mol_type = other DNA
gtcgtagttcccctaagattattgctgtgatatgat

SEQ ID NO: 12427 - DNA, 36 bp, synthetic construct
  misc_feature 1..36: note = Description of Artificial Sequence: Synthetic oligonucleotide
  source 1..36: mol_type = other DNA
gtcgtagttcccggttattacttggtatggtataat

SEQ ID NO: 12428 - DNA, 36 bp, synthetic construct
  misc_feature 1..36: note = Description of Artificial Sequence: Synthetic oligonucleotide
  source 1..36: mol_type = other DNA
gtcgtagttccctctctcaccccggatagctacgat

SEQ ID NO: 12429 - DNA, 36 bp, synthetic construct
  misc_feature 1..36: note = Description of Artificial Sequence: Synthetic oligonucleotide
  source 1..36: mol_type = other DNA
gtcgtagttccctgttttctctcgtagtggtataat

SEQ ID NO: 12430 - DNA, 46 bp, synthetic construct
  misc_feature 1..46: note = Description of Artificial Sequence: Synthetic oligonucleotide
  source 1..46: mol_type = other DNA
gtcgtcagagaccaagttaatcaaaaaatcgaaagcaattcacgac

SEQ ID NO: 12431 - DNA, 37 bp, synthetic construct
  misc_feature 1..37: note = Description of Artificial Sequence: Synthetic oligonucleotide
  source 1..37: mol_type = other DNA
gtcgtgggttccctgcaattcaccctctggtaaaatc

SEQ ID NO: 12432 - DNA, 36 bp, synthetic construct
  misc_feature 1..36: note = Description of Artificial Sequence: Synthetic oligonucleotide
  source 1..36: mol_type = other DNA
gtctaattctagcaaaattccatatggtaacaaaac

SEQ ID NO: 12433 - DNA, 34 bp, synthetic construct
  misc_feature 1..34: note = Description of Artificial Sequence: Synthetic oligonucleotide
  source 1..34: mol_type = other DNA
gtctagcactctggaaaagagggatcaactgtaa

SEQ ID NO: 12434 - DNA, 35 bp, synthetic construct
  misc_feature 1..35: note = Description of Artificial Sequence: Synthetic oligonucleotide
  source 1..35: mol_type = other DNA
gtctatcaaagccgcgattcccggccatccaaagc

SEQ ID NO: 12435 - DNA, 33 bp, synthetic construct
  misc_feature 1..33: note = Description of Artificial Sequence: Synthetic oligonucleotide
  source 1..33: mol_type = other DNA
gtctcaatgcacctacaggtgcgtggtgctccc

SEQ ID NO: 12436 - DNA, 36 bp, synthetic construct
  misc_feature 1..36: note = Description of Artificial Sequence: Synthetic oligonucleotide
  source 1..36: mol_type = other DNA
gtctcaggtagatgtcgaatcaatcagttcaagagc

SEQ ID NO: 12437 - DNA, 36 bp, synthetic construct
  misc_feature 1..36: note = Description of Artificial Sequence: Synthetic oligonucleotide
  source 1..36: mol_type = other DNA
gtctgaaacctatacgaattaacaaggctctcaaac

SEQ ID NO: 12438 - DNA, 36 bp, synthetic construct
  misc_feature 1..36: note = Description of Artificial Sequence: Synthetic oligonucleotide
  source 1..36: mol_type = other DNA
gtctgacacctatacgaattaacaaggctctcaaac

SEQ ID NO: 12439 - DNA, 36 bp, synthetic construct
  misc_feature 1..36: note = Description of Artificial Sequence: Synthetic oligonucleotide
  source 1..36: mol_type = other DNA
gtctgacatacttatttacttacaaggttctcaagc

SEQ ID NO: 12440 - DNA, 36 bp, synthetic construct
  misc_feature 1..36: note = Description of Artificial Sequence: Synthetic oligonucleotide
  source 1..36: mol_type = other DNA
gtctgatacacatctgaattaacaaggctctcaaac

SEQ ID NO: 12441 - DNA, 36 bp, synthetic construct
  misc_feature 1..36: note = Description of Artificial Sequence: Synthetic oligonucleotide
  source 1..36: mol_type = other DNA
gtctgatacctatattcacttacaaggttctcaagc

SEQ ID NO: 12442 - DNA, 36 bp, synthetic construct
  misc_feature 1..36: note = Description of Artificial Sequence: Synthetic oligonucleotide
  source 1..36: mol_type = other DNA
gtctgggagttatgcgatttagtaaggctctttaac

SEQ ID NO: 12443 - DNA, 36 bp, synthetic construct
  misc_feature 1..36: note = Description of Artificial Sequence: Synthetic oligonucleotide
  source 1..36: mol_type = other DNA
gtctgggctgggcgccatatcggattcaggtaagat

SEQ ID NO: 12444 - DNA, 37 bp, synthetic construct
  misc_feature 1..37: note = Description of Artificial Sequence: Synthetic oligonucleotide
  source 1..37: mol_type = other DNA
gtctggttgacccgtctgtttccaagtcgctaggttc

SEQ ID NO: 12445 - DNA, 36 bp, synthetic construct
  misc_feature 1..36: note = Description of Artificial Sequence: Synthetic oligonucleotide
  source 1..36: mol_type = other DNA
gtcttacaacttccagaaatcacatagttcccaaac

SEQ ID NO: 12446 - DNA, 36 bp, synthetic construct
  misc_feature 1..36: note = Description of Artificial Sequence: Synthetic oligonucleotide
  source 1..36: mol_type = other DNA
gtcttacttccccaaaaaacgattcggtgatatcat

SEQ ID NO: 12447 - DNA, 35 bp, synthetic construct
  misc_feature 1..35: note = Description of Artificial Sequence: Synthetic oligonucleotide
  source 1..35: mol_type = other DNA
gtcttagcagagaaaacgtcggggcccaaccgcaa

SEQ ID NO: 12448 - DNA, 36 bp, synthetic construct
  misc_feature 1..36: note = Description of Artificial Sequence: Synthetic oligonucleotide
  source 1..36: mol_type = other DNA
gtcttagcagatcactcgacagagcccaaccggaac

SEQ ID NO: 12449 - DNA, 36 bp, synthetic construct
  misc_feature 1..36: note = Description of Artificial Sequence: Synthetic oligonucleotide
  source 1..36: mol_type = other DNA
gtcttagctccccgccacactccgaagtgctatgct

SEQ ID NO: 12450 - DNA, 36 bp, synthetic construct
  misc_feature 1..36: note = Description of Artificial Sequence: Synthetic oligonucleotide
  source 1..36: mol_type = other DNA
gtcttagtagtatctagaataacataactctcaaac

SEQ ID NO: 12451 - DNA, 37 bp, synthetic construct
  misc_feature 1..37: note = Description of Artificial Sequence: Synthetic oligonucleotide
  source 1..37: mol_type = other DNA
gtcttatcctagcaaaaatccatatggtaacaaaact

SEQ ID NO: 12452 - DNA, 36 bp, synthetic construct
  misc_feature 1..36: note = Description of Artificial Sequence: Synthetic oligonucleotide
  source 1..36: mol_type = other DNA
gtcttattctagcaaaaaatcatatggtaacaaaac

SEQ ID NO: 12453 - DNA, 36 bp, synthetic construct
  misc_feature 1..36: note = Description of Artificial Sequence: Synthetic oligonucleotide
  source 1..36: mol_type = other DNA
gtcttattctagcaaaaatccatatggtaacaaaac

SEQ ID NO: 12454 - DNA, 36 bp, synthetic construct
  misc_feature 1..36: note = Description of Artificial Sequence: Synthetic oligonucleotide
  source 1..36: mol_type = other DNA
gtcttattctcctcttaattgacagagaactaaaac

SEQ ID NO: 12455 - DNA, 36 bp, synthetic construct
  misc_feature 1..36: note = Description of Artificial Sequence: Synthetic oligonucleotide
  source 1..36: mol_type = other DNA
gtcttgattaccgtacgatctcccaggtagtaaaat

SEQ ID NO: 12456 - DNA, 36 bp, synthetic construct
  misc_feature 1..36: note = Description of Artificial Sequence: Synthetic oligonucleotide
  source 1..36: mol_type = other DNA
gtcttgattaccgtgcgatctcccaggtagtaaaat

SEQ ID NO: 12457 - DNA, 36 bp, synthetic construct
  misc_feature 1..36: note = Description of Artificial Sequence: Synthetic oligonucleotide
  source 1..36: mol_type = other DNA
gtcttggtggccactcaactccccagttgatacaat

SEQ ID NO: 12458 - DNA, 36 bp, synthetic construct
  misc_feature 1..36: note = Description of Artificial Sequence: Synthetic oligonucleotide
  source 1..36: mol_type = other DNA
gtctttgtttaccaatgaatgtccgagacctaaaac

SEQ ID NO: 12459 - DNA, 45 bp, synthetic construct
  misc_feature 1..45: note = Description of Artificial Sequence: Synthetic oligonucleotide
  source 1..45: mol_type = other DNA
gtgaattgcttgcatttatcttgtatctttgctctttgaaacaac

SEQ ID NO: 12460 - DNA, 43 bp, synthetic construct
  misc_feature 1..43: note = Description of Artificial Sequence: Synthetic oligonucleotide
  source 1..43: mol_type = other DNA
gtgaattgctttcaaaattgtatctttgaggattagaaacagc

SEQ ID NO: 12461 - DNA, 36 bp, synthetic construct
  misc_feature 1..36: note = Description of Artificial Sequence: Synthetic oligonucleotide
  source 1..36: mol_type = other DNA
gtgagacttaagttagaaatagcaatagtctcaaac

SEQ ID NO: 12462 - DNA, 36 bp, synthetic construct
  misc_feature 1..36: note = Description of Artificial Sequence: Synthetic oligonucleotide
  source 1..36: mol_type = other DNA
gtgcaaataatacgaacaattccaatccttaagaac

SEQ ID NO: 12463 - DNA, 36 bp, synthetic construct
  misc_feature 1..36: note = Description of Artificial Sequence: Synthetic oligonucleotide
  source 1..36: mol_type = other DNA
gtgcaaatattacgaataaatctaatcctcaagaac

SEQ ID NO: 12464 - DNA, 36 bp, synthetic construct
  misc_feature 1..36: note = Description of Artificial Sequence: Synthetic oligonucleotide
  source 1..36: mol_type = other DNA
gtgcaactaccagtcaaaacgacgctgcgccaaaac

SEQ ID NO: 12465 - DNA, 36 bp, synthetic construct
  misc_feature 1..36: note = Description of Artificial Sequence: Synthetic oligonucleotide
  source 1..36: mol_type = other DNA
gtgcgattaccagtcagaacggcactgctccaaaac

SEQ ID NO: 12466 - DNA, 37 bp, synthetic construct
  misc_feature 1..37: note = Description of Artificial Sequence: Synthetic oligonucleotide
  source 1..37: mol_type = other DNA
gtgcgtagtagatcaggaaatgcgctctagccggaac

SEQ ID NO: 12467 - DNA, 29 bp, synthetic construct
  misc_feature 1..29: note = Description of Artificial Sequence: Synthetic oligonucleotide
  source 1..29: mol_type = other DNA
gtggtttgatgtagaagaatgataaaaga

SEQ ID NO: 12468 - DNA, 35 bp, synthetic construct
  misc_feature 1..35: note = Description of Artificial Sequence: Synthetic oligonucleotide
  source 1..35: mol_type = other DNA
gtgtaaccaatcccggcctgcgaccaatccgcaac

SEQ ID NO: 12469 - DNA, 36 bp, synthetic construct
  misc_feature 1..36: note = Description of Artificial Sequence: Synthetic oligonucleotide
  source 1..36: mol_type = other DNA
gtgtaagtttatcaatatccatcagagaaccaaaac

SEQ ID NO: 12470 - DNA, 36 bp, synthetic construct
  misc_feature 1..36: note = Description of Artificial Sequence: Synthetic oligonucleotide
  source 1..36: mol_type = other DNA
gtgtaagtttatcaatatccatcggagaaccaaaac

SEQ ID NO: 12471 - DNA, 36 bp, synthetic construct
  misc_feature 1..36: note = Description of Artificial Sequence: Synthetic oligonucleotide
  source 1..36: mol_type = other DNA
gtgtaattctatcaatatccgacaaggaactaaaac

SEQ ID NO: 12472 - DNA, 44 bp, synthetic construct
  misc_feature 1..44: note = Description of Artificial Sequence: Synthetic oligonucleotide
  source 1..44: mol_type = other DNA
gtgtatgccatatgttagatacaagtttgaaagcaattcacaac

SEQ ID NO: 12473 - DNA, 35 bp, synthetic construct
  misc_feature 1..35: note = Description of Artificial Sequence: Synthetic oligonucleotide
  source 1..35: mol_type = other DNA
gtgtgcaaatatcattatttaaaccaactcacaac

SEQ ID NO: 12474 - DNA, 24 bp, synthetic construct
  misc_feature 1..24: note = Description of Artificial Sequence: Synthetic oligonucleotide
  source 1..24: mol_type = other DNA
gtgtgttctacatcaaaccacaac

SEQ ID NO: 12475 - DNA, 44 bp, synthetic construct
  misc_feature 1..44: note = Description of Artificial Sequence: Synthetic oligonucleotide
  source 1..44: mol_type = other DNA
gtgttgtatcccaaagatacttaaaaatgaaagcaattcacaac

SEQ ID NO: 12476 - DNA, 29 bp, synthetic construct
  misc_feature 1..29: note = Description of Artificial Sequence: Synthetic oligonucleotide
  source 1..29: mol_type = other DNA
gtgtttcccccacgtatgggggtaaaccg

SEQ ID NO: 12477 - DNA, 36 bp, synthetic construct
  misc_feature 1..36: note = Description of Artificial Sequence: Synthetic oligonucleotide
  source 1..36: mol_type = other DNA
gttaaacacctatcttaaataacacgacactcaaac

SEQ ID NO: 12478 - DNA, 36 bp, synthetic construct
  misc_feature 1..36: note = Description of Artificial Sequence: Synthetic oligonucleotide
  source 1..36: mol_type = other DNA
gttaaagaaccctacgaaattacacacctctcaaac

SEQ ID NO: 12479 - DNA, 36 bp, synthetic construct
  misc_feature 1..36: note = Description of Artificial Sequence: Synthetic oligonucleotide
  source 1..36: mol_type = other DNA
gttaaagcctagatttaaattacacaactctcaaac

SEQ ID NO: 12480 - DNA, 35 bp, synthetic construct
  misc_feature 1..35: note = Description of Artificial Sequence: Synthetic oligonucleotide
  source 1..35: mol_type = other DNA
gttaatgcctatcggaaaattacagggagctaaaa

SEQ ID NO: 12481 - DNA, 36 bp, synthetic construct
  misc_feature 1..36: note = Description of Artificial Sequence: Synthetic oligonucleotide
  source 1..36: mol_type = other DNA
gttacaaaccgaccaattttcttagtaaactgtatt

SEQ ID NO: 12482 - DNA, 37 bp, synthetic construct
  misc_feature 1..37: note = Description of Artificial Sequence: Synthetic oligonucleotide
  source 1..37: mol_type = other DNA
gttacagagtttatcctaaaaatcctccaactgaaac

SEQ ID NO: 12483 - DNA, 37 bp, synthetic construct
  misc_feature 1..37: note = Description of Artificial Sequence: Synthetic oligonucleotide
  source 1..37: mol_type = other DNA
gttacagatcaaatgccaaagaaccaaccattgaaac

SEQ ID NO: 12484 - DNA, 36 bp, synthetic construct
  misc_feature 1..36: note = Description of Artificial Sequence: Synthetic oligonucleotide
  source 1..36: mol_type = other DNA
gttacagcttgacaccaaaatgtagttttcaaagat

SEQ ID NO: 12485 - DNA, 36 bp, synthetic construct
  misc_feature 1..36: note = Description of Artificial Sequence: Synthetic oligonucleotide
  source 1..36: mol_type = other DNA
gttacagcttgacaccaaacagctgtgttattcaat

SEQ ID NO: 12486 - DNA, 36 bp, synthetic construct
  misc_feature 1..36: note = Description of Artificial Sequence: Synthetic oligonucleotide
  source 1..36: mol_type = other DNA
gttacagcttgacaccaaatcagtttgatctataac

SEQ ID NO: 12487 - DNA, 36 bp, synthetic construct
  misc_feature 1..36: note = Description of Artificial Sequence: Synthetic oligonucleotide
  source 1..36: mol_type = other DNA
gttacaggaccctgttaatttttagtaatgtatgac

SEQ ID NO: 12488 - DNA, 36 bp, synthetic construct
  misc_feature 1..36: note = Description of Artificial Sequence: Synthetic oligonucleotide
  source 1..36: mol_type = other DNA
gttacaggaccctgttgatttttagtaatgtataac

SEQ ID NO: 12489 - DNA, 36 bp, synthetic construct
  misc_feature 1..36: note = Description of Artificial Sequence: Synthetic oligonucleotide
  source 1..36: mol_type = other DNA
gttacagttcccctcagttctccggtatgctataat

SEQ ID NO: 12490 - DNA, 36 bp, synthetic construct
  misc_feature 1..36: note = Description of Artificial Sequence: Synthetic oligonucleotide
  source 1..36: mol_type = other DNA
gttaccagaatgctccggggggagcgagatcaaaac

SEQ ID NO: 12491 - DNA, 26 bp, synthetic construct
  misc_feature 1..26: note = Description of Artificial Sequence: Synthetic oligonucleotide
  source 1..26: mol_type = other DNA
gttacctccacacttgctaatacagc

SEQ ID NO: 12492 - DNA, 36 bp, synthetic construct
  misc_feature 1..36: note = Description of Artificial Sequence: Synthetic oligonucleotide
  source 1..36: mol_type = other DNA
gttacgactggacactaaaatctgatatgctataat

SEQ ID NO: 12493 - DNA, 36 bp, synthetic construct
  misc_feature 1..36: note = Description of Artificial Sequence: Synthetic oligonucleotide
  source 1..36: mol_type = other DNA
gttacggccagagcgcaattcccgatctgttaaact

SEQ ID NO: 12494 - DNA, 36 bp, synthetic construct
  misc_feature 1..36: note = Description of Artificial Sequence: Synthetic oligonucleotide
  source 1..36: mol_type = other DNA
gttacggtttgcggccactttctaatctgctaaaat

SEQ ID NO: 12495 - DNA, 36 bp, synthetic construct
  misc_feature 1..36: note = Description of Artificial Sequence: Synthetic oligonucleotide
  source 1..36: mol_type = other DNA
gttactacttgactattaaatttgatattcattaat

SEQ ID NO: 12496 - DNA, 36 bp, synthetic construct
  misc_feature 1..36: note = Description of Artificial Sequence: Synthetic oligonucleotide
  source 1..36: mol_type = other DNA
gttagacagtataaatagataacactactctcaaac

SEQ ID NO: 12497 - DNA, 36 bp, synthetic construct
  misc_feature 1..36: note = Description of Artificial Sequence: Synthetic oligonucleotide
  source 1..36: mol_type = other DNA
gttagggttgccccccgaaatgttatttgataaaat

SEQ ID NO: 12498 - DNA, 36 bp, synthetic construct
  misc_feature 1..36: note = Description of Artificial Sequence: Synthetic oligonucleotide
  source 1..36: mol_type = other DNA
gttagggttgccccccgagtttgaacttggtaaaat

SEQ ID NO: 12499 - DNA, 25 bp, synthetic construct
  misc_feature 1..25: note = Description of Artificial Sequence: Synthetic oligonucleotide
  source 1..25: mol_type = other DNA
gttagtttagatggtagtaaaacag

SEQ ID NO: 12500 - DNA, 36 bp, synthetic construct
  misc_feature 1..36: note = Description of Artificial Sequence: Synthetic oligonucleotide
  source 1..36: mol_type = other DNA
gttataacttgcactcaatttcatatctgctacaat

SEQ ID NO: 12501 - DNA, 36 bp, synthetic construct
  misc_feature 1..36: note = Description of Artificial Sequence: Synthetic oligonucleotide
  source 1..36: mol_type = other DNA
gttataacttgctctcaaactcctatctgctataat

SEQ ID NO: 12502 - DNA, 36 bp, synthetic construct
  misc_feature 1..36: note = Description of Artificial Sequence: Synthetic oligonucleotide
  source 1..36: mol_type = other DNA
gttataacttgctctcaaatttacatcgggtataat

SEQ ID NO: 12503 - DNA, 36 bp, synthetic construct
  misc_feature 1..36: note = Description of Artificial Sequence: Synthetic oligonucleotide
  source 1..36: mol_type = other DNA
gttataacttgctctcaaatttctatctgctataat

SEQ ID NO: 12504 - DNA, 36 bp, synthetic construct
  misc_feature 1..36: note = Description of Artificial Sequence: Synthetic oligonucleotide
  source 1..36: mol_type = other DNA
gttataacttgctctcatttacatatctgctataat

SEQ ID NO: 12505 - DNA, 36 bp, synthetic construct
  misc_feature 1..36: note = Description of Artificial Sequence: Synthetic oligonucleotide
  source 1..36: mol_type = other DNA
gttataacttgctctcattttcatatctgctataat

SEQ ID NO: 12506 - DNA, 36 bp, synthetic construct
  misc_feature 1..36: note = Description of Artificial Sequence: Synthetic oligonucleotide
  source 1..36: mol_type = other DNA
gttataacttgctctcttttacatgtctgctataat

SEQ ID NO: 12507 - DNA, 36 bp, synthetic construct
  misc_feature 1..36: note = Description of Artificial Sequence: Synthetic oligonucleotide
  source 1..36: mol_type = other DNA
gttataacttgctctcttttccccgtctgctataat

SEQ ID NO: 12508 - DNA, 36 bp, synthetic construct
  misc_feature 1..36: note = Description of Artificial Sequence: Synthetic oligonucleotide
  source 1..36: mol_type = other DNA
gttataacttgctttcaaattcatatctgatacaat

SEQ ID NO: 12509 - DNA, 36 bp, synthetic construct
  misc_feature 1..36: note = Description of Artificial Sequence: Synthetic oligonucleotide
  source 1..36: mol_type = other DNA
gttataagaaagatcacttcgtcgtaaagtcaaaac

SEQ ID NO: 12510 - DNA, 36 bp, synthetic construct
  misc_feature 1..36: note = Description of Artificial Sequence: Synthetic oligonucleotide
  source 1..36: mol_type = other DNA
gttatacaactcctaaattacacagaatcctaaaac

SEQ ID NO: 12511 - DNA, 36 bp, synthetic construct
  misc_feature 1..36: note = Description of Artificial Sequence: Synthetic oligonucleotide
  source 1..36: mol_type = other DNA
gttatacaactcctaaattacacaggatcctaaaac

SEQ ID NO: 12512 - DNA, 36 bp, synthetic construct
  misc_feature 1..36: note = Description of Artificial Sequence: Synthetic oligonucleotide
  source 1..36: mol_type = other DNA
gttatacattactaaaaattaacagggtcctgtaac

SEQ ID NO: 12513 - DNA, 36 bp, synthetic construct
  misc_feature 1..36: note = Description of Artificial Sequence: Synthetic oligonucleotide
  source 1..36: mol_type = other DNA
gttataccactacgagagaaaatggggaactacgac

SEQ ID NO: 12514 - DNA, 36 bp, synthetic construct
  misc_feature 1..36: note = Description of Artificial Sequence: Synthetic oligonucleotide
  source 1..36: mol_type = other DNA
gttataccagatctgaatatgaaatcaattcacaac

SEQ ID NO: 12515 - DNA, 36 bp, synthetic construct
  misc_feature 1..36: note = Description of Artificial Sequence: Synthetic oligonucleotide
  source 1..36: mol_type = other DNA
gttataccataccaagaactaacagggagctacaac

SEQ ID NO: 12516 - DNA, 36 bp, synthetic construct
  misc_feature 1..36: note = Description of Artificial Sequence: Synthetic oligonucleotide
  source 1..36: mol_type = other DNA
gttatactaccatctaagattacactactctcaaac

SEQ ID NO: 12517 - DNA, 36 bp, synthetic construct
  misc_feature 1..36: note = Description of Artificial Sequence: Synthetic oligonucleotide
  source 1..36: mol_type = other DNA
gttatactcccactcaaagtaagaatactgtataat

SEQ ID NO: 12518 - DNA, 36 bp, synthetic construct
  misc_feature 1..36: note = Description of Artificial Sequence: Synthetic oligonucleotide
  source 1..36: mol_type = other DNA
gttatacttcccaaaaattgctcggtgtggtataat

SEQ ID NO: 12519 - DNA, 36 bp, synthetic construct
  misc_feature 1..36: note = Description of Artificial Sequence: Synthetic oligonucleotide
  source 1..36: mol_type = other DNA
gttatacttcccaaaagttgctaggtgtggtataat

SEQ ID NO: 12520 - DNA, 36 bp, synthetic construct
  misc_feature 1..36: note = Description of Artificial Sequence: Synthetic oligonucleotide
  source 1..36: mol_type = other DNA
gttatactttcctagtgttttattttatggtataat

SEQ ID NO: 12521 - DNA, 36 bp, synthetic construct
  misc_feature 1..36: note = Description of Artificial Sequence: Synthetic oligonucleotide
  source 1..36: mol_type = other DNA
gttatactttgctacttaattttgatatgatataat

SEQ ID NO: 12522 - DNA, 37 bp, synthetic construct
  misc_feature 1..37: note = Description of Artificial Sequence: Synthetic oligonucleotide
  source 1..37: mol_type = other DNA
gttatagcaaatcagaaagtggtgtcaatccgcaaca

SEQ ID NO: 12523 - DNA, 36 bp, synthetic construct
  misc_feature 1..36: note = Description of Artificial Sequence: Synthetic oligonucleotide
  source 1..36: mol_type = other DNA
gttatagcacccctccccacacaaatatgctataat

SEQ ID NO: 12524 - DNA, 36 bp, synthetic construct
  misc_feature 1..36: note = Description of Artificial Sequence: Synthetic oligonucleotide
  source 1..36: mol_type = other DNA
gttatagcacccttccccacacaaatacgctataat

SEQ ID NO: 12525 - DNA, 37 bp, synthetic construct
  misc_feature 1..37: note = Description of Artificial Sequence: Synthetic oligonucleotide
  source 1..37: mol_type = other DNA
gttatagcacccttccccacacaaatatgctataatt

SEQ ID NO: 12526 - DNA, 36 bp, synthetic construct
  misc_feature 1..36: note = Description of Artificial Sequence: Synthetic oligonucleotide
  source 1..36: mol_type = other DNA
gttatagcacccttttccacttcgatatgctataat

SEQ ID NO: 12527 - DNA, 36 bp, synthetic construct
  misc_feature 1..36: note = Description of Artificial Sequence: Synthetic oligonucleotide
  source 1..36: mol_type = other DNA
gttatagcacctgttcccacacaaatatgctataat

SEQ ID NO: 12528 - DNA, 36 bp, synthetic construct
  misc_feature 1..36: note = Description of Artificial Sequence: Synthetic oligonucleotide
  source 1..36: mol_type = other DNA
gttatagcacctgttcctacacaaatatgctatact

SEQ ID NO: 12529 - DNA, 36 bp, synthetic construct
  misc_feature 1..36: note = Description of Artificial Sequence: Synthetic oligonucleotide
  source 1..36: mol_type = other DNA
gttatagcacctgttctcacacaaatacgctatact

SEQ ID NO: 12530 - DNA, 36 bp, synthetic construct
  misc_feature 1..36: note = Description of Artificial Sequence: Synthetic oligonucleotide
  source 1..36: mol_type = other DNA
gttatagcactctggaaaagccgggccaaccgcaac

SEQ ID NO: 12531 - DNA, 36 bp, synthetic construct
  misc_feature 1..36: note = Description of Artificial Sequence: Synthetic oligonucleotide
  source 1..36: mol_type = other DNA
gttatagccaccgaccatcttccgctactgtataac

SEQ ID NO: 12532 - DNA, 36 bp, synthetic construct
  misc_feature 1..36: note = Description of Artificial Sequence: Synthetic oligonucleotide
  source 1..36: mol_type = other DNA
gttatagcccaccatctcactcggttttgctataat

SEQ ID NO: 12533 - DNA, 36 bp, synthetic construct
  misc_feature 1..36: note = Description of Artificial Sequence: Synthetic oligonucleotide
  source 1..36: mol_type = other DNA
gttatagcccccaaacggttcaggttatggtataat

SEQ ID NO: 12534 - DNA, 36 bp, synthetic construct
  misc_feature 1..36: note = Description of Artificial Sequence: Synthetic oligonucleotide
  source 1..36: mol_type = other DNA
gttatagccccccatctcactcggtttcgctataat

SEQ ID NO: 12535 - DNA, 36 bp, synthetic construct
  misc_feature 1..36: note = Description of Artificial Sequence: Synthetic oligonucleotide
  source 1..36: mol_type = other DNA
gttatagccccccatctcactcggttttgctataat

SEQ ID NO: 12536 - DNA, 36 bp, synthetic construct
  misc_feature 1..36: note = Description of Artificial Sequence: Synthetic oligonucleotide
  source 1..36: mol_type = other DNA
gttatagcccccgggtgattgttggtatggtataat

SEQ ID NO: 12537 - DNA, 36 bp, synthetic construct
  misc_feature 1..36: note = Description of Artificial Sequence: Synthetic oligonucleotide
  source 1..36: mol_type = other DNA
gttatagccccctccgatcctccggtaggctataat

SEQ ID NO: 12538 - DNA, 26 bp, synthetic construct
  misc_feature 1..26: note = Description of Artificial Sequence: Synthetic oligonucleotide
  source 1..26: mol_type = other DNA
gttatagccccctttctcactcggat

SEQ ID NO: 12539 - DNA, 36 bp, synthetic construct
  misc_feature 1..36: note = Description of Artificial Sequence: Synthetic oligonucleotide
  source 1..36: mol_type = other DNA
gttatagccccctttctcactcggatatgctataat

SEQ ID NO: 12540 - DNA, 36 bp, synthetic construct
  misc_feature 1..36: note = Description of Artificial Sequence: Synthetic oligonucleotide
  source 1..36: mol_type = other DNA
gttatagccccctttctcactcggatatgctatact

SEQ ID NO: 12541 - DNA, 36 bp, synthetic construct
  misc_feature 1..36: note = Description of Artificial Sequence: Synthetic oligonucleotide
  source 1..36: mol_type = other DNA
gttatagccccctttctcactcggatgtgctatact

SEQ ID NO: 12542 - DNA, 36 bp, synthetic construct
  misc_feature 1..36: note = Description of Artificial Sequence: Synthetic oligonucleotide
  source 1..36: mol_type = other DNA
gttatagccccctttcttactcggatatgctataat

SEQ ID NO: 12543 - DNA, 36 bp, synthetic construct
  misc_feature 1..36: note = Description of Artificial Sequence: Synthetic oligonucleotide
  source 1..36: mol_type = other DNA
gttatagccgatgggggaatgcgggccaactgcaac

SEQ ID NO: 12544 - DNA, 36 bp, synthetic construct
  misc_feature 1..36: note = Description of Artificial Sequence: Synthetic oligonucleotide
  source 1..36: mol_type = other DNA
gttatagcctcctttctcactcggatatgctatact

SEQ ID NO: 12545 - DNA, 36 bp, synthetic construct
  misc_feature 1..36: note = Description of Artificial Sequence: Synthetic oligonucleotide
  source 1..36: mol_type = other DNA
gttatagctcccctacagatcaggtaatggtataat

SEQ ID NO: 12546 - DNA, 36 bp, synthetic construct
  misc_feature 1..36: note = Description of Artificial Sequence: Synthetic oligonucleotide
  source 1..36: mol_type = other DNA
gttatagctcccgggtaattcttggcatggtataat

SEQ ID NO: 12547 - DNA, 36 bp, synthetic construct
  misc_feature 1..36: note = Description of Artificial Sequence: Synthetic oligonucleotide
  source 1..36: mol_type = other DNA
gttatagctccctgatgatttttgttatggtataat

SEQ ID NO: 12548 - DNA, 36 bp, synthetic construct
  misc_feature 1..36: note = Description of Artificial Sequence: Synthetic oligonucleotide
  source 1..36: mol_type = other DNA
gttatagctccctgccacactccgaaatgctatact

SEQ ID NO: 12549 - DNA, 36 bp, synthetic construct
  misc_feature 1..36: note = Description of Artificial Sequence: Synthetic oligonucleotide
  source 1..36: mol_type = other DNA
gttatagcttcctttccaaatcagatatgctataat

SEQ ID NO: 12550 - DNA, 36 bp, synthetic construct
  misc_feature 1..36: note = Description of Artificial Sequence: Synthetic oligonucleotide
  source 1..36: mol_type = other DNA
gttatagcttccttttccacacagatgttctataat

SEQ ID NO: 12551 - DNA, 36 bp, synthetic construct
  misc_feature 1..36: note = Description of Artificial Sequence: Synthetic oligonucleotide
  source 1..36: mol_type = other DNA
gttatagcttgccttctctctcggatgtgctataat

SEQ ID NO: 12552 - DNA, 36 bp, synthetic construct
  misc_feature 1..36: note = Description of Artificial Sequence: Synthetic oligonucleotide
  source 1..36: mol_type = other DNA
gttataggttgctttccaaatcagatgctttataat

SEQ ID NO: 12553 - DNA, 36 bp, synthetic construct
  misc_feature 1..36: note = Description of Artificial Sequence: Synthetic oligonucleotide
  source 1..36: mol_type = other DNA
gttatagtacctgttcccatacaaatatgctataat

SEQ ID NO: 12554 - DNA, 36 bp, synthetic construct
  misc_feature 1..36: note = Description of Artificial Sequence: Synthetic oligonucleotide
  source 1..36: mol_type = other DNA
gttatagtcccctaataatttcgatagtagtataat

SEQ ID NO: 12555 - DNA, 36 bp, synthetic construct
  misc_feature 1..36: note = Description of Artificial Sequence: Synthetic oligonucleotide
  source 1..36: mol_type = other DNA
gttatagtcccctagcaatttgaatcatggtataat

SEQ ID NO: 12556 - DNA, 37 bp, synthetic construct
  misc_feature 1..37: note = Description of Artificial Sequence: Synthetic oligonucleotide
  source 1..37: mol_type = other DNA
gttatagtccctagtaaattctccatatgctataata

SEQ ID NO: 12557 - DNA, 36 bp, synthetic construct
  misc_feature 1..36: note = Description of Artificial Sequence: Synthetic oligonucleotide
  source 1..36: mol_type = other DNA
gttatagtcctctaataaattcgatagtgatataat

SEQ ID NO: 12558 - DNA, 36 bp, synthetic construct
  misc_feature 1..36: note = Description of Artificial Sequence: Synthetic oligonucleotide
  source 1..36: mol_type = other DNA
gttatagttcccctcaattctccggtatgctataat

SEQ ID NO: 12559 - DNA, 36 bp, synthetic construct
  misc_feature 1..36: note = Description of Artificial Sequence: Synthetic oligonucleotide
  source 1..36: mol_type = other DNA
gttatagttcccctcagttctccggtatgctataat

SEQ ID NO: 12560 - DNA, 36 bp, synthetic construct
  misc_feature 1..36: note = Description of Artificial Sequence: Synthetic oligonucleotide
  source 1..36: mol_type = other DNA
gttatagttcccggatgattgttggtatggtataat

SEQ ID NO: 12561 - DNA, 36 bp, synthetic construct
  misc_feature 1..36: note = Description of Artificial Sequence: Synthetic oligonucleotide
  source 1..36: mol_type = other DNA
gttatagttcccgggtgattgttggtatggtataat

SEQ ID NO: 12562 - DNA, 36 bp, synthetic construct
  misc_feature 1..36: note = Description of Artificial Sequence: Synthetic oligonucleotide
  source 1..36: mol_type = other DNA
gttatagttccctaacaatttagaatatgatataat

SEQ ID NO: 12563 - DNA, 36 bp, synthetic construct
  misc_feature 1..36: note = Description of Artificial Sequence: Synthetic oligonucleotide
  source 1..36: mol_type = other DNA
gttatagttccctaacaatttagatattgatataat

SEQ ID NO: 12564 - DNA, 36 bp, synthetic construct
  misc_feature 1..36: note = Description of Artificial Sequence: Synthetic oligonucleotide
  source 1..36: mol_type = other DNA
gttatagttccctaacaatttagatattggtataat

SEQ ID NO: 12565 - DNA, 36 bp, synthetic construct
  misc_feature 1..36: note = Description of Artificial Sequence: Synthetic oligonucleotide
  source 1..36: mol_type = other DNA
gttatagttccctaacaatttggatagttgtataat

SEQ ID NO: 12566 - DNA, 36 bp, synthetic construct
  misc_feature 1..36: note = Description of Artificial Sequence: Synthetic oligonucleotide
  source 1..36: mol_type = other DNA
gttatagttccctaacaatttggatattgatataat

SEQ ID NO: 12567 - DNA, 36 bp, synthetic construct
  misc_feature 1..36: note = Description of Artificial Sequence: Synthetic oligonucleotide
  source 1..36: mol_type = other DNA
gttatagttccctaataatttagatattgatataat

SEQ ID NO: 12568 - DNA, 36 bp, synthetic construct
  misc_feature 1..36: note = Description of Artificial Sequence: Synthetic oligonucleotide
  source 1..36: mol_type = other DNA
gttatagttccctaatagtttagatattgatataat

SEQ ID NO: 12569 - DNA, 36 bp, synthetic construct
  misc_feature 1..36: note = Description of Artificial Sequence: Synthetic oligonucleotide
  source 1..36: mol_type = other DNA
gttatagttccctaattattcttggtataatataat

SEQ ID NO: 12570 - DNA, 36 bp, synthetic construct
  misc_feature 1..36: note = Description of Artificial Sequence: Synthetic oligonucleotide
  source 1..36: mol_type = other DNA
gttatagttccctattacttcttggtatggtataat

SEQ ID NO: 12571 - DNA, 36 bp, synthetic construct
  misc_feature 1..36: note = Description of Artificial Sequence: Synthetic oligonucleotide
  source 1..36: mol_type = other DNA
gttatagttccctcttagttcttggtatggtatgat

SEQ ID NO: 12572 - DNA, 36 bp, synthetic construct
  misc_feature 1..36: note = Description of Artificial Sequence: Synthetic oligonucleotide
  source 1..36: mol_type = other DNA
gttatagttccctgacaatttagaatatgatataat

SEQ ID NO: 12573 - DNA, 36 bp, synthetic construct
  misc_feature 1..36: note = Description of Artificial Sequence: Synthetic oligonucleotide
  source 1..36: mol_type = other DNA
gttatagttccctgacaatttagatattggtataat

SEQ ID NO: 12574 - DNA, 36 bp, synthetic construct
  misc_feature 1..36: note = Description of Artificial Sequence: Synthetic oligonucleotide
  source 1..36: mol_type = other DNA
gttatagttccctgatagttcttggtatggtataat

SEQ ID NO: 12575 - DNA, 36 bp, synthetic construct
  misc_feature 1..36: note = Description of Artificial Sequence: Synthetic oligonucleotide
  source 1..36: mol_type = other DNA
gttatagttccctgttcgttcttggtatggtataat

SEQ ID NO: 12576 - DNA, 36 bp, synthetic construct
  misc_feature 1..36: note = Description of Artificial Sequence: Synthetic oligonucleotide
  source 1..36: mol_type = other DNA
gttatagttcccttttcaattttgatatgttataat

SEQ ID NO: 12577 - DNA, 36 bp, synthetic construct
  misc_feature 1..36: note = Description of Artificial Sequence: Synthetic oligonucleotide
  source 1..36: mol_type = other DNA
gttatagttcctagtaaattctcgatatgctataat

SEQ ID NO: 12578 - DNA, 36 bp, synthetic construct
  misc_feature 1..36: note = Description of Artificial Sequence: Synthetic oligonucleotide
  source 1..36: mol_type = other DNA
gttatagttctctaacaattcagatagttgtataat

SEQ ID NO: 12579 - DNA, 37 bp, synthetic construct
  misc_feature 1..37: note = Description of Artificial Sequence: Synthetic oligonucleotide
  source 1..37: mol_type = other DNA
gttatagttctctaacaattcagatagttgtataata

SEQ ID NO: 12580 - DNA, 36 bp, synthetic construct
  misc_feature 1..36: note = Description of Artificial Sequence: Synthetic oligonucleotide
  source 1..36: mol_type = other DNA
gttatagttctcttctaagttttgatatgatataat

SEQ ID NO: 12581 - DNA, 36 bp, synthetic construct
  misc_feature 1..36: note = Description of Artificial Sequence: Synthetic oligonucleotide
  source 1..36: mol_type = other DNA
gttatagttgacagttcaagcaatcccaaatacaat

SEQ ID NO: 12582 - DNA, 36 bp, synthetic construct
  misc_feature 1..36: note = Description of Artificial Sequence: Synthetic oligonucleotide
  source 1..36: mol_type = other DNA
gttatagttgacagttcaagcaatctcaaatacaat

SEQ ID NO: 12583 - DNA, 36 bp, synthetic construct
  misc_feature 1..36: note = Description of Artificial Sequence: Synthetic oligonucleotide
  source 1..36: mol_type = other DNA
gttatagttgaccgtctaattaatctctgataagct

SEQ ID NO: 12584 - DNA, 36 bp, synthetic construct
  misc_feature 1..36: note = Description of Artificial Sequence: Synthetic oligonucleotide
  source 1..36: mol_type = other DNA
gttatagttgacggttcaagcaatcccaaatataat

SEQ ID NO: 12585 - DNA, 37 bp, synthetic construct
  misc_feature 1..37: note = Description of Artificial Sequence: Synthetic oligonucleotide
  source 1..37: mol_type = other DNA
gttatagttgactatctcactcggttatgctataata

SEQ ID NO: 12586 - DNA, 36 bp, synthetic construct
  misc_feature 1..36: note = Description of Artificial Sequence: Synthetic oligonucleotide
  source 1..36: mol_type = other DNA
gttatagttgcctttccaatttagacatgctaaaat

SEQ ID NO: 12587 - DNA, 36 bp, synthetic construct
  misc_feature 1..36: note = Description of Artificial Sequence: Synthetic oligonucleotide
  source 1..36: mol_type = other DNA
gttatagtttagcagaaaatcaaatggtaacagaac

SEQ ID NO: 12588 - DNA, 36 bp, synthetic construct
  misc_feature 1..36: note = Description of Artificial Sequence: Synthetic oligonucleotide
  source 1..36: mol_type = other DNA
gttatatcagagattaattagacagtcaactataac

SEQ ID NO: 12589 - DNA, 36 bp, synthetic construct
  misc_feature 1..36: note = Description of Artificial Sequence: Synthetic oligonucleotide
  source 1..36: mol_type = other DNA
gttatatcagattagattagggtgtccagccacaac

SEQ ID NO: 12590 - DNA, 36 bp, synthetic construct
  misc_feature 1..36: note = Description of Artificial Sequence: Synthetic oligonucleotide
  source 1..36: mol_type = other DNA
gttatatcttatctcaattttcaatcaaaccacaac

SEQ ID NO: 12591 - DNA, 36 bp, synthetic construct
  misc_feature 1..36: note = Description of Artificial Sequence: Synthetic oligonucleotide
  source 1..36: mol_type = other DNA
gttatcaaagatcgtttgttgaaagcaaatcacaac

SEQ ID NO: 12592 - DNA, 43 bp, synthetic construct
  misc_feature 1..43: note = Description of Artificial Sequence: Synthetic oligonucleotide
  source 1..43: mol_type = other DNA
gttatcaatcgcaaaactacaaaatttgaaagcaattcacaac

SEQ ID NO: 12593 - DNA, 37 bp, synthetic construct
  misc_feature 1..37: note = Description of Artificial Sequence: Synthetic oligonucleotide
  source 1..37: mol_type = other DNA
gttatcgccgactccgccgggggggtgaagtcaaaac

SEQ ID NO: 12594 - DNA, 36 bp, synthetic construct
  misc_feature 1..36: note = Description of Artificial Sequence: Synthetic oligonucleotide
  source 1..36: mol_type = other DNA
gttatcgttttttctaatctttaatcaaaccacaac

SEQ ID NO: 12595 - DNA, 36 bp, synthetic construct
  misc_feature 1..36: note = Description of Artificial Sequence: Synthetic oligonucleotide
  source 1..36: mol_type = other DNA
gttatcttctagcaaaaatccatatggtagcaaaac

SEQ ID NO: 12596 - DNA, 46 bp, synthetic construct
  misc_feature 1..46: note = Description of Artificial Sequence: Synthetic oligonucleotide
  source 1..46: mol_type = other DNA
gttatgaattgctttcaaattttgtagttttgtgattgataacaac

SEQ ID NO: 12597 - DNA, 36 bp, synthetic construct
  misc_feature 1..36: note = Description of Artificial Sequence: Synthetic oligonucleotide
  source 1..36: mol_type = other DNA
gttatgccatgcttgattttggattcaaggcaaaac

SEQ ID NO: 12598 - DNA, 36 bp, synthetic construct
  misc_feature 1..36: note = Description of Artificial Sequence: Synthetic oligonucleotide
  source 1..36: mol_type = other DNA
gttatggcttgaaaggaatcgccgctctggtacact

SEQ ID NO: 12599 - DNA, 28 bp, synthetic construct
  misc_feature 1..28: note = Description of Artificial Sequence: Synthetic oligonucleotide
  source 1..28: mol_type = other DNA
gttattgttatacacgcaaggggagtac

SEQ ID NO: 12600 - DNA, 36 bp, synthetic construct
  misc_feature 1..36: note = Description of Artificial Sequence: Synthetic oligonucleotide
  source 1..36: mol_type = other DNA
gttcaaataatacaaataaacttagtcctcaagaac

SEQ ID NO: 12601 - DNA, 36 bp, synthetic construct
  misc_feature 1..36: note = Description of Artificial Sequence: Synthetic oligonucleotide
  source 1..36: mol_type = other DNA
gttcaaataatacaaataaccttagtcctcaagaac

SEQ ID NO: 12602 - DNA, 36 bp, synthetic construct
  misc_feature 1..36: note = Description of Artificial Sequence: Synthetic oligonucleotide
  source 1..36: mol_type = other DNA
gttcaagagtattccaaaataacaaggctctcaaac

SEQ ID NO: 12603 - DNA, 36 bp, synthetic construct
  misc_feature 1..36: note = Description of Artificial Sequence: Synthetic oligonucleotide
  source 1..36: mol_type = other DNA
gttcagcagtaattaaagatagcactacttccaaac

SEQ ID NO: 12604 - DNA, 36 bp, synthetic construct
  misc_feature 1..36: note = Description of Artificial Sequence: Synthetic oligonucleotide
  source 1..36: mol_type = other DNA
gttcagttacacgataatattacacaactctcaaac

SEQ ID NO: 12605 - DNA, 36 bp, synthetic construct
  misc_feature 1..36: note = Description of Artificial Sequence: Synthetic oligonucleotide
  source 1..36: mol_type = other DNA
gttcagttacacgataatattgcacaactctcaaac

SEQ ID NO: 12606 - DNA, 37 bp, synthetic construct
  misc_feature 1..37: note = Description of Artificial Sequence: Synthetic oligonucleotide
  source 1..37: mol_type = other DNA
gttcagtttaccaaatcttgagaccaagacctaaaac

SEQ ID NO: 12607 - DNA, 36 bp, synthetic construct
  misc_feature 1..36: note = Description of Artificial Sequence: Synthetic oligonucleotide
  source 1..36: mol_type = other DNA
gttcataacatcattgatatgacatccagctgaaac

SEQ ID NO: 12608 - DNA, 36 bp, synthetic construct
  misc_feature 1..36: note = Description of Artificial Sequence: Synthetic oligonucleotide
  source 1..36: mol_type = other DNA
gttccagccagtgcgcatttcctagtcagataaaat

SEQ ID NO: 12609 - DNA, 36 bp, synthetic construct
  misc_feature 1..36: note = Description of Artificial Sequence: Synthetic oligonucleotide
  source 1..36: mol_type = other DNA
gttccagctagaacgcatatcccaattagttaaaat

SEQ ID NO: 12610 - DNA, 36 bp, synthetic construct
  misc_feature 1..36: note = Description of Artificial Sequence: Synthetic oligonucleotide
  source 1..36: mol_type = other DNA
gttccagcttgaccgcaaattcccgccctctagttt

SEQ ID NO: 12611 - DNA, 36 bp, synthetic construct
  misc_feature 1..36: note = Description of Artificial Sequence: Synthetic oligonucleotide
  source 1..36: mol_type = other DNA
gttccagcttgaccgcaaattcccgccgcctagttt

SEQ ID NO: 12612 - DNA, 37 bp, synthetic construct
  misc_feature 1..37: note = Description of Artificial Sequence: Synthetic oligonucleotide
  source 1..37: mol_type = other DNA
gttccgacaccccaccaccggaacgcttgatagactc

SEQ ID NO: 12613 - DNA, 37 bp, synthetic construct
  misc_feature 1..37: note = Description of Artificial Sequence: Synthetic oligonucleotide
  source 1..37: mol_type = other DNA
gttccgacaccccaccatcggaacacttgatacactc

SEQ ID NO: 12614 - DNA, 37 bp, synthetic construct
  misc_feature 1..37: note = Description of Artificial Sequence: Synthetic oligonucleotide
  source 1..37: mol_type = other DNA
gttccgacaccccaccatcggaacgcctgatacactc

SEQ ID NO: 12615 - DNA, 36 bp, synthetic construct
  misc_feature 1..36: note = Description of Artificial Sequence: Synthetic oligonucleotide
  source 1..36: mol_type = other DNA
gttccgacaccccaccatcggaatgcctgataaaat

SEQ ID NO: 12616 - DNA, 36 bp, synthetic construct
  misc_feature 1..36: note = Description of Artificial Sequence: Synthetic oligonucleotide
  source 1..36: mol_type = other DNA
gttccgacaccccaccatcggaatgcctgataaact

SEQ ID NO: 12617 - DNA, 36 bp, synthetic construct
  misc_feature 1..36: note = Description of Artificial Sequence: Synthetic oligonucleotide
  source 1..36: mol_type = other DNA
gttccgacaccccaccatcggaatgcttgatacact

SEQ ID NO: 12618 - DNA, 36 bp, synthetic construct
  misc_feature 1..36: note = Description of Artificial Sequence: Synthetic oligonucleotide
  source 1..36: mol_type = other DNA
gttccgacaccccaccatcggaatgtctgatatcat

SEQ ID NO: 12619 - DNA, 37 bp, synthetic construct
  misc_feature 1..37: note = Description of Artificial Sequence: Synthetic oligonucleotide
  source 1..37: mol_type = other DNA
gttccgactagagcgcacttcctgatctgctacgctc

SEQ ID NO: 12620 - DNA, 36 bp, synthetic construct
  misc_feature 1..36: note = Description of Artificial Sequence: Synthetic oligonucleotide
  source 1..36: mol_type = other DNA
gttccgataccccaccatcggaacatgtgttactct

SEQ ID NO: 12621 - DNA, 36 bp, synthetic construct
  misc_feature 1..36: note = Description of Artificial Sequence: Synthetic oligonucleotide
  source 1..36: mol_type = other DNA
gttccgataccccaccatcggaatgcctgataaaat

SEQ ID NO: 12622 - DNA, 37 bp, synthetic construct
  misc_feature 1..37: note = Description of Artificial Sequence: Synthetic oligonucleotide
  source 1..37: mol_type = other DNA
gttccgataccccaccatcggaatgcctgataaagtc

SEQ ID NO: 12623 - DNA, 36 bp, synthetic construct
  misc_feature 1..36: note = Description of Artificial Sequence: Synthetic oligonucleotide
  source 1..36: mol_type = other DNA
gttccgataccccaccatcggaatgcctgatacact

SEQ ID NO: 12624 - DNA, 37 bp, synthetic construct
  misc_feature 1..37: note = Description of Artificial Sequence: Synthetic oligonucleotide
  source 1..37: mol_type = other DNA
gttccgataccccaccatcggaatgcctgatagactc

SEQ ID NO: 12625 - DNA, 36 bp, synthetic construct
  misc_feature 1..36: note = Description of Artificial Sequence: Synthetic oligonucleotide
  source 1..36: mol_type = other DNA
gttccgataccccaccatcggaatgctgatacgctc

SEQ ID NO: 12626 - DNA, 37 bp, synthetic construct
  misc_feature 1..37: note = Description of Artificial Sequence: Synthetic oligonucleotide
  source 1..37: mol_type = other DNA
gttccgataccccaccatcggaatgcttgatacactc

SEQ ID NO: 12627 - DNA, 36 bp, synthetic construct
  misc_feature 1..36: note = Description of Artificial Sequence: Synthetic oligonucleotide
  source 1..36: mol_type = other DNA
gttccgatacccgaccatcggaaagcctgatacact

SEQ ID NO: 12628 - DNA, 36 bp, synthetic construct
  misc_feature 1..36: note = Description of Artificial Sequence: Synthetic oligonucleotide
  source 1..36: mol_type = other DNA
gttccgatacctcaccagcggaacgtctgatacaat

SEQ ID NO: 12629 - DNA, 47 bp, synthetic construct
  misc_feature 1..47: note = Description of Artificial Sequence: Synthetic oligonucleotide
  source 1..47: mol_type = other DNA
gttccgatttgctttcaactattgaggaacctactttcgatctgacc

SEQ ID NO: 12630 - DNA, 36 bp, synthetic construct
  misc_feature 1..36: note = Description of Artificial Sequence: Synthetic oligonucleotide
  source 1..36: mol_type = other DNA
gttccggacagcgcacatctcccagtgatctagaat

SEQ ID NO: 12631 - DNA, 36 bp, synthetic construct
  misc_feature 1..36: note = Description of Artificial Sequence: Synthetic oligonucleotide
  source 1..36: mol_type = other DNA
gttccggcaccccaccaccggaatgcctgatacaat

SEQ ID NO: 12632 - DNA, 37 bp, synthetic construct
  misc_feature 1..37: note = Description of Artificial Sequence: Synthetic oligonucleotide
  source 1..37: mol_type = other DNA
gttccggcacctcactttagcaagtacctgtatactc

SEQ ID NO: 12633 - DNA, 36 bp, synthetic construct
  misc_feature 1..36: note = Description of Artificial Sequence: Synthetic oligonucleotide
  source 1..36: mol_type = other DNA
gttccggccagagcgcaaatcccaatcagctagact

SEQ ID NO: 12634 - DNA, 36 bp, synthetic construct
  misc_feature 1..36: note = Description of Artificial Sequence: Synthetic oligonucleotide
  source 1..36: mol_type = other DNA
gttccggccagagcgcaaatcccaatcgtctagaat

SEQ ID NO: 12635 - DNA, 36 bp, synthetic construct
  misc_feature 1..36: note = Description of Artificial Sequence: Synthetic oligonucleotide
  source 1..36: mol_type = other DNA
gttccggccagagcgcatatcccaacctgctatact

SEQ ID NO: 12636 - DNA, 36 bp, synthetic construct
  misc_feature 1..36: note = Description of Artificial Sequence: Synthetic oligonucleotide
  source 1..36: mol_type = other DNA
gttccggccagagcgcatatcccaatcagctagact

SEQ ID NO: 12637 - DNA, 36 bp, synthetic construct
  misc_feature 1..36: note = Description of Artificial Sequence: Synthetic oligonucleotide
  source 1..36: mol_type = other DNA
gttccggccagagcgcatttcccaatcgcctagact

SEQ ID NO: 12638 - DNA, 36 bp, synthetic construct
  misc_feature 1..36: note = Description of Artificial Sequence: Synthetic oligonucleotide
  source 1..36: mol_type = other DNA
gttccggccagagcgcatttcccaatcgtctagact

SEQ ID NO: 12639 - DNA, 36 bp, synthetic construct
  misc_feature 1..36: note = Description of Artificial Sequence: Synthetic oligonucleotide
  source 1..36: mol_type = other DNA
gttccggccagagcgcatttcccagcgatctagact

SEQ ID NO: 12640 - DNA, 37 bp, synthetic construct
  misc_feature 1..37: note = Description of Artificial Sequence: Synthetic oligonucleotide
  source 1..37: mol_type = other DNA
gttccggccagagcgcatttcctgatctgctactctc

SEQ ID NO: 12641 - DNA, 37 bp, synthetic construct
  misc_feature 1..37: note = Description of Artificial Sequence: Synthetic oligonucleotide
  source 1..37: mol_type = other DNA
gttccggccagagcgcatttcctgatctgttacgctc

SEQ ID NO: 12642 - DNA, 36 bp, synthetic construct
  misc_feature 1..36: note = Description of Artificial Sequence: Synthetic oligonucleotide
  source 1..36: mol_type = other DNA
gttccggccagagtacaaaacccagttggctacaat

SEQ ID NO: 12643 - DNA, 36 bp, synthetic construct
  misc_feature 1..36: note = Description of Artificial Sequence: Synthetic oligonucleotide
  source 1..36: mol_type = other DNA
gttccggccagatcacatatcccgatgatctagact

SEQ ID NO: 12644 - DNA, 36 bp, synthetic construct
  misc_feature 1..36: note = Description of Artificial Sequence: Synthetic oligonucleotide
  source 1..36: mol_type = other DNA
gttccggccagtgcacatatcccagtgaactaaact

SEQ ID NO: 12645 - DNA, 36 bp, synthetic construct
  misc_feature 1..36: note = Description of Artificial Sequence: Synthetic oligonucleotide
  source 1..36: mol_type = other DNA
gttccggccagtgcgcataccccagtgatctagact

SEQ ID NO: 12646 - DNA, 36 bp, synthetic construct
  misc_feature 1..36: note = Description of Artificial Sequence: Synthetic oligonucleotide
  source 1..36: mol_type = other DNA
gttccggccagtgcgcatatcccaatcagctagact

SEQ ID NO: 12647 - DNA, 36 bp, synthetic construct
  misc_feature 1..36: note = Description of Artificial Sequence: Synthetic oligonucleotide
  source 1..36: mol_type = other DNA
gttccggccagtgcgcatatcccagtgatctagact

SEQ ID NO: 12648 - DNA, 36 bp, synthetic construct
  misc_feature 1..36: note = Description of Artificial Sequence: Synthetic oligonucleotide
  source 1..36: mol_type = other DNA
gttccggccagtgcgcatatctcaatcaagtaaact

SEQ ID NO: 12649 - DNA, 36 bp, synthetic construct
  misc_feature 1..36: note = Description of Artificial Sequence: Synthetic oligonucleotide
  source 1..36: mol_type = other DNA
gttccggccagtgcgcatatctcaatgatttaaaat

SEQ ID NO: 12650 - DNA, 36 bp, synthetic construct
  misc_feature 1..36: note = Description of Artificial Sequence: Synthetic oligonucleotide
  source 1..36: mol_type = other DNA
gttccggccagtgctcatatcccgagcgtctagact

SEQ ID NO: 12651 - DNA, 36 bp, synthetic construct
  misc_feature 1..36: note = Description of Artificial Sequence: Synthetic oligonucleotide
  source 1..36: mol_type = other DNA
gttccggctagaccacagattccaaacggctagagt

SEQ ID NO: 12652 - DNA, 36 bp, synthetic construct
  misc_feature 1..36: note = Description of Artificial Sequence: Synthetic oligonucleotide
  source 1..36: mol_type = other DNA
gttccggctagaccacagattccgaggcgctagatt

SEQ ID NO: 12653 - DNA, 36 bp, synthetic construct
  misc_feature 1..36: note = Description of Artificial Sequence: Synthetic oligonucleotide
  source 1..36: mol_type = other DNA
gttccggctagaccgcaaaatcctgtctgatataat

SEQ ID NO: 12654 - DNA, 36 bp, synthetic construct
  misc_feature 1..36: note = Description of Artificial Sequence: Synthetic oligonucleotide
  source 1..36: mol_type = other DNA
gttccggctagaccgcaaatttctatctgctaaact

SEQ ID NO: 12655 - DNA, 36 bp, synthetic construct
  misc_feature 1..36: note = Description of Artificial Sequence: Synthetic oligonucleotide
  source 1..36: mol_type = other DNA
gttccggctagagcacatatcccaatctgctagaat

SEQ ID NO: 12656 - DNA, 36 bp, synthetic construct
  misc_feature 1..36: note = Description of Artificial Sequence: Synthetic oligonucleotide
  source 1..36: mol_type = other DNA
gttccggctagagcacatatcccaatctgttagaat

SEQ ID NO: 12657 - DNA, 36 bp, synthetic construct
  misc_feature 1..36: note = Description of Artificial Sequence: Synthetic oligonucleotide
  source 1..36: mol_type = other DNA
gttccggctagagcgcatatcccagtgatctagact

SEQ ID NO: 12658 - DNA, 36 bp, synthetic construct
  misc_feature 1..36: note = Description of Artificial Sequence: Synthetic oligonucleotide
  source 1..36: mol_type = other DNA
gttccggctagagcgcatatcccatgctgctagaat

SEQ ID NO: 12659 - DNA, 38 bp, synthetic construct
  misc_feature 1..38: note = Description of Artificial Sequence: Synthetic oligonucleotide
  source 1..38: mol_type = other DNA
gttccggctagagcgcatttcctgatctgctacgctgc

SEQ ID NO: 12660 - DNA, 36 bp, synthetic construct
  misc_feature 1..36: note = Description of Artificial Sequence: Synthetic oligonucleotide
  source 1..36: mol_type = other DNA
gttccggctagagctcatttcccagtgatataaaat

SEQ ID NO: 12661 - DNA, 36 bp, synthetic construct
  misc_feature 1..36: note = Description of Artificial Sequence: Synthetic oligonucleotide
  source 1..36: mol_type = other DNA
gttccggctagtgtgcatatcccaatgtgctagatt

SEQ ID NO: 12662 - DNA, 36 bp, synthetic construct
  misc_feature 1..36: note = Description of Artificial Sequence: Synthetic oligonucleotide
  source 1..36: mol_type = other DNA
gttccggcttgactacaaattccccccttactagaa

SEQ ID NO: 12663 - DNA, 36 bp, synthetic construct
  misc_feature 1..36: note = Description of Artificial Sequence: Synthetic oligonucleotide
  source 1..36: mol_type = other DNA
gttccggcttgactacaaattcccccttattagaat

SEQ ID NO: 12664 - DNA, 37 bp, synthetic construct
  misc_feature 1..37: note = Description of Artificial Sequence: Synthetic oligonucleotide
  source 1..37: mol_type = other DNA
gttccggcttgagtacattctccgattcgatatgctc

SEQ ID NO: 12665 - DNA, 36 bp, synthetic construct
  misc_feature 1..36: note = Description of Artificial Sequence: Synthetic oligonucleotide
  source 1..36: mol_type = other DNA
gttccggtcacagcgcatatcccaatcgactagact

SEQ ID NO: 12666 - DNA, 36 bp, synthetic construct
  misc_feature 1..36: note = Description of Artificial Sequence: Synthetic oligonucleotide
  source 1..36: mol_type = other DNA
gttccggtcagagcacaaatcccaatatgctaaact

SEQ ID NO: 12667 - DNA, 36 bp, synthetic construct
  misc_feature 1..36: note = Description of Artificial Sequence: Synthetic oligonucleotide
  source 1..36: mol_type = other DNA
gttccggtcagagcgcaaatcccaatctgctacaat

SEQ ID NO: 12668 - DNA, 36 bp, synthetic construct
  misc_feature 1..36: note = Description of Artificial Sequence: Synthetic oligonucleotide
  source 1..36: mol_type = other DNA
gttccggtcagagcgcaaatcccaatctgctatact

SEQ ID NO: 12669 - DNA, 36 bp, synthetic construct
  misc_feature 1..36: note = Description of Artificial Sequence: Synthetic oligonucleotide
  source 1..36: mol_type = other DNA
gttccggtcagagcgcatatcccaatcgactagact

SEQ ID NO: 12670 - DNA, 36 bp, synthetic construct
  misc_feature 1..36: note = Description of Artificial Sequence: Synthetic oligonucleotide
  source 1..36: mol_type = other DNA
gttccggtcagagcgcatatcccattcgtctatact

SEQ ID NO: 12671 - DNA, 36 bp, synthetic construct
  misc_feature 1..36: note = Description of Artificial Sequence: Synthetic oligonucleotide
  source 1..36: mol_type = other DNA
gttccggtcagagcgcatatcccgttttgctagact

SEQ ID NO: 12672 - DNA, 36 bp, synthetic construct
  misc_feature 1..36: note = Description of Artificial Sequence: Synthetic oligonucleotide
  source 1..36: mol_type = other DNA
gttccggtcagagcgcatttcccaatcgactagact

SEQ ID NO: 12673 - DNA, 36 bp, synthetic construct
  misc_feature 1..36: note = Description of Artificial Sequence: Synthetic oligonucleotide
  source 1..36: mol_type = other DNA
gttccggtcagagcgcatttcccaatcgtctagact

SEQ ID NO: 12674 - DNA, 36 bp, synthetic construct
  misc_feature 1..36: note = Description of Artificial Sequence: Synthetic oligonucleotide
  source 1..36: mol_type = other DNA
gttccggtcagagctcatatcccaatcgactagact

SEQ ID NO: 12675 - DNA, 36 bp, synthetic construct
  misc_feature 1..36: note = Description of Artificial Sequence: Synthetic oligonucleotide
  source 1..36: mol_type = other DNA
gttccggtcagagctcatctcccgatgatgtatact

SEQ ID NO: 12676 - DNA, 36 bp, synthetic construct
  misc_feature 1..36: note = Description of Artificial Sequence: Synthetic oligonucleotide
  source 1..36: mol_type = other DNA
gttccggtcagagtacatatcccaatcgactaaact

SEQ ID NO: 12677 - DNA, 37 bp, synthetic construct
  misc_feature 1..37: note = Description of Artificial Sequence: Synthetic oligonucleotide
  source 1..37: mol_type = other DNA
gttccggtcagagtgcaaagcccaatctgctatactt

SEQ ID NO: 12678 - DNA, 36 bp, synthetic construct
  misc_feature 1..36: note = Description of Artificial Sequence: Synthetic oligonucleotide
  source 1..36: mol_type = other DNA
gttccggtcagagtgcaaatcccaatctgctaaact

SEQ ID NO: 12679 - DNA, 36 bp, synthetic construct
  misc_feature 1..36: note = Description of Artificial Sequence: Synthetic oligonucleotide
  source 1..36: mol_type = other DNA
gttccggtcagagtgcaaatcccaatctgctacact

SEQ ID NO: 12680 - DNA, 36 bp, synthetic construct
  misc_feature 1..36: note = Description of Artificial Sequence: Synthetic oligonucleotide
  source 1..36: mol_type = other DNA
gttccggtcagtgcacatttcccagtctgatagaat

SEQ ID NO: 12681 - DNA, 36 bp, synthetic construct
  misc_feature 1..36: note = Description of Artificial Sequence: Synthetic oligonucleotide
  source 1..36: mol_type = other DNA
gttccggtcagtgcgcatatcccagtgatctagaat

SEQ ID NO: 12682 - DNA, 36 bp, synthetic construct
  misc_feature 1..36: note = Description of Artificial Sequence: Synthetic oligonucleotide
  source 1..36: mol_type = other DNA
gttccggtcggcccgcgccgcgatctctgctagaac

SEQ ID NO: 12683 - DNA, 36 bp, synthetic construct
  misc_feature 1..36: note = Description of Artificial Sequence: Synthetic oligonucleotide
  source 1..36: mol_type = other DNA
gttccggtcggcccgcgccgcgatctctgctatgat

SEQ ID NO: 12684 - DNA, 36 bp, synthetic construct
  misc_feature 1..36: note = Description of Artificial Sequence: Synthetic oligonucleotide
  source 1..36: mol_type = other DNA
gttccggttagagcgcatatcccaatcgtctagact

SEQ ID NO: 12685 - DNA, 36 bp, synthetic construct
  misc_feature 1..36: note = Description of Artificial Sequence: Synthetic oligonucleotide
  source 1..36: mol_type = other DNA
gttccggttggcccacgtttcgacttgttctatacc

SEQ ID NO: 12686 - DNA, 36 bp, synthetic construct
  misc_feature 1..36: note = Description of Artificial Sequence: Synthetic oligonucleotide
  source 1..36: mol_type = other DNA
gttccggtttggccgcatcgctttctctgctaagct

SEQ ID NO: 12687 - DNA, 36 bp, synthetic construct
  misc_feature 1..36: note = Description of Artificial Sequence: Synthetic oligonucleotide
  source 1..36: mol_type = other DNA
gttccgtccacagcatgatttttgataaactagaac

SEQ ID NO: 12688 - DNA, 36 bp, synthetic construct
  misc_feature 1..36: note = Description of Artificial Sequence: Synthetic oligonucleotide
  source 1..36: mol_type = other DNA
gttcctattaggcaccgaagaataaggtaaaatttg

SEQ ID NO: 12689 - DNA, 36 bp, synthetic construct
  misc_feature 1..36: note = Description of Artificial Sequence: Synthetic oligonucleotide
  source 1..36: mol_type = other DNA
gttcctattaggcttcattcgggataatggattttc

SEQ ID NO: 12690 - DNA, 36 bp, synthetic construct
  misc_feature 1..36: note = Description of Artificial Sequence: Synthetic oligonucleotide
  source 1..36: mol_type = other DNA
gttctaacacgaagggatttgtggttctaccggaac

SEQ ID NO: 12691 - DNA, 36 bp, synthetic construct
  misc_feature 1..36: note = Description of Artificial Sequence: Synthetic oligonucleotide
  source 1..36: mol_type = other DNA
gttctaacgggtcggaaatttttgggaagtcaaaac

SEQ ID NO: 12692 - DNA, 36 bp, synthetic construct
  misc_feature 1..36: note = Description of Artificial Sequence: Synthetic oligonucleotide
  source 1..36: mol_type = other DNA
gttctagcaaggaacgcggcgcggcccaaccgcaac

SEQ ID NO: 12693 - DNA, 36 bp, synthetic construct
  misc_feature 1..36: note = Description of Artificial Sequence: Synthetic oligonucleotide
  source 1..36: mol_type = other DNA
gttctagcagaacgagaaagggctgcaatccgcagc

SEQ ID NO: 12694 - DNA, 36 bp, synthetic construct
  misc_feature 1..36: note = Description of Artificial Sequence: Synthetic oligonucleotide
  source 1..36: mol_type = other DNA
gttctagcagaagaagcgacaaagccaaacccggac

SEQ ID NO: 12695 - DNA, 36 bp, synthetic construct
  misc_feature 1..36: note = Description of Artificial Sequence: Synthetic oligonucleotide
  source 1..36: mol_type = other DNA
gttctagcagaggacggaacgcggcccaaacggaac

SEQ ID NO: 12696 - DNA, 36 bp, synthetic construct
  misc_feature 1..36: note = Description of Artificial Sequence: Synthetic oligonucleotide
  source 1..36: mol_type = other DNA
gttctagcagggaacgcggcgcggtccaatcgcaac

SEQ ID NO: 12697 - DNA, 37 bp, synthetic construct
  misc_feature 1..37: note = Description of Artificial Sequence: Synthetic oligonucleotide
  source 1..37: mol_type = other DNA
gttctagcagtcagaacaatgcgggccaaccgcaacg

SEQ ID NO: 12698 - DNA, 36 bp, synthetic construct
  misc_feature 1..36: note = Description of Artificial Sequence: Synthetic oligonucleotide
  source 1..36: mol_type = other DNA
gttctagtaccctgtaaaattcttgtatagtaaaac

SEQ ID NO: 12699 - DNA, 36 bp, synthetic construct
  misc_feature 1..36: note = Description of Artificial Sequence: Synthetic oligonucleotide
  source 1..36: mol_type = other DNA
gttctagtaccctgtaaaatttttgtatagtaaaac

SEQ ID NO: 12700 - DNA, 36 bp, synthetic construct
  misc_feature 1..36: note = Description of Artificial Sequence: Synthetic oligonucleotide
  source 1..36: mol_type = other DNA
gttctagttcccggatggtttttggcatggtataat

SEQ ID NO: 12701 - DNA, 36 bp, synthetic construct
  misc_feature 1..36: note = Description of Artificial Sequence: Synthetic oligonucleotide
  source 1..36: mol_type = other DNA
gttctatatgtattaagaataacataactctcaaac

SEQ ID NO: 12702 - DNA, 37 bp, synthetic construct
  misc_feature 1..37: note = Description of Artificial Sequence: Synthetic oligonucleotide
  source 1..37: mol_type = other DNA
gttctgacgggactaaaaaactgaatttgttataata

SEQ ID NO: 12703 - DNA, 36 bp, synthetic construct
  misc_feature 1..36: note = Description of Artificial Sequence: Synthetic oligonucleotide
  source 1..36: mol_type = other DNA
gttctgactagaccgcaaaatgccttctgctaaaat

SEQ ID NO: 12704 - DNA, 36 bp, synthetic construct
  misc_feature 1..36: note = Description of Artificial Sequence: Synthetic oligonucleotide
  source 1..36: mol_type = other DNA
gttctgacttcacctccccgacggagtcgtcagaat

SEQ ID NO: 12705 - DNA, 37 bp, synthetic construct
  misc_feature 1..37: note = Description of Artificial Sequence: Synthetic oligonucleotide
  source 1..37: mol_type = other DNA
gttctggactgagcgcatttcctgatctgttacgctc

SEQ ID NO: 12706 - DNA, 36 bp, synthetic construct
  misc_feature 1..36: note = Description of Artificial Sequence: Synthetic oligonucleotide
  source 1..36: mol_type = other DNA
gttctggcaaagccgcaaatcctaagtttctagatt

SEQ ID NO: 12707 - DNA, 36 bp, synthetic construct
  misc_feature 1..36: note = Description of Artificial Sequence: Synthetic oligonucleotide
  source 1..36: mol_type = other DNA
gttcttaaggaatgcgataattggtattatttgaac

SEQ ID NO: 12708 - DNA, 36 bp, synthetic construct
  misc_feature 1..36: note = Description of Artificial Sequence: Synthetic oligonucleotide
  source 1..36: mol_type = other DNA
gttcttaaggattgtgttttttcgtattatttgaac

SEQ ID NO: 12709 - DNA, 36 bp, synthetic construct
  misc_feature 1..36: note = Description of Artificial Sequence: Synthetic oligonucleotide
  source 1..36: mol_type = other DNA
gttcttatacctccccaaggtctaatgtgttaaaat

SEQ ID NO: 12710 - DNA, 36 bp, synthetic construct
  misc_feature 1..36: note = Description of Artificial Sequence: Synthetic oligonucleotide
  source 1..36: mol_type = other DNA
gttcttgaactgattgatctgacatctacctgagac

SEQ ID NO: 12711 - DNA, 36 bp, synthetic construct
  misc_feature 1..36: note = Description of Artificial Sequence: Synthetic oligonucleotide
  source 1..36: mol_type = other DNA
gttcttgaggactaagtttatttgtattatttgaac

SEQ ID NO: 12712 - DNA, 36 bp, synthetic construct
  misc_feature 1..36: note = Description of Artificial Sequence: Synthetic oligonucleotide
  source 1..36: mol_type = other DNA
gttcttgcatagcaaagattttgagggtggcaaaac

SEQ ID NO: 12713 - DNA, 45 bp, synthetic construct
  misc_feature 1..45: note = Description of Artificial Sequence: Synthetic oligonucleotide
  source 1..45: mol_type = other DNA
gttgaaagcaatctatcaaagaacaacctgaaagcaaatcacaac

SEQ ID NO: 12714 - DNA, 36 bp, synthetic construct
  misc_feature 1..36: note = Description of Artificial Sequence: Synthetic oligonucleotide
  source 1..36: mol_type = other DNA
gttgaaagtcttgcttattttacatcaaaccacaac

SEQ ID NO: 12715 - DNA, 46 bp, synthetic construct
  misc_feature 1..46: note = Description of Artificial Sequence: Synthetic oligonucleotide
  source 1..46: mol_type = other DNA
gttgaaattagtatataaagaacacaatttaaaatcaattcacaac

SEQ ID NO: 12716 - DNA, 36 bp, synthetic construct
  misc_feature 1..36: note = Description of Artificial Sequence: Synthetic oligonucleotide
  source 1..36: mol_type = other DNA
gttgaactaagttacaatttgaaagcgaatcacaac

SEQ ID NO: 12717 - DNA, 30 bp, synthetic construct
  misc_feature 1..30: note = Description of Artificial Sequence: Synthetic oligonucleotide
  source 1..30: mol_type = other DNA
gttgaataataacataggatgtattgaaat

SEQ ID NO: 12718 - DNA, 36 bp, synthetic construct
  misc_feature 1..36: note = Description of Artificial Sequence: Synthetic oligonucleotide
  source 1..36: mol_type = other DNA
gttgaatatcattccatttttacatcaaaccacaac

SEQ ID NO: 12719 - DNA, 37 bp, synthetic construct
  misc_feature 1..37: note = Description of Artificial Sequence: Synthetic oligonucleotide
  source 1..37: mol_type = other DNA
gttgaatatccttttgaaattacatcaaaccacaacc

SEQ ID NO: 12720 - DNA, 34 bp, synthetic construct
  misc_feature 1..34: note = Description of Artificial Sequence: Synthetic oligonucleotide
  source 1..34: mol_type = other DNA
gttgaatatgatacgattttgtcagctattcaca

SEQ ID NO: 12721 - DNA, 36 bp, synthetic construct
  misc_feature 1..36: note = Description of Artificial Sequence: Synthetic oligonucleotide
  source 1..36: mol_type = other DNA
gttgaattaccagttaaaacgacactgctccaaaac

SEQ ID NO: 12722 - DNA, 36 bp, synthetic construct
  misc_feature 1..36: note = Description of Artificial Sequence: Synthetic oligonucleotide
  source 1..36: mol_type = other DNA
gttgagaatctttcattattcgccttgatatactta

SEQ ID NO: 12723 - DNA, 35 bp, synthetic construct
  misc_feature 1..35: note = Description of Artificial Sequence: Synthetic oligonucleotide
  source 1..35: mol_type = other DNA
gttgagaccaatctagttttacactactctcaaac

SEQ ID NO: 12724 - DNA, 30 bp, synthetic construct
  misc_feature 1..30: note = Description of Artificial Sequence: Synthetic oligonucleotide
  source 1..30: mol_type = other DNA
gttgcaatagtataacccattttatagcaa

SEQ ID NO: 12725 - DNA, 47 bp, synthetic construct
  misc_feature 1..47: note = Description of Artificial Sequence: Synthetic oligonucleotide
  source 1..47: mol_type = other DNA
gttgcaatatccgatgcaaagatacaaatttgaaagcaattcacaac

SEQ ID NO: 12726 - DNA, 36 bp, synthetic construct
  misc_feature 1..36: note = Description of Artificial Sequence: Synthetic oligonucleotide
  source 1..36: mol_type = other DNA
gttgcaatcgaagtctaagtgaatttcaattggaag

SEQ ID NO: 12727 - DNA, 37 bp, synthetic construct
  misc_feature 1..37: note = Description of Artificial Sequence: Synthetic oligonucleotide
  source 1..37: mol_type = other DNA
gttgcacatcctatcccaggagacctgcaactgaaac

SEQ ID NO: 12728 - DNA, 36 bp, synthetic construct
  misc_feature 1..36: note = Description of Artificial Sequence: Synthetic oligonucleotide
  source 1..36: mol_type = other DNA
gttgcagaccgaccaattttcttagtaaactgtatt

SEQ ID NO: 12729 - DNA, 36 bp, synthetic construct
  misc_feature 1..36: note = Description of Artificial Sequence: Synthetic oligonucleotide
  source 1..36: mol_type = other DNA
gttgcagaccgaccaattttcttggtaaactgtatc

SEQ ID NO: 12730 - DNA, 36 bp, synthetic construct
  misc_feature 1..36: note = Description of Artificial Sequence: Synthetic oligonucleotide
  source 1..36: mol_type = other DNA
gttgcagaccgaccaatttttcgagtaaactaaatt

SEQ ID NO: 12731 - DNA, 36 bp, synthetic construct
  misc_feature 1..36: note = Description of Artificial Sequence: Synthetic oligonucleotide
  source 1..36: mol_type = other DNA
gttgcagaccgaccaatttttcgagtaaactgaatt

SEQ ID NO: 12732 - DNA, 36 bp, synthetic construct
  misc_feature 1..36: note = Description of Artificial Sequence: Synthetic oligonucleotide
  source 1..36: mol_type = other DNA
gttgcagaccgaccaatttttttagtaaactgtatt

SEQ ID NO: 12733 - DNA, 36 bp, synthetic construct
  misc_feature 1..36: note = Description of Artificial Sequence: Synthetic oligonucleotide
  source 1..36: mol_type = other DNA
gttgcagaccgacctattttctgagtaaactgaatt

SEQ ID NO: 12734 - DNA, 36 bp, synthetic construct
  misc_feature 1..36: note = Description of Artificial Sequence: Synthetic oligonucleotide
  source 1..36: mol_type = other DNA
gttgcagaccgacctattttctgagtagactgtatt

SEQ ID NO: 12735 - DNA, 36 bp, synthetic construct
  misc_feature 1..36: note = Description of Artificial Sequence: Synthetic oligonucleotide
  source 1..36: mol_type = other DNA
gttgcagatcgacctattttcttgttaaactgtatt

SEQ ID NO: 12736 - DNA, 36 bp, synthetic construct
  misc_feature 1..36: note = Description of Artificial Sequence: Synthetic oligonucleotide
  source 1..36: mol_type = other DNA
gttgcagattgaccgccttttcaaacctgctatagt

SEQ ID NO: 12737 - DNA, 36 bp, synthetic construct
  misc_feature 1..36: note = Description of Artificial Sequence: Synthetic oligonucleotide
  source 1..36: mol_type = other DNA
gttgcagattgaccggacaaattaatcagttataat

SEQ ID NO: 12738 - DNA, 36 bp, synthetic construct
  misc_feature 1..36: note = Description of Artificial Sequence: Synthetic oligonucleotide
  source 1..36: mol_type = other DNA
gttgcagattgaccgggaaaattaatcaggtataat

SEQ ID NO: 12739 - DNA, 36 bp, synthetic construct
  misc_feature 1..36: note = Description of Artificial Sequence: Synthetic oligonucleotide
  source 1..36: mol_type = other DNA
gttgcagattgacctatttttttgataaactgaatt

SEQ ID NO: 12740 - DNA, 36 bp, synthetic construct
  misc_feature 1..36: note = Description of Artificial Sequence: Synthetic oligonucleotide
  source 1..36: mol_type = other DNA
gttgcagattggtcgcgggctgaggttggttacact

SEQ ID NO: 12741 - DNA, 36 bp, synthetic construct
  misc_feature 1..36: note = Description of Artificial Sequence: Synthetic oligonucleotide
  source 1..36: mol_type = other DNA
gttgcagctggaccgcgatttctgaaatgctatgac

SEQ ID NO: 12742 - DNA, 36 bp, synthetic construct
  misc_feature 1..36: note = Description of Artificial Sequence: Synthetic oligonucleotide
  source 1..36: mol_type = other DNA
gttgcagctggaccgcgttttctgatctgctataat

SEQ ID NO: 12743 - DNA, 36 bp, synthetic construct
  misc_feature 1..36: note = Description of Artificial Sequence: Synthetic oligonucleotide
  source 1..36: mol_type = other DNA
gttgcagctggacctcgatttctgaagtgctatgac

SEQ ID NO: 12744 - DNA, 36 bp, synthetic construct
  misc_feature 1..36: note = Description of Artificial Sequence: Synthetic oligonucleotide
  source 1..36: mol_type = other DNA
gttgcaggctgctcgcgggctgagatcgattacact

SEQ ID NO: 12745 - DNA, 36 bp, synthetic construct
  misc_feature 1..36: note = Description of Artificial Sequence: Synthetic oligonucleotide
  source 1..36: mol_type = other DNA
gttgcaggttgacaggacaaattaatcagttataat

SEQ ID NO: 12746 - DNA, 36 bp, synthetic construct
  misc_feature 1..36: note = Description of Artificial Sequence: Synthetic oligonucleotide
  source 1..36: mol_type = other DNA
gttgcaggttgaccagaaaaattaatcaggtataat

SEQ ID NO: 12747 - DNA, 36 bp, synthetic construct
  misc_feature 1..36: note = Description of Artificial Sequence: Synthetic oligonucleotide
  source 1..36: mol_type = other DNA
gttgcaggttgaccagaaaaattaatcagttataat

SEQ ID NO: 12748 - DNA, 36 bp, synthetic construct
  misc_feature 1..36: note = Description of Artificial Sequence: Synthetic oligonucleotide
  source 1..36: mol_type = other DNA
gttgcaggttgaccagaaaaattaatcagttgtaat

SEQ ID NO: 12749 - DNA, 36 bp, synthetic construct
  misc_feature 1..36: note = Description of Artificial Sequence: Synthetic oligonucleotide
  source 1..36: mol_type = other DNA
gttgcaggttgaccgcaattcttaattagctacaat

SEQ ID NO: 12750 - DNA, 36 bp, synthetic construct
  misc_feature 1..36: note = Description of Artificial Sequence: Synthetic oligonucleotide
  source 1..36: mol_type = other DNA
gttgcaggttgaccggaaaaattaatcagttataat

SEQ ID NO: 12751 - DNA, 36 bp, synthetic construct
  misc_feature 1..36: note = Description of Artificial Sequence: Synthetic oligonucleotide
  source 1..36: mol_type = other DNA
gttgcaggttgaccggaaagattaatcagttataat

SEQ ID NO: 12752 - DNA, 36 bp, synthetic construct
  misc_feature 1..36: note = Description of Artificial Sequence: Synthetic oligonucleotide
  source 1..36: mol_type = other DNA
gttgcaggttgaccggacaaattaatcagttataat

SEQ ID NO: 12753 - DNA, 36 bp, synthetic construct
  misc_feature 1..36: note = Description of Artificial Sequence: Synthetic oligonucleotide
  source 1..36: mol_type = other DNA
gttgcaggttgaccgtaaaaatcaattagttataat

SEQ ID NO: 12754 - DNA, 36 bp, synthetic construct
  misc_feature 1..36: note = Description of Artificial Sequence: Synthetic oligonucleotide
  source 1..36: mol_type = other DNA
gttgcaggttgaccgtagattcgagtaggctataat

SEQ ID NO: 12755 - DNA, 36 bp, synthetic construct
  misc_feature 1..36: note = Description of Artificial Sequence: Synthetic oligonucleotide
  source 1..36: mol_type = other DNA
gttgcagttggaccgcgatttctgaatggctatgct

SEQ ID NO: 12756 - DNA, 36 bp, synthetic construct
  misc_feature 1..36: note = Description of Artificial Sequence: Synthetic oligonucleotide
  source 1..36: mol_type = other DNA
gttgcagttggcccacgatttctgaactgctaggct

SEQ ID NO: 12757 - DNA, 36 bp, synthetic construct
  misc_feature 1..36: note = Description of Artificial Sequence: Synthetic oligonucleotide
  source 1..36: mol_type = other DNA
gttgcagttggcccgcgatctctgaactgctaggcc

SEQ ID NO: 12758 - DNA, 46 bp, synthetic construct
  misc_feature 1..46: note = Description of Artificial Sequence: Synthetic oligonucleotide
  source 1..46: mol_type = other DNA
gttgcattagcaatacgaaggtactgaattgaaagctaatcacaac

SEQ ID NO: 12759 - DNA, 46 bp, synthetic construct
  misc_feature 1..46: note = Description of Artificial Sequence: Synthetic oligonucleotide
  source 1..46: mol_type = other DNA
gttgcattagcgatacgaaggtactgaattgaaagctaatcacaac

SEQ ID NO: 12760 - DNA, 46 bp, synthetic construct
  misc_feature 1..46: note = Description of Artificial Sequence: Synthetic oligonucleotide
  source 1..46: mol_type = other DNA
gttgcattagcgatacgaagttactgaattgaaagctaatcacaac

SEQ ID NO: 12761 - DNA, 36 bp, synthetic construct
  misc_feature 1..36: note = Description of Artificial Sequence: Synthetic oligonucleotide
  source 1..36: mol_type = other DNA
gttgcattatatcgttattctacatcaaaccacaac

SEQ ID NO: 12762 - DNA, 36 bp, synthetic construct
  misc_feature 1..36: note = Description of Artificial Sequence: Synthetic oligonucleotide
  source 1..36: mol_type = other DNA
gttgccgctagaccacgatctctgagcggctatcct

SEQ ID NO: 12763 - DNA, 36 bp, synthetic construct
  misc_feature 1..36: note = Description of Artificial Sequence: Synthetic oligonucleotide
  source 1..36: mol_type = other DNA
gttgccgctagaccgcgatctctgagcggctatagt

SEQ ID NO: 12764 - DNA, 36 bp, synthetic construct
  misc_feature 1..36: note = Description of Artificial Sequence: Synthetic oligonucleotide
  source 1..36: mol_type = other DNA
gttgccgctggaccacgatctctgaacggctacact

SEQ ID NO: 12765 - DNA, 36 bp, synthetic construct
  misc_feature 1..36: note = Description of Artificial Sequence: Synthetic oligonucleotide
  source 1..36: mol_type = other DNA
gttgccgctggaccacgatctctgaacggctatcct

SEQ ID NO: 12766 - DNA, 36 bp, synthetic construct
  misc_feature 1..36: note = Description of Artificial Sequence: Synthetic oligonucleotide
  source 1..36: mol_type = other DNA
gttgccgctggaccacgatctctgaagcgctattct

SEQ ID NO: 12767 - DNA, 36 bp, synthetic construct
  misc_feature 1..36: note = Description of Artificial Sequence: Synthetic oligonucleotide
  source 1..36: mol_type = other DNA
gttgccgctggaccacgatctctgaagcggtattct

SEQ ID NO: 12768 - DNA, 33 bp, synthetic construct
  misc_feature 1..33: note = Description of Artificial Sequence: Synthetic oligonucleotide
  source 1..33: mol_type = other DNA
gttgccgctggaccgcaatctctgagcggctat

SEQ ID NO: 12769 - DNA, 36 bp, synthetic construct
  misc_feature 1..36: note = Description of Artificial Sequence: Synthetic oligonucleotide
  source 1..36: mol_type = other DNA
gttgccgctggaccgcaatctctgagcggctatact

SEQ ID NO: 12770 - DNA, 36 bp, synthetic construct
  misc_feature 1..36: note = Description of Artificial Sequence: Synthetic oligonucleotide
  source 1..36: mol_type = other DNA
gttgccgctggaccgcgatctctgaacagctatgat

SEQ ID NO: 12771 - DNA, 36 bp, synthetic construct
  misc_feature 1..36: note = Description of Artificial Sequence: Synthetic oligonucleotide
  source 1..36: mol_type = other DNA
gttgccgctggaccgcgatctctgaatagctatgat

SEQ ID NO: 12772 - DNA, 36 bp, synthetic construct
  misc_feature 1..36: note = Description of Artificial Sequence: Synthetic oligonucleotide
  source 1..36: mol_type = other DNA
gttgccgctggaccgcgatctctgagcggctatcct

SEQ ID NO: 12773 - DNA, 36 bp, synthetic construct
  misc_feature 1..36: note = Description of Artificial Sequence: Synthetic oligonucleotide
  source 1..36: mol_type = other DNA
gttgccgctggaccgcgatctctgagcggctatgat

SEQ ID NO: 12774 - DNA, 36 bp, synthetic construct
  misc_feature 1..36: note = Description of Artificial Sequence: Synthetic oligonucleotide
  source 1..36: mol_type = other DNA
gttgccgctggaccgcgatctctgagcggctattct

SEQ ID NO: 12775 - DNA, 36 bp, synthetic construct
  misc_feature 1..36: note = Description of Artificial Sequence: Synthetic oligonucleotide
  source 1..36: mol_type = other DNA
gttgccgctggaccgcgatttctgaactgctaagct

SEQ ID NO: 12776 - DNA, 36 bp, synthetic construct
  misc_feature 1..36: note = Description of Artificial Sequence: Synthetic oligonucleotide
  source 1..36: mol_type = other DNA
gttgccgctggaccgcgttatctgaactgctaagct

SEQ ID NO: 12777 - DNA, 36 bp, synthetic construct
  misc_feature 1..36: note = Description of Artificial Sequence: Synthetic oligonucleotide
  source 1..36: mol_type = other DNA
gttgccgctggaccgcgttttctgaactgctaagct

SEQ ID NO: 12778 - DNA, 36 bp, synthetic construct
  misc_feature 1..36: note = Description of Artificial Sequence: Synthetic oligonucleotide
  source 1..36: mol_type = other DNA
gttgccgttggaccgcgatttctgaactgctaagct

SEQ ID NO: 12779 - DNA, 46 bp, synthetic construct
  misc_feature 1..46: note = Description of Artificial Sequence: Synthetic oligonucleotide
  source 1..46: mol_type = other DNA
gttgcgaaagacctaagctacagaaaaattgaaagcaattcacaac

SEQ ID NO: 12780 - DNA, 45 bp, synthetic construct
  misc_feature 1..45: note = Description of Artificial Sequence: Synthetic oligonucleotide
  source 1..45: mol_type = other DNA
gttgcgaacaatcctaaatttagaaaaatgaaaccaattcacaac

SEQ ID NO: 12781 - DNA, 45 bp, synthetic construct
  misc_feature 1..45: note = Description of Artificial Sequence: Synthetic oligonucleotide
  source 1..45: mol_type = other DNA
gttgcgaacaatcctaatttagaaaaaatgaaaccaattcacaac

SEQ ID NO: 12782 - DNA, 47 bp, synthetic construct
  misc_feature 1..47: note = Description of Artificial Sequence: Synthetic oligonucleotide
  source 1..47: mol_type = other DNA
gttgcgaacaatcgcgaaatttaagaacttgaaagcaattcacaact

SEQ ID NO: 12783 - DNA, 46 bp, synthetic construct
  misc_feature 1..46: note = Description of Artificial Sequence: Synthetic oligonucleotide
  source 1..46: mol_type = other DNA
gttgcgaataatccttaaagatacaattttgaaagcaattcacaac

SEQ ID NO: 12784 - DNA, 46 bp, synthetic construct
  misc_feature 1..46: note = Description of Artificial Sequence: Synthetic oligonucleotide
  source 1..46: mol_type = other DNA
gttgcgaatcaaagataaaaatacaaaactgaaagcaattcacaac

SEQ ID NO: 12785 - DNA, 46 bp, synthetic construct
  misc_feature 1..46: note = Description of Artificial Sequence: Synthetic oligonucleotide
  source 1..46: mol_type = other DNA
gttgcgaatccccctaatatactaaaatgcgaaagcaattcacaac

SEQ ID NO: 12786 - DNA, 36 bp, synthetic construct
  misc_feature 1..36: note = Description of Artificial Sequence: Synthetic oligonucleotide
  source 1..36: mol_type = other DNA
gttgcgaattgatcccgggctgaggttggttacact

SEQ ID NO: 12787 - DNA, 36 bp, synthetic construct
  misc_feature 1..36: note = Description of Artificial Sequence: Synthetic oligonucleotide
  source 1..36: mol_type = other DNA
gttgcgactagacatctaaaaccaatatgctataat

SEQ ID NO: 12788 - DNA, 36 bp, synthetic construct
  misc_feature 1..36: note = Description of Artificial Sequence: Synthetic oligonucleotide
  source 1..36: mol_type = other DNA
gttgcgacttgaccccgttttcccttctgctacgct

SEQ ID NO: 12789 - DNA, 36 bp, synthetic construct
  misc_feature 1..36: note = Description of Artificial Sequence: Synthetic oligonucleotide
  source 1..36: mol_type = other DNA
gttgcgacttgcctacaaagcgggatcggatacact

SEQ ID NO: 12790 - DNA, 36 bp, synthetic construct
  misc_feature 1..36: note = Description of Artificial Sequence: Synthetic oligonucleotide
  source 1..36: mol_type = other DNA
gttgcgacttgcttacaggccaggatcggatacact

SEQ ID NO: 12791 - DNA, 36 bp, synthetic construct
  misc_feature 1..36: note = Description of Artificial Sequence: Synthetic oligonucleotide
  source 1..36: mol_type = other DNA
gttgcgacttgctttcaggccggggttgattacact

SEQ ID NO: 12792 - DNA, 29 bp, synthetic construct
  misc_feature 1..29: note = Description of Artificial Sequence: Synthetic oligonucleotide
  source 1..29: mol_type = other DNA
gttgcgacttggctgcgggttgggatcag

SEQ ID NO: 12793 - DNA, 47 bp, synthetic construct
  misc_feature 1..47: note = Description of Artificial Sequence: Synthetic oligonucleotide
  source 1..47: mol_type = other DNA
gttgcgattaatcacgaagataataaattttgaaagcaattcacaac

SEQ ID NO: 12794 - DNA, 47 bp, synthetic construct
  misc_feature 1..47: note = Description of Artificial Sequence: Synthetic oligonucleotide
  source 1..47: mol_type = other DNA
gttgcgattaatcactaagataataatttttgaaagcaattcacaac

SEQ ID NO: 12795 - DNA, 36 bp, synthetic construct
  misc_feature 1..36: note = Description of Artificial Sequence: Synthetic oligonucleotide
  source 1..36: mol_type = other DNA
gttgcgattggaccgcaccgcgtcccctgctagaac

SEQ ID NO: 12796 - DNA, 46 bp, synthetic construct
  misc_feature 1..46: note = Description of Artificial Sequence: Synthetic oligonucleotide
  source 1..46: mol_type = other DNA
gttgcgatttgctttcattcattgaaatactgagatttactacaac

SEQ ID NO: 12797 - DNA, 36 bp, synthetic construct
  misc_feature 1..36: note = Description of Artificial Sequence: Synthetic oligonucleotide
  source 1..36: mol_type = other DNA
gttgcggactgctctcggggacggatctgttacact

SEQ ID NO: 12798 - DNA, 36 bp, synthetic construct
  misc_feature 1..36: note = Description of Artificial Sequence: Synthetic oligonucleotide
  source 1..36: mol_type = other DNA
gttgcggattgaacccggcctgaggttggttacact

SEQ ID NO: 12799 - DNA, 36 bp, synthetic construct
  misc_feature 1..36: note = Description of Artificial Sequence: Synthetic oligonucleotide
  source 1..36: mol_type = other DNA
gttgcggattgaatacgttctctaagatgctaagct

SEQ ID NO: 12800 - DNA, 36 bp, synthetic construct
  misc_feature 1..36: note = Description of Artificial Sequence: Synthetic oligonucleotide
  source 1..36: mol_type = other DNA
gttgcggattgacactggttctttgatttctacaat

SEQ ID NO: 12801 - DNA, 36 bp, synthetic construct
  misc_feature 1..36: note = Description of Artificial Sequence: Synthetic oligonucleotide
  source 1..36: mol_type = other DNA
gttgcggattgaccacaggctgggatcagttacact

SEQ ID NO: 12802 - DNA, 36 bp, synthetic construct
  misc_feature 1..36: note = Description of Artificial Sequence: Synthetic oligonucleotide
  source 1..36: mol_type = other DNA
gttgcggattgaccgcattttctaatcagctacaat

SEQ ID NO: 12803 - DNA, 36 bp, synthetic construct
  misc_feature 1..36: note = Description of Artificial Sequence: Synthetic oligonucleotide
  source 1..36: mol_type = other DNA
gttgcggattgaccgggatttctgaatagctacact

SEQ ID NO: 12804 - DNA, 36 bp, synthetic construct
  misc_feature 1..36: note = Description of Artificial Sequence: Synthetic oligonucleotide
  source 1..36: mol_type = other DNA
gttgcggattgacgattgttctttgatttctatatt

SEQ ID NO: 12805 - DNA, 36 bp, synthetic construct
  misc_feature 1..36: note = Description of Artificial Sequence: Synthetic oligonucleotide
  source 1..36: mol_type = other DNA
gttgcggattgactccgttttctgatgtgttacaat

SEQ ID NO: 12806 - DNA, 36 bp, synthetic construct
  misc_feature 1..36: note = Description of Artificial Sequence: Synthetic oligonucleotide
  source 1..36: mol_type = other DNA
gttgcggattgactccgttttctgctgtggtatact

SEQ ID NO: 12807 - DNA, 36 bp, synthetic construct
  misc_feature 1..36: note = Description of Artificial Sequence: Synthetic oligonucleotide
  source 1..36: mol_type = other DNA
gttgcggattgacttcaggctgggatcagttacaat

SEQ ID NO: 12808 - DNA, 36 bp, synthetic construct
  misc_feature 1..36: note = Description of Artificial Sequence: Synthetic oligonucleotide
  source 1..36: mol_type = other DNA
gttgcggattgatcacagattgggattgattacact

SEQ ID NO: 12809 - DNA, 36 bp, synthetic construct
  misc_feature 1..36: note = Description of Artificial Sequence: Synthetic oligonucleotide
  source 1..36: mol_type = other DNA
gttgcggattgatcccggtcctggattggttacact

SEQ ID NO: 12810 - DNA, 37 bp, synthetic construct
  misc_feature 1..37: note = Description of Artificial Sequence: Synthetic oligonucleotide
  source 1..37: mol_type = other DNA
gttgcggattgatggcgggcttgggttggttagactc

SEQ ID NO: 12811 - DNA, 36 bp, synthetic construct
  misc_feature 1..36: note = Description of Artificial Sequence: Synthetic oligonucleotide
  source 1..36: mol_type = other DNA
gttgcggattgctagcaggctgaggtgggctatact

SEQ ID NO: 12812 - DNA, 36 bp, synthetic construct
  misc_feature 1..36: note = Description of Artificial Sequence: Synthetic oligonucleotide
  source 1..36: mol_type = other DNA
gttgcggattgctcacaggccggggtcgaatacact

SEQ ID NO: 12813 - DNA, 36 bp, synthetic construct
  misc_feature 1..36: note = Description of Artificial Sequence: Synthetic oligonucleotide
  source 1..36: mol_type = other DNA
gttgcggattgctcacagggtggggtcggttacact

SEQ ID NO: 12814 - DNA, 36 bp, synthetic construct
  misc_feature 1..36: note = Description of Artificial Sequence: Synthetic oligonucleotide
  source 1..36: mol_type = other DNA
gttgcggattgctcccaggccggggtcggttacact

SEQ ID NO: 12815 - DNA, 36 bp, synthetic construct
  misc_feature 1..36: note = Description of Artificial Sequence: Synthetic oligonucleotide
  source 1..36: mol_type = other DNA
gttgcggattgctcgcaggctgaggtcgattacact

SEQ ID NO: 12816 - DNA, 36 bp, synthetic construct
  misc_feature 1..36: note = Description of Artificial Sequence: Synthetic oligonucleotide
  source 1..36: mol_type = other DNA
gttgcggattgctcgcgggccggggtcgattacact

SEQ ID NO: 12817 - DNA, 36 bp, synthetic construct
  misc_feature 1..36: note = Description of Artificial Sequence: Synthetic oligonucleotide
  source 1..36: mol_type = other DNA
gttgcggattgctcgcgggccggggtcggttacact

SEQ ID NO: 12818 - DNA, 37 bp, synthetic construct
  misc_feature 1..37: note = Description of Artificial Sequence: Synthetic oligonucleotide
  source 1..37: mol_type = other DNA
gttgcggattgctctcaggacgggattggatagactc

SEQ ID NO: 12819 - DNA, 36 bp, synthetic construct
  misc_feature 1..36: note = Description of Artificial Sequence: Synthetic oligonucleotide
  source 1..36: mol_type = other DNA
gttgcggattgctttcaggccgggattggttacact

SEQ ID NO: 12820 - DNA, 36 bp, synthetic construct
  misc_feature 1..36: note = Description of Artificial Sequence: Synthetic oligonucleotide
  source 1..36: mol_type = other DNA
gttgcggattggtcgcaggcagagatcggttacact

SEQ ID NO: 12821 - DNA, 36 bp, synthetic construct
  misc_feature 1..36: note = Description of Artificial Sequence: Synthetic oligonucleotide
  source 1..36: mol_type = other DNA
gttgcggattggtcgcaggcggtgattggttacact

SEQ ID NO: 12822 - DNA, 36 bp, synthetic construct
  misc_feature 1..36: note = Description of Artificial Sequence: Synthetic oligonucleotide
  source 1..36: mol_type = other DNA
gttgcggattggtcgcaggctaggatcggttacact

SEQ ID NO: 12823 - DNA, 36 bp, synthetic construct
  misc_feature 1..36: note = Description of Artificial Sequence: Synthetic oligonucleotide
  source 1..36: mol_type = other DNA
gttgcggattggtcgcgggctgagattggttacact

SEQ ID NO: 12824 - DNA, 36 bp, synthetic construct
  misc_feature 1..36: note = Description of Artificial Sequence: Synthetic oligonucleotide
  source 1..36: mol_type = other DNA
gttgcggattggtctcaggccaagattggttacact

SEQ ID NO: 12825 - DNA, 36 bp, synthetic construct
  misc_feature 1..36: note = Description of Artificial Sequence: Synthetic oligonucleotide
  source 1..36: mol_type = other DNA
gttgcggccagggctcatttcccagagcgatagact

SEQ ID NO: 12826 - DNA, 36 bp, synthetic construct
  misc_feature 1..36: note = Description of Artificial Sequence: Synthetic oligonucleotide
  source 1..36: mol_type = other DNA
gttgcggctagacatctaattccaatctgatataat

SEQ ID NO: 12827 - DNA, 36 bp, synthetic construct
  misc_feature 1..36: note = Description of Artificial Sequence: Synthetic oligonucleotide
  source 1..36: mol_type = other DNA
gttgcggctagcgcacgatttcctatcggctaaact

SEQ ID NO: 12828 - DNA, 36 bp, synthetic construct
  misc_feature 1..36: note = Description of Artificial Sequence: Synthetic oligonucleotide
  source 1..36: mol_type = other DNA
gttgcggctggacatctaattccaatatgctataat

SEQ ID NO: 12829 - DNA, 36 bp, synthetic construct
  misc_feature 1..36: note = Description of Artificial Sequence: Synthetic oligonucleotide
  source 1..36: mol_type = other DNA
gttgcggctggacatttaatccctatgcgttataat

SEQ ID NO: 12830 - DNA, 36 bp, synthetic construct
  misc_feature 1..36: note = Description of Artificial Sequence: Synthetic oligonucleotide
  source 1..36: mol_type = other DNA
gttgcggctggaccacgatttctgatgtgctaggcc

SEQ ID NO: 12831 - DNA, 36 bp, synthetic construct
  misc_feature 1..36: note = Description of Artificial Sequence: Synthetic oligonucleotide
  source 1..36: mol_type = other DNA
gttgcggctggaccccgatttttgaaccgctacact

SEQ ID NO: 12832 - DNA, 37 bp, synthetic construct
  misc_feature 1..37: note = Description of Artificial Sequence: Synthetic oligonucleotide
  source 1..37: mol_type = other DNA
gttgcggctggaccccgccaatcaaactgctaaacta

SEQ ID NO: 12833 - DNA, 36 bp, synthetic construct
  misc_feature 1..36: note = Description of Artificial Sequence: Synthetic oligonucleotide
  source 1..36: mol_type = other DNA
gttgcggctggaccccggtttctgaacagctatgat

SEQ ID NO: 12834 - DNA, 36 bp, synthetic construct
  misc_feature 1..36: note = Description of Artificial Sequence: Synthetic oligonucleotide
  source 1..36: mol_type = other DNA
gttgcggctggaccgcgaattctgaacagctacaat

SEQ ID NO: 12835 - DNA, 36 bp, synthetic construct
  misc_feature 1..36: note = Description of Artificial Sequence: Synthetic oligonucleotide
  source 1..36: mol_type = other DNA
gttgcggctggaccgcgaattttgaacagccacaat

SEQ ID NO: 12836 - DNA, 36 bp, synthetic construct
  misc_feature 1..36: note = Description of Artificial Sequence: Synthetic oligonucleotide
  source 1..36: mol_type = other DNA
gttgcggctggaccgcgaattttgaacagctacaat

SEQ ID NO: 12837 - DNA, 36 bp, synthetic construct
  misc_feature 1..36: note = Description of Artificial Sequence: Synthetic oligonucleotide
  source 1..36: mol_type = other DNA
gttgcggctggaccgcgaattttgaacagctataat

SEQ ID NO: 12838 - DNA, 36 bp, synthetic construct
  misc_feature 1..36: note = Description of Artificial Sequence: Synthetic oligonucleotide
  source 1..36: mol_type = other DNA
gttgcggctggaccgcgttttctaatctgctataat

SEQ ID NO: 12839 - DNA, 36 bp, synthetic construct
  misc_feature 1..36: note = Description of Artificial Sequence: Synthetic oligonucleotide
  source 1..36: mol_type = other DNA
gttgcggctggaccgcgttttctgaactgctaagct

SEQ ID NO: 12840 - DNA, 36 bp, synthetic construct
  misc_feature 1..36: note = Description of Artificial Sequence: Synthetic oligonucleotide
  source 1..36: mol_type = other DNA
gttgcggctggaccgcgttttctgaactgctacagt

SEQ ID NO: 12841 - DNA, 36 bp, synthetic construct
  misc_feature 1..36: note = Description of Artificial Sequence: Synthetic oligonucleotide
  source 1..36: mol_type = other DNA
gttgcggctggaccgcgttttctgatctgctaagct

SEQ ID NO: 12842 - DNA, 36 bp, synthetic construct
  misc_feature 1..36: note = Description of Artificial Sequence: Synthetic oligonucleotide
  source 1..36: mol_type = other DNA
gttgcggctggaccgctttttctgatctgctaagct

SEQ ID NO: 12843 - DNA, 36 bp, synthetic construct
  misc_feature 1..36: note = Description of Artificial Sequence: Synthetic oligonucleotide
  source 1..36: mol_type = other DNA
gttgcggctggacctccgatccccatcggctacact

SEQ ID NO: 12844 - DNA, 36 bp, synthetic construct
  misc_feature 1..36: note = Description of Artificial Sequence: Synthetic oligonucleotide
  source 1..36: mol_type = other DNA
gttgcggctggacctcgaattctgaacggctatact

SEQ ID NO: 12845 - DNA, 36 bp, synthetic construct
  misc_feature 1..36: note = Description of Artificial Sequence: Synthetic oligonucleotide
  source 1..36: mol_type = other DNA
gttgcggctggacctcgaattctgaactgctaatct

SEQ ID NO: 12846 - DNA, 36 bp, synthetic construct
  misc_feature 1..36: note = Description of Artificial Sequence: Synthetic oligonucleotide
  source 1..36: mol_type = other DNA
gttgcggctggacctcgaattctgaactgctaggct

SEQ ID NO: 12847 - DNA, 36 bp, synthetic construct
  misc_feature 1..36: note = Description of Artificial Sequence: Synthetic oligonucleotide
  source 1..36: mol_type = other DNA
gttgcggctggacctcggattttgaacagctacaat

SEQ ID NO: 12848 - DNA, 36 bp, synthetic construct
  misc_feature 1..36: note = Description of Artificial Sequence: Synthetic oligonucleotide
  source 1..36: mol_type = other DNA
gttgcggctggcccccgttcccccatcggctaaact

SEQ ID NO: 12849 - DNA, 36 bp, synthetic construct
  misc_feature 1..36: note = Description of Artificial Sequence: Synthetic oligonucleotide
  source 1..36: mol_type = other DNA
gttgcggctggcccgcattcccccatcggctacaat

SEQ ID NO: 12850 - DNA, 36 bp, synthetic construct
  misc_feature 1..36: note = Description of Artificial Sequence: Synthetic oligonucleotide
  source 1..36: mol_type = other DNA
gttgcggctggcccgtgaattccgaaatgctatagt

SEQ ID NO: 12851 - DNA, 36 bp, synthetic construct
  misc_feature 1..36: note = Description of Artificial Sequence: Synthetic oligonucleotide
  source 1..36: mol_type = other DNA
gttgcggctggccctcaatctctaagcggctacaat

SEQ ID NO: 12852 - DNA, 36 bp, synthetic construct
  misc_feature 1..36: note = Description of Artificial Sequence: Synthetic oligonucleotide
  source 1..36: mol_type = other DNA
gttgcggctggccctcgatctctaagcggctacact

SEQ ID NO: 12853 - DNA, 36 bp, synthetic construct
  misc_feature 1..36: note = Description of Artificial Sequence: Synthetic oligonucleotide
  source 1..36: mol_type = other DNA
gttgcggctggccttcgatttctgaactgctaaatt

SEQ ID NO: 12854 - DNA, 36 bp, synthetic construct
  misc_feature 1..36: note = Description of Artificial Sequence: Synthetic oligonucleotide
  source 1..36: mol_type = other DNA
gttgcggctggcgcgcgatctcctatcggctaaact

SEQ ID NO: 12855 - DNA, 36 bp, synthetic construct
  misc_feature 1..36: note = Description of Artificial Sequence: Synthetic oligonucleotide
  source 1..36: mol_type = other DNA
gttgcggctggtccccgatctcccatcggctaaact

SEQ ID NO: 12856 - DNA, 36 bp, synthetic construct
  misc_feature 1..36: note = Description of Artificial Sequence: Synthetic oligonucleotide
  source 1..36: mol_type = other DNA
gttgcggctggtccgcgatttcctatcggctaaact

SEQ ID NO: 12857 - DNA, 36 bp, synthetic construct
  misc_feature 1..36: note = Description of Artificial Sequence: Synthetic oligonucleotide
  source 1..36: mol_type = other DNA
gttgcggcttgaccccatttcaccttatgctacaat

SEQ ID NO: 12858 - DNA, 36 bp, synthetic construct
  misc_feature 1..36: note = Description of Artificial Sequence: Synthetic oligonucleotide
  source 1..36: mol_type = other DNA
gttgcggcttgaccccatttccccatttgctacgat

SEQ ID NO: 12859 - DNA, 36 bp, synthetic construct
  misc_feature 1..36: note = Description of Artificial Sequence: Synthetic oligonucleotide
  source 1..36: mol_type = other DNA
gttgcggcttgaccccatttccccgtctgctacgct

SEQ ID NO: 12860 - DNA, 36 bp, synthetic construct
  misc_feature 1..36: note = Description of Artificial Sequence: Synthetic oligonucleotide
  source 1..36: mol_type = other DNA
gttgcggcttgaccccgtttccccctctgctacgtt

SEQ ID NO: 12861 - DNA, 36 bp, synthetic construct
  misc_feature 1..36: note = Description of Artificial Sequence: Synthetic oligonucleotide
  source 1..36: mol_type = other DNA
gttgcggcttgaccccttttccccctttgctacaat

SEQ ID NO: 12862 - DNA, 36 bp, synthetic construct
  misc_feature 1..36: note = Description of Artificial Sequence: Synthetic oligonucleotide
  source 1..36: mol_type = other DNA
gttgcggcttgaccgtgaacttccaaaagctactct

SEQ ID NO: 12863 - DNA, 37 bp, synthetic construct
  misc_feature 1..37: note = Description of Artificial Sequence: Synthetic oligonucleotide
  source 1..37: mol_type = other DNA
gttgcggcttgaccgtgttttctgaatgattatactc

SEQ ID NO: 12864 - DNA, 36 bp, synthetic construct
  misc_feature 1..36: note = Description of Artificial Sequence: Synthetic oligonucleotide
  source 1..36: mol_type = other DNA
gttgcggcttgatggcaggctgggatcgactacact

SEQ ID NO: 12865 - DNA, 36 bp, synthetic construct
  misc_feature 1..36: note = Description of Artificial Sequence: Synthetic oligonucleotide
  source 1..36: mol_type = other DNA
gttgcggcttgctcgcaggctggggtcgattacact

SEQ ID NO: 12866 - DNA, 36 bp, synthetic construct
  misc_feature 1..36: note = Description of Artificial Sequence: Synthetic oligonucleotide
  source 1..36: mol_type = other DNA
gttgcggcttgctcgcagggtcgggtcggttacact

SEQ ID NO: 12867 - DNA, 36 bp, synthetic construct
  misc_feature 1..36: note = Description of Artificial Sequence: Synthetic oligonucleotide
  source 1..36: mol_type = other DNA
gttgcggcttgctcgcaggtcggggtcgattacact

SEQ ID NO: 12868 - DNA, 36 bp, synthetic construct
  misc_feature 1..36: note = Description of Artificial Sequence: Synthetic oligonucleotide
  source 1..36: mol_type = other DNA
gttgcggcttgctcgcgggccaggattcactacact

SEQ ID NO: 12869 - DNA, 36 bp, synthetic construct
  misc_feature 1..36: note = Description of Artificial Sequence: Synthetic oligonucleotide
  source 1..36: mol_type = other DNA
gttgcggcttgctcgcgggccgggatcggttacact

SEQ ID NO: 12870 - DNA, 36 bp, synthetic construct
  misc_feature 1..36: note = Description of Artificial Sequence: Synthetic oligonucleotide
  source 1..36: mol_type = other DNA
gttgcggcttgctctcaggctggggtcgattacact

SEQ ID NO: 12871 - DNA, 36 bp, synthetic construct
  misc_feature 1..36: note = Description of Artificial Sequence: Synthetic oligonucleotide
  source 1..36: mol_type = other DNA
gttgcggcttgcttgcgggccgggatcggatacact

SEQ ID NO: 12872 - DNA, 36 bp, synthetic construct
  misc_feature 1..36: note = Description of Artificial Sequence: Synthetic oligonucleotide
  source 1..36: mol_type = other DNA
gttgcgggctggtcgcagagcgggaccgaatacact

SEQ ID NO: 12873 - DNA, 36 bp, synthetic construct
  misc_feature 1..36: note = Description of Artificial Sequence: Synthetic oligonucleotide
  source 1..36: mol_type = other DNA
gttgcggggagattccatttcttggtaagctgaatt

SEQ ID NO: 12874 - DNA, 36 bp, synthetic construct
  misc_feature 1..36: note = Description of Artificial Sequence: Synthetic oligonucleotide
  source 1..36: mol_type = other DNA
gttgcgggtggcgcccaagaccaaatgatctaagct

SEQ ID NO: 12875 - DNA, 36 bp, synthetic construct
  misc_feature 1..36: note = Description of Artificial Sequence: Synthetic oligonucleotide
  source 1..36: mol_type = other DNA
gttgcgggttgaccaagatttctgaatagctacaat

SEQ ID NO: 12876 - DNA, 36 bp, synthetic construct
  misc_feature 1..36: note = Description of Artificial Sequence: Synthetic oligonucleotide
  source 1..36: mol_type = other DNA
gttgcgggttgaccgcattttctaagaagctacact

SEQ ID NO: 12877 - DNA, 36 bp, synthetic construct
  misc_feature 1..36: note = Description of Artificial Sequence: Synthetic oligonucleotide
  source 1..36: mol_type = other DNA
gttgcgggttgactaggatttctgaatagctacact

SEQ ID NO: 12878 - DNA, 36 bp, synthetic construct
  misc_feature 1..36: note = Description of Artificial Sequence: Synthetic oligonucleotide
  source 1..36: mol_type = other DNA
gttgcgggttgcgccaaaaataaaatgatctaagct

SEQ ID NO: 12879 - DNA, 36 bp, synthetic construct
  misc_feature 1..36: note = Description of Artificial Sequence: Synthetic oligonucleotide
  source 1..36: mol_type = other DNA
gttgcgggttgcgctcaagtccggatgatctaagct

SEQ ID NO: 12880 - DNA, 36 bp, synthetic construct
  misc_feature 1..36: note = Description of Artificial Sequence: Synthetic oligonucleotide
  source 1..36: mol_type = other DNA
gttgcgggttgctcgcagatcaggatcgattacact

SEQ ID NO: 12881 - DNA, 36 bp, synthetic construct
  misc_feature 1..36: note = Description of Artificial Sequence: Synthetic oligonucleotide
  source 1..36: mol_type = other DNA
gttgcgggttgctcgcaggccgggatcgattacact

SEQ ID NO: 12882 - DNA, 36 bp, synthetic construct
  misc_feature 1..36: note = Description of Artificial Sequence: Synthetic oligonucleotide
  source 1..36: mol_type = other DNA
gttgcgggttgctcgcgggccgggatcgattacact

SEQ ID NO: 12883 - DNA, 36 bp, synthetic construct
  misc_feature 1..36: note = Description of Artificial Sequence: Synthetic oligonucleotide
  source 1..36: mol_type = other DNA
gttgcgggttggtcgccggctcgggttaaatggaac

SEQ ID NO: 12884 - DNA, 36 bp, synthetic construct
  misc_feature 1..36: note = Description of Artificial Sequence: Synthetic oligonucleotide
  source 1..36: mol_type = other DNA
gttgcgggttggtcgcggggcgggatcgattacact

SEQ ID NO: 12885 - DNA, 37 bp, synthetic construct
  misc_feature 1..37: note = Description of Artificial Sequence: Synthetic oligonucleotide
  source 1..37: mol_type = other DNA
gttgcgggttggtttcgggtcgggattggatagactc

SEQ ID NO: 12886 - DNA, 36 bp, synthetic construct
  misc_feature 1..36: note = Description of Artificial Sequence: Synthetic oligonucleotide
  source 1..36: mol_type = other DNA
gttgcggtgggaccgcgccgcgtcgtctgctagaac

SEQ ID NO: 12887 - DNA, 36 bp, synthetic construct
  misc_feature 1..36: note = Description of Artificial Sequence: Synthetic oligonucleotide
  source 1..36: mol_type = other DNA
gttgcggttgaccctcactcaccagaccgctaagta

SEQ ID NO: 12888 - DNA, 36 bp, synthetic construct
  misc_feature 1..36: note = Description of Artificial Sequence: Synthetic oligonucleotide
  source 1..36: mol_type = other DNA
gttgcggttgagccgctattcttgttctgctaatct

SEQ ID NO: 12889 - DNA, 36 bp, synthetic construct
  misc_feature 1..36: note = Description of Artificial Sequence: Synthetic oligonucleotide
  source 1..36: mol_type = other DNA
gttgcggttgatccccgttctccattcggctacact

SEQ ID NO: 12890 - DNA, 36 bp, synthetic construct
  misc_feature 1..36: note = Description of Artificial Sequence: Synthetic oligonucleotide
  source 1..36: mol_type = other DNA
gttgcggttgccccccgatctcccatcggttacact

SEQ ID NO: 12891 - DNA, 36 bp, synthetic construct
  misc_feature 1..36: note = Description of Artificial Sequence: Synthetic oligonucleotide
  source 1..36: mol_type = other DNA
gttgcggttggaccgcgttccttagtcagctacact

SEQ ID NO: 12892 - DNA, 36 bp, synthetic construct
  misc_feature 1..36: note = Description of Artificial Sequence: Synthetic oligonucleotide
  source 1..36: mol_type = other DNA
gttgcggttggaccgcgttctctaggtaggtaggct

SEQ ID NO: 12893 - DNA, 36 bp, synthetic construct
  misc_feature 1..36: note = Description of Artificial Sequence: Synthetic oligonucleotide
  source 1..36: mol_type = other DNA
gttgcggttggaccgcgtttcctagtcagctaaact

SEQ ID NO: 12894 - DNA, 36 bp, synthetic construct
  misc_feature 1..36: note = Description of Artificial Sequence: Synthetic oligonucleotide
  source 1..36: mol_type = other DNA
gttgcggttggcacggcttttccagagtgctataac

SEQ ID NO: 12895 - DNA, 36 bp, synthetic construct
  misc_feature 1..36: note = Description of Artificial Sequence: Synthetic oligonucleotide
  source 1..36: mol_type = other DNA
gttgcggttggcccacacttcctgatcggctaacct

SEQ ID NO: 12896 - DNA, 36 bp, synthetic construct
  misc_feature 1..36: note = Description of Artificial Sequence: Synthetic oligonucleotide
  source 1..36: mol_type = other DNA
gttgcggttggcccacgatcactcggtaggtaggct

SEQ ID NO: 12897 - DNA, 36 bp, synthetic construct
  misc_feature 1..36: note = Description of Artificial Sequence: Synthetic oligonucleotide
  source 1..36: mol_type = other DNA
gttgcggttggcccacgatctccaagcggctaagct

SEQ ID NO: 12898 - DNA, 36 bp, synthetic construct
  misc_feature 1..36: note = Description of Artificial Sequence: Synthetic oligonucleotide
  source 1..36: mol_type = other DNA
gttgcggttggcccccattcccccatcggctaggct

SEQ ID NO: 12899 - DNA, 36 bp, synthetic construct
  misc_feature 1..36: note = Description of Artificial Sequence: Synthetic oligonucleotide
  source 1..36: mol_type = other DNA
gttgcggttggcccccattcccccatctgctaggct

SEQ ID NO: 12900 - DNA, 36 bp, synthetic construct
  misc_feature 1..36: note = Description of Artificial Sequence: Synthetic oligonucleotide
  source 1..36: mol_type = other DNA
gttgcggttggcccccgatctctgagcggctaaacc

SEQ ID NO: 12901 - DNA, 36 bp, synthetic construct
  misc_feature 1..36: note = Description of Artificial Sequence: Synthetic oligonucleotide
  source 1..36: mol_type = other DNA
gttgcggttggcccccgatttctgaactgctagacc

SEQ ID NO: 12902 - DNA, 36 bp, synthetic construct
  misc_feature 1..36: note = Description of Artificial Sequence: Synthetic oligonucleotide
  source 1..36: mol_type = other DNA
gttgcggttggcccccgatttctgagctgctaaacc

SEQ ID NO: 12903 - DNA, 36 bp, synthetic construct
  misc_feature 1..36: note = Description of Artificial Sequence: Synthetic oligonucleotide
  source 1..36: mol_type = other DNA
gttgcggttggcccccgttctcccctcggctataat

SEQ ID NO: 12904 - DNA, 36 bp, synthetic construct
  misc_feature 1..36: note = Description of Artificial Sequence: Synthetic oligonucleotide
  source 1..36: mol_type = other DNA
gttgcggttggcccctgatctccaagcggctatggt

SEQ ID NO: 12905 - DNA, 36 bp, synthetic construct
  misc_feature 1..36: note = Description of Artificial Sequence: Synthetic oligonucleotide
  source 1..36: mol_type = other DNA
gttgcggttggcccgcattcccccatcggctataac

SEQ ID NO: 12906 - DNA, 36 bp, synthetic construct
  misc_feature 1..36: note = Description of Artificial Sequence: Synthetic oligonucleotide
  source 1..36: mol_type = other DNA
gttgcggttggcccgcgatcattcggtaggtaggct

SEQ ID NO: 12907 - DNA, 36 bp, synthetic construct
  misc_feature 1..36: note = Description of Artificial Sequence: Synthetic oligonucleotide
  source 1..36: mol_type = other DNA
gttgcggttggcccgcgctgcttggactgctaaatc

SEQ ID NO: 12908 - DNA, 36 bp, synthetic construct
  misc_feature 1..36: note = Description of Artificial Sequence: Synthetic oligonucleotide
  source 1..36: mol_type = other DNA
gttgcggttggcccgcgttctttaatcagctataac

SEQ ID NO: 12909 - DNA, 36 bp, synthetic construct
  misc_feature 1..36: note = Description of Artificial Sequence: Synthetic oligonucleotide
  source 1..36: mol_type = other DNA
gttgcggttggcccgctaatccctatcggctaagat

SEQ ID NO: 12910 - DNA, 36 bp, synthetic construct
  misc_feature 1..36: note = Description of Artificial Sequence: Synthetic oligonucleotide
  source 1..36: mol_type = other DNA
gttgcggttggcccggcttttccagagtgctataac

SEQ ID NO: 12911 - DNA, 36 bp, synthetic construct
  misc_feature 1..36: note = Description of Artificial Sequence: Synthetic oligonucleotide
  source 1..36: mol_type = other DNA
gttgcggttggccctcaatcaccagaccgctaagat

SEQ ID NO: 12912 - DNA, 36 bp, synthetic construct
  misc_feature 1..36: note = Description of Artificial Sequence: Synthetic oligonucleotide
  source 1..36: mol_type = other DNA
gttgcggttggccctcaatcaccagaccgctatagt

SEQ ID NO: 12913 - DNA, 36 bp, synthetic construct
  misc_feature 1..36: note = Description of Artificial Sequence: Synthetic oligonucleotide
  source 1..36: mol_type = other DNA
gttgcggttggccctcaatcaccagaccgctatgat

SEQ ID NO: 12914 - DNA, 36 bp, synthetic construct
  misc_feature 1..36: note = Description of Artificial Sequence: Synthetic oligonucleotide
  source 1..36: mol_type = other DNA
gttgcggttggccctcaatcaccagactgctaaact

SEQ ID NO: 12915 - DNA, 36 bp, synthetic construct
  misc_feature 1..36: note = Description of Artificial Sequence: Synthetic oligonucleotide
  source 1..36: mol_type = other DNA
gttgcggttggccctcaatcaccagtccgctagagt

SEQ ID NO: 12916 - DNA, 36 bp, synthetic construct
  misc_feature 1..36: note = Description of Artificial Sequence: Synthetic oligonucleotide
  source 1..36: mol_type = other DNA
gttgcggttggcctgcgatttctgaactgctaagcc

SEQ ID NO: 12917 - DNA, 36 bp, synthetic construct
  misc_feature 1..36: note = Description of Artificial Sequence: Synthetic oligonucleotide
  source 1..36: mol_type = other DNA
gttgcggttggcctgcgatttctgagctgctaggcc

SEQ ID NO: 12918 - DNA, 37 bp, synthetic construct
  misc_feature 1..37: note = Description of Artificial Sequence: Synthetic oligonucleotide
  source 1..37: mol_type = other DNA
gttgcggttggcctgcgatttctgagctgctaggccg

SEQ ID NO: 12919 - DNA, 36 bp, synthetic construct
  misc_feature 1..36: note = Description of Artificial Sequence: Synthetic oligonucleotide
  source 1..36: mol_type = other DNA
gttgcggttggcctgcgttttctgaacagctaaact

SEQ ID NO: 12920 - DNA, 36 bp, synthetic construct
  misc_feature 1..36: note = Description of Artificial Sequence: Synthetic oligonucleotide
  source 1..36: mol_type = other DNA
gttgcggttggcgcacaggctctgatcagctacaat

SEQ ID NO: 12921 - DNA, 37 bp, synthetic construct
  misc_feature 1..37: note = Description of Artificial Sequence: Synthetic oligonucleotide
  source 1..37: mol_type = other DNA
gttgcggttggcgcgcgatttcctatcggctaaagtc

SEQ ID NO: 12922 - DNA, 36 bp, synthetic construct
  misc_feature 1..36: note = Description of Artificial Sequence: Synthetic oligonucleotide
  source 1..36: mol_type = other DNA
gttgcggttggcgcgcgatttcctatcggctaaatt

SEQ ID NO: 12923 - DNA, 36 bp, synthetic construct
  misc_feature 1..36: note = Description of Artificial Sequence: Synthetic oligonucleotide
  source 1..36: mol_type = other DNA
gttgcggttggctcgacttttccagagtgctataac

SEQ ID NO: 12924 - DNA, 37 bp, synthetic construct
  misc_feature 1..37: note = Description of Artificial Sequence: Synthetic oligonucleotide
  source 1..37: mol_type = other DNA
gttgcggttggctcgcgaattctgaactgctattccg

SEQ ID NO: 12925 - DNA, 36 bp, synthetic construct
  misc_feature 1..36: note = Description of Artificial Sequence: Synthetic oligonucleotide
  source 1..36: mol_type = other DNA
gttgcggttggctcggcttttccagagtgctataac

SEQ ID NO: 12926 - DNA, 36 bp, synthetic construct
  misc_feature 1..36: note = Description of Artificial Sequence: Synthetic oligonucleotide
  source 1..36: mol_type = other DNA
gttgcggttggctttcattttccagagtgctatacc

SEQ ID NO: 12927 - DNA, 36 bp, synthetic construct
  misc_feature 1..36: note = Description of Artificial Sequence: Synthetic oligonucleotide
  source 1..36: mol_type = other DNA
gttgcggttgggccgcgatctcccatcggctaagat

SEQ ID NO: 12928 - DNA, 36 bp, synthetic construct
  misc_feature 1..36: note = Description of Artificial Sequence: Synthetic oligonucleotide
  source 1..36: mol_type = other DNA
gttgcggttgggccgcgccgcgatccctgctagaac

SEQ ID NO: 12929 - DNA, 36 bp, synthetic construct
  misc_feature 1..36: note = Description of Artificial Sequence: Synthetic oligonucleotide
  source 1..36: mol_type = other DNA
gttgcggttgggcgcctcggccgcctttgctagact

SEQ ID NO: 12930 - DNA, 36 bp, synthetic construct
  misc_feature 1..36: note = Description of Artificial Sequence: Synthetic oligonucleotide
  source 1..36: mol_type = other DNA
gttgcggttggtccccgatctcccatcggctaaaat

SEQ ID NO: 12931 - DNA, 36 bp, synthetic construct
  misc_feature 1..36: note = Description of Artificial Sequence: Synthetic oligonucleotide
  source 1..36: mol_type = other DNA
gttgcggttggtccgcgttctctcgtgcgctaacct

SEQ ID NO: 12932 - DNA, 36 bp, synthetic construct
  misc_feature 1..36: note = Description of Artificial Sequence: Synthetic oligonucleotide
  source 1..36: mol_type = other DNA
gttgcggttggtccggcttttccagagtgctatacc

SEQ ID NO: 12933 - DNA, 36 bp, synthetic construct
  misc_feature 1..36: note = Description of Artificial Sequence: Synthetic oligonucleotide
  source 1..36: mol_type = other DNA
gttgcggttggtcctcgattcctaatcggctaagct

SEQ ID NO: 12934 - DNA, 36 bp, synthetic construct
  misc_feature 1..36: note = Description of Artificial Sequence: Synthetic oligonucleotide
  source 1..36: mol_type = other DNA
gttgcggttggtcttacttttccagagtgctagacc

SEQ ID NO: 12935 - DNA, 36 bp, synthetic construct
  misc_feature 1..36: note = Description of Artificial Sequence: Synthetic oligonucleotide
  source 1..36: mol_type = other DNA
gttgcggtttgaccgcgatttcccatcggctatact

SEQ ID NO: 12936 - DNA, 36 bp, synthetic construct
  misc_feature 1..36: note = Description of Artificial Sequence: Synthetic oligonucleotide
  source 1..36: mol_type = other DNA
gttgcggtttgacgcaaaataattatctgccataat

SEQ ID NO: 12937 - DNA, 36 bp, synthetic construct
  misc_feature 1..36: note = Description of Artificial Sequence: Synthetic oligonucleotide
  source 1..36: mol_type = other DNA
gttgcggtttgacgccaattatttatctgctaaaat

SEQ ID NO: 12938 - DNA, 36 bp, synthetic construct
  misc_feature 1..36: note = Description of Artificial Sequence: Synthetic oligonucleotide
  source 1..36: mol_type = other DNA
gttgcggtttgacgccggtcactaatcagctaaaat

SEQ ID NO: 12939 - DNA, 36 bp, synthetic construct
  misc_feature 1..36: note = Description of Artificial Sequence: Synthetic oligonucleotide
  source 1..36: mol_type = other DNA
gttgcggtttgatgtagaaaatagatattaagcaac

SEQ ID NO: 12940 - DNA, 36 bp, synthetic construct
  misc_feature 1..36: note = Description of Artificial Sequence: Synthetic oligonucleotide
  source 1..36: mol_type = other DNA
gttgcggtttgatgtagaaacaagaaatgtagcaac

SEQ ID NO: 12941 - DNA, 36 bp, synthetic construct
  misc_feature 1..36: note = Description of Artificial Sequence: Synthetic oligonucleotide
  source 1..36: mol_type = other DNA
gttgcggtttgatgtagaaacaatttataaagcaac

SEQ ID NO: 12942 - DNA, 36 bp, synthetic construct
  misc_feature 1..36: note = Description of Artificial Sequence: Synthetic oligonucleotide
  source 1..36: mol_type = other DNA
gttgcggtttgatgtagaaacgattagtaaagcaac

SEQ ID NO: 12943 - DNA, 36 bp, synthetic construct
  misc_feature 1..36: note = Description of Artificial Sequence: Synthetic oligonucleotide
  source 1..36: mol_type = other DNA
gttgcggtttgatgtagaaagaagatatatagcaac

SEQ ID NO: 12944 - DNA, 36 bp, synthetic construct
  misc_feature 1..36: note = Description of Artificial Sequence: Synthetic oligonucleotide
  source 1..36: mol_type = other DNA
gttgcggtttgatgtaggaaaacaaagatatacaac

SEQ ID NO: 12945 - DNA, 36 bp, synthetic construct
  misc_feature 1..36: note = Description of Artificial Sequence: Synthetic oligonucleotide
  source 1..36: mol_type = other DNA
gttgcggtttgatgtaggataaaggagatatacaac

SEQ ID NO: 12946 - DNA, 36 bp, synthetic construct
  misc_feature 1..36: note = Description of Artificial Sequence: Synthetic oligonucleotide
  source 1..36: mol_type = other DNA
gttgcggtttgatgtaggataaggaagaaatacaac

SEQ ID NO: 12947 - DNA, 36 bp, synthetic construct
  misc_feature 1..36: note = Description of Artificial Sequence: Synthetic oligonucleotide
  source 1..36: mol_type = other DNA
gttgcggtttgatgtaggattataatgatatacaac

SEQ ID NO: 12948 - DNA, 36 bp, synthetic construct
  misc_feature 1..36: note = Description of Artificial Sequence: Synthetic oligonucleotide
  source 1..36: mol_type = other DNA
gttgcggtttgcccccgatctcccatcggctataat

SEQ ID NO: 12949 - DNA, 36 bp, synthetic construct
  misc_feature 1..36: note = Description of Artificial Sequence: Synthetic oligonucleotide
  source 1..36: mol_type = other DNA
gttgcggtttgcggccgaaccggtattcgctacact

SEQ ID NO: 12950 - DNA, 36 bp, synthetic construct
  misc_feature 1..36: note = Description of Artificial Sequence: Synthetic oligonucleotide
  source 1..36: mol_type = other DNA
gttgcgtattgacctcattttcctatctgctataat

SEQ ID NO: 12951 - DNA, 36 bp, synthetic construct
  misc_feature 1..36: note = Description of Artificial Sequence: Synthetic oligonucleotide
  source 1..36: mol_type = other DNA
gttgctactagacatttaattccaatatgatacaat

SEQ ID NO: 12952 - DNA, 36 bp, synthetic construct
  misc_feature 1..36: note = Description of Artificial Sequence: Synthetic oligonucleotide
  source 1..36: mol_type = other DNA
gttgctataggccctcaatcaccagagtgctatgat

SEQ ID NO: 12953 - DNA, 36 bp, synthetic construct
  misc_feature 1..36: note = Description of Artificial Sequence: Synthetic oligonucleotide
  source 1..36: mol_type = other DNA
gttgctataggccctcaatcaccagtgtgctatagt

SEQ ID NO: 12954 - DNA, 47 bp, synthetic construct
  misc_feature 1..47: note = Description of Artificial Sequence: Synthetic oligonucleotide
  source 1..47: mol_type = other DNA
gttgctgtagacctaatgtactgaaaaatttgaaagtaaatcacaac

SEQ ID NO: 12955 - DNA, 36 bp, synthetic construct
  misc_feature 1..36: note = Description of Artificial Sequence: Synthetic oligonucleotide
  source 1..36: mol_type = other DNA
gttgctgtagccctcccgatccccatcggctaccct

SEQ ID NO: 12956 - DNA, 47 bp, synthetic construct
  misc_feature 1..47: note = Description of Artificial Sequence: Synthetic oligonucleotide
  source 1..47: mol_type = other DNA
gttgcttatgatattgcaaagatatacatttggaagcaaatcacaac

SEQ ID NO: 12957 - DNA, 46 bp, synthetic construct
  misc_feature 1..46: note = Description of Artificial Sequence: Synthetic oligonucleotide
  source 1..46: mol_type = other DNA
gttgctttcgacttgcaaagataataaaaaagaagcgaatcacaac

SEQ ID NO: 12958 - DNA, 37 bp, synthetic construct
  misc_feature 1..37: note = Description of Artificial Sequence: Synthetic oligonucleotide
  source 1..37: mol_type = other DNA
gttggaatcttagcaaatcaagaaccagaaccgaaac

SEQ ID NO: 12959 - DNA, 47 bp, synthetic construct
  misc_feature 1..47: note = Description of Artificial Sequence: Synthetic oligonucleotide
  source 1..47: mol_type = other DNA
gttggatcagctacccacaaaggaaagaattgaaagcagatcacaac

SEQ ID NO: 12960 - DNA, 46 bp, synthetic construct
  misc_feature 1..46: note = Description of Artificial Sequence: Synthetic oligonucleotide
  source 1..46: mol_type = other DNA
gttggatcagctaccccaaaggaaagaattgaaagcagatcacaac

SEQ ID NO: 12961 - DNA, 47 bp, synthetic construct
  misc_feature 1..47: note = Description of Artificial Sequence: Synthetic oligonucleotide
  source 1..47: mol_type = other DNA
gttggatcagctaccctcaaaggaaagaactgaaagcagatcacaac

SEQ ID NO: 12962 - DNA, 36 bp, synthetic construct
  misc_feature 1..36: note = Description of Artificial Sequence: Synthetic oligonucleotide
  source 1..36: mol_type = other DNA
gttggattaccagtcagaacgacactgctccaaaac

SEQ ID NO: 12963 - DNA, 36 bp, synthetic construct
  misc_feature 1..36: note = Description of Artificial Sequence: Synthetic oligonucleotide
  source 1..36: mol_type = other DNA
gttggattaccagtcggaacgacactgctccaaaac

SEQ ID NO: 12964 - DNA, 47 bp, synthetic construct
  misc_feature 1..47: note = Description of Artificial Sequence: Synthetic oligonucleotide
  source 1..47: mol_type = other DNA
gttggattatacggtacaaagatacgaaaaagtaagctaatcacaac

SEQ ID NO: 12965 - DNA, 47 bp, synthetic construct
  misc_feature 1..47: note = Description of Artificial Sequence: Synthetic oligonucleotide
  source 1..47: mol_type = other DNA
gttggcatcaatcaaaagtagttcaaagaacgaaagcaaatcacaac

SEQ ID NO: 12966 - DNA, 36 bp, synthetic construct
  misc_feature 1..36: note = Description of Artificial Sequence: Synthetic oligonucleotide
  source 1..36: mol_type = other DNA
gttgggaaaaggttctcaaaccctcagataggctcc

SEQ ID NO: 12967 - DNA, 36 bp, synthetic construct
  misc_feature 1..36: note = Description of Artificial Sequence: Synthetic oligonucleotide
  source 1..36: mol_type = other DNA
gttgggaaaggctcgcaatctctgatctgatataat

SEQ ID NO: 12968 - DNA, 36 bp, synthetic construct
  misc_feature 1..36: note = Description of Artificial Sequence: Synthetic oligonucleotide
  source 1..36: mol_type = other DNA
gttgggaagtgtcgcgctttctcccgactaggcttg

SEQ ID NO: 12969 - DNA, 36 bp, synthetic construct
  misc_feature 1..36: note = Description of Artificial Sequence: Synthetic oligonucleotide
  source 1..36: mol_type = other DNA
gttgggaatcaattcaaatcccctgtgataaactac

SEQ ID NO: 12970 - DNA, 36 bp, synthetic construct
  misc_feature 1..36: note = Description of Artificial Sequence: Synthetic oligonucleotide
  source 1..36: mol_type = other DNA
gttgggaatcagtcacctctccctttgatagactta

SEQ ID NO: 12971 - DNA, 36 bp, synthetic construct
  misc_feature 1..36: note = Description of Artificial Sequence: Synthetic oligonucleotide
  source 1..36: mol_type = other DNA
gttgggaatcagtcttcattccccttgataaacttg

SEQ ID NO: 12972 - DNA, 36 bp, synthetic construct
  misc_feature 1..36: note = Description of Artificial Sequence: Synthetic oligonucleotide
  source 1..36: mol_type = other DNA
gttgggaatcagttaccaatcctcttgataagcttt

SEQ ID NO: 12973 - DNA, 36 bp, synthetic construct
  misc_feature 1..36: note = Description of Artificial Sequence: Synthetic oligonucleotide
  source 1..36: mol_type = other DNA
gttgggaatcagttaccaatcctcttgatagacttc

SEQ ID NO: 12974 - DNA, 36 bp, synthetic construct
  misc_feature 1..36: note = Description of Artificial Sequence: Synthetic oligonucleotide
  source 1..36: mol_type = other DNA
gttgggaatcagttaccgatcctcttgatagacttc

SEQ ID NO: 12975 - DNA, 36 bp, synthetic construct
  misc_feature 1..36: note = Description of Artificial Sequence: Synthetic oligonucleotide
  source 1..36: mol_type = other DNA
gttgggaatcccgttcagctctcccagctaggctcg

SEQ ID NO: 12976 - DNA, 36 bp, synthetic construct
  misc_feature 1..36: note = Description of Artificial Sequence: Synthetic oligonucleotide
  source 1..36: mol_type = other DNA
gttgggaatcccgttcttctctcccaactagacttg

SEQ ID NO: 12977 - DNA, 36 bp, synthetic construct
  misc_feature 1..36: note = Description of Artificial Sequence: Synthetic oligonucleotide
  source 1..36: mol_type = other DNA
gttgggaatcttcactaactatccttgctagactta

SEQ ID NO: 12978 - DNA, 46 bp, synthetic construct
  misc_feature 1..46: note = Description of Artificial Sequence: Synthetic oligonucleotide
  source 1..46: mol_type = other DNA
gttgggaattataagtaaaaatacaattttgaaagcaattcacaac

SEQ ID NO: 12979 - DNA, 46 bp, synthetic construct
  misc_feature 1..46: note = Description of Artificial Sequence: Synthetic oligonucleotide
  source 1..46: mol_type = other DNA
gttgggaattatatgctaaaatacaattttgaaagcaattcacaac

SEQ ID NO: 12980 - DNA, 36 bp, synthetic construct
  misc_feature 1..36: note = Description of Artificial Sequence: Synthetic oligonucleotide
  source 1..36: mol_type = other DNA
gttgggaattgctttcaaaaagaggtatttaacatg

SEQ ID NO: 12981 - DNA, 46 bp, synthetic construct
  misc_feature 1..46: note = Description of Artificial Sequence: Synthetic oligonucleotide
  source 1..46: mol_type = other DNA
gttgggaattgctttcaaaacgaggtctttgcatattacaaacaac

SEQ ID NO: 12982 - DNA, 47 bp, synthetic construct
  misc_feature 1..47: note = Description of Artificial Sequence: Synthetic oligonucleotide
  source 1..47: mol_type = other DNA
gttgggaattgctttcaaataaaagtctttgggatatcacaaacatc

SEQ ID NO: 12983 - DNA, 47 bp, synthetic construct
  misc_feature 1..47: note = Description of Artificial Sequence: Synthetic oligonucleotide
  source 1..47: mol_type = other DNA
gttgggaattgctttcataatcgattttatgttaactatataacacc

SEQ ID NO: 12984 - DNA, 36 bp, synthetic construct
  misc_feature 1..36: note = Description of Artificial Sequence: Synthetic oligonucleotide
  source 1..36: mol_type = other DNA
gttgggacttgtagaaaatccctttcgatttagaat

SEQ ID NO: 12985 - DNA, 36 bp, synthetic construct
  misc_feature 1..36: note = Description of Artificial Sequence: Synthetic oligonucleotide
  source 1..36: mol_type = other DNA
gttgggattgacaagaaaccgccgtttgagtacatt

SEQ ID NO: 12986 - DNA, 36 bp, synthetic construct
  misc_feature 1..36: note = Description of Artificial Sequence: Synthetic oligonucleotide
  source 1..36: mol_type = other DNA
gttgggatttgatctcttatcaagatgaattagatt

SEQ ID NO: 12987 - DNA, 46 bp, synthetic construct
  misc_feature 1..46: note = Description of Artificial Sequence: Synthetic oligonucleotide
  source 1..46: mol_type = other DNA
gttgggcctaatatcgcaaagaacaaatctgaaagcaaatcacaac

SEQ ID NO: 12988 - DNA, 36 bp, synthetic construct
  misc_feature 1..36: note = Description of Artificial Sequence: Synthetic oligonucleotide
  source 1..36: mol_type = other DNA
gttggggatgaccgctgatttttgttaagatagacc

SEQ ID NO: 12989 - DNA, 36 bp, synthetic construct
  misc_feature 1..36: note = Description of Artificial Sequence: Synthetic oligonucleotide
  source 1..36: mol_type = other DNA
gttggggatgctactcgatttaaactatgatacaat

SEQ ID NO: 12990 - DNA, 36 bp, synthetic construct
  misc_feature 1..36: note = Description of Artificial Sequence: Synthetic oligonucleotide
  source 1..36: mol_type = other DNA
gttggggcaagcggtcaggcctctttcagatacact

SEQ ID NO: 12991 - DNA, 36 bp, synthetic construct
  misc_feature 1..36: note = Description of Artificial Sequence: Synthetic oligonucleotide
  source 1..36: mol_type = other DNA
gttggggcacccggtcaaatcctgatctgatacact

SEQ ID NO: 12992 - DNA, 36 bp, synthetic construct
  misc_feature 1..36: note = Description of Artificial Sequence: Synthetic oligonucleotide
  source 1..36: mol_type = other DNA
gttggggcgaccggacggactcttttcagatacact

SEQ ID NO: 12993 - DNA, 36 bp, synthetic construct
  misc_feature 1..36: note = Description of Artificial Sequence: Synthetic oligonucleotide
  source 1..36: mol_type = other DNA
gttggggctcccggtcatcctctgatcagatacact

SEQ ID NO: 12994 - DNA, 36 bp, synthetic construct
  misc_feature 1..36: note = Description of Artificial Sequence: Synthetic oligonucleotide
  source 1..36: mol_type = other DNA
gttggggttcgcggacaggctccgttctgatacact

SEQ ID NO: 12995 - DNA, 46 bp, synthetic construct
  misc_feature 1..46: note = Description of Artificial Sequence: Synthetic oligonucleotide
  source 1..46: mol_type = other DNA
gttgggttcaatatccgatattaaaataatgaaagcaaatcacaac

SEQ ID NO: 12996 - DNA, 47 bp, synthetic construct
  misc_feature 1..47: note = Description of Artificial Sequence: Synthetic oligonucleotide
  source 1..47: mol_type = other DNA
gttggtgattctaccgcaaaggtagttaattctgagcaaatcacaac

SEQ ID NO: 12997 - DNA, 46 bp, synthetic construct
  misc_feature 1..46: note = Description of Artificial Sequence: Synthetic oligonucleotide
  source 1..46: mol_type = other DNA
gttggttttaatattgtcaaagaaacatttgaaagcaaatcacaac

SEQ ID NO: 12998 - DNA, 47 bp, synthetic construct
  misc_feature 1..47: note = Description of Artificial Sequence: Synthetic oligonucleotide
  source 1..47: mol_type = other DNA
gttgtaaacgctattacaaaactaaaaaatctgaaagcaattcacaa

SEQ ID NO: 12999 - DNA, 46 bp, synthetic construct
  misc_feature 1..46: note = Description of Artificial Sequence: Synthetic oligonucleotide
  source 1..46: mol_type = other DNA
gttgtaaatcaacctactaatatacaatttcaaagctattcacaac

SEQ ID NO: 13000 - DNA, 46 bp, synthetic construct
  misc_feature 1..46: note = Description of Artificial Sequence: Synthetic oligonucleotide
  source 1..46: mol_type = other DNA
gttgtaaatcatcgtaaaaatagaacttttgaaagcaattcacaac

SEQ ID NO: 13001 - DNA, 36 bp, synthetic construct
  misc_feature 1..36: note = Description of Artificial Sequence: Synthetic oligonucleotide
  source 1..36: mol_type = other DNA
gttgtaaattgcttgcaaaatgtgatatttgaaaac

SEQ ID NO: 13002 - DNA, 36 bp, synthetic construct
  misc_feature 1..36: note = Description of Artificial Sequence: Synthetic oligonucleotide
  source 1..36: mol_type = other DNA
gttgtaactccctattgttccttggtatgacatgac

SEQ ID NO: 13003 - DNA, 42 bp, synthetic construct
  misc_feature 1..42: note = Description of Artificial Sequence: Synthetic oligonucleotide
  source 1..42: mol_type = other DNA
gttgtaactctatactgtaaatctacaaaaatttgaaaggaa

SEQ ID NO: 13004 - DNA, 47 bp, synthetic construct
  misc_feature 1..47: note = Description of Artificial Sequence: Synthetic oligonucleotide
  source 1..47: mol_type = other DNA
gttgtaactgacctctaagttagagaatgttgaaagcaaatcacaac

SEQ ID NO: 13005 - DNA, 36 bp, synthetic construct
  misc_feature 1..36: note = Description of Artificial Sequence: Synthetic oligonucleotide
  source 1..36: mol_type = other DNA
gttgtaacttgtagggaaactagggtatgttacagg

SEQ ID NO: 13006 - DNA, 37 bp, synthetic construct
  misc_feature 1..37: note = Description of Artificial Sequence: Synthetic oligonucleotide
  source 1..37: mol_type = other DNA
gttgtaacttgtagggaaactagggtatgttacagga

SEQ ID NO: 13007 - DNA, 47 bp, synthetic construct
  misc_feature 1..47: note = Description of Artificial Sequence: Synthetic oligonucleotide
  source 1..47: mol_type = other DNA
gttgtaataacatacctaaaagtaacaatttgagagcaaatcacaac

SEQ ID NO: 13008 - DNA, 47 bp, synthetic construct
  misc_feature 1..47: note = Description of Artificial Sequence: Synthetic oligonucleotide
  source 1..47: mol_type = other DNA
gttgtaatcaaagatcgtcagaactgaaattgaaagcaaatcacaac

SEQ ID NO: 13009 - DNA, 46 bp, synthetic construct
  misc_feature 1..46: note = Description of Artificial Sequence: Synthetic oligonucleotide
  source 1..46: mol_type = other DNA
gttgtaatcaatatgtcaaagatacattctgaaagccatttacaac

SEQ ID NO: 13010 - DNA, 47 bp, synthetic construct
  misc_feature 1..47: note = Description of Artificial Sequence: Synthetic oligonucleotide
  source 1..47: mol_type = other DNA
gttgtaatcaatatgtcaaagatataaaattgaaaggaattcacaac

SEQ ID NO: 13011 - DNA, 46 bp, synthetic construct
  misc_feature 1..46: note = Description of Artificial Sequence: Synthetic oligonucleotide
  source 1..46: mol_type = other DNA
gttgtaatcaatattgtaaaagaactttttgaaagcaaatcacaac

SEQ ID NO: 13012 - DNA, 47 bp, synthetic construct
  misc_feature 1..47: note = Description of Artificial Sequence: Synthetic oligonucleotide
  source 1..47: mol_type = other DNA
gttgtaatctatccacaaaaataaaagaactgaaagcaaatcacaac

SEQ ID NO: 13013 - DNA, 46 bp, synthetic construct
  misc_feature 1..46: note = Description of Artificial Sequence: Synthetic oligonucleotide
  source 1..46: mol_type = other DNA
gttgtaattaatcgaagatagacatttattgagagcaaatcacaac

SEQ ID NO: 13014 - DNA, 43 bp, synthetic construct
  misc_feature 1..43: note = Description of Artificial Sequence: Synthetic oligonucleotide
  source 1..43: mol_type = other DNA
gttgtaattacttcagtaaaattaccaaatttgaaaggaactc

SEQ ID NO: 13015 - DNA, 37 bp, synthetic construct
  misc_feature 1..37: note = Description of Artificial Sequence: Synthetic oligonucleotide
  source 1..37: mol_type = other DNA
gttgtaattactttggctaaagtaccaaatttgaaag

SEQ ID NO: 13016 - DNA, 47 bp, synthetic construct
  misc_feature 1..47: note = Description of Artificial Sequence: Synthetic oligonucleotide
  source 1..47: mol_type = other DNA
gttgtaattagtctattttttgtaacttagcatagtgaactaacagc

SEQ ID NO: 13017 - DNA, 36 bp, synthetic construct
  misc_feature 1..36: note = Description of Artificial Sequence: Synthetic oligonucleotide
  source 1..36: mol_type = other DNA
gttgtaattagttaacatttattatatacttttagt

SEQ ID NO: 13018 - DNA, 36 bp, synthetic construct
  misc_feature 1..36: note = Description of Artificial Sequence: Synthetic oligonucleotide
  source 1..36: mol_type = other DNA
gttgtaattccctaatatttctcgctaaggtataat

SEQ ID NO: 13019 - DNA, 28 bp, synthetic construct
  misc_feature 1..28: note = Description of Artificial Sequence: Synthetic oligonucleotide
  source 1..28: mol_type = other DNA
gttgtaattccctgttatcacttggtat

SEQ ID NO: 13020 - DNA, 36 bp, synthetic construct
  misc_feature 1..36: note = Description of Artificial Sequence: Synthetic oligonucleotide
  source 1..36: mol_type = other DNA
gttgtaattccctgttatcacttggtatggtataat

SEQ ID NO: 13021 - DNA, 47 bp, synthetic construct
  misc_feature 1..47: note = Description of Artificial Sequence: Synthetic oligonucleotide
  source 1..47: mol_type = other DNA
gttgtaattggctttcaatttaagtaactttacctcgcaattacaat

SEQ ID NO: 13022 - DNA, 47 bp, synthetic construct
  misc_feature 1..47: note = Description of Artificial Sequence: Synthetic oligonucleotide
  source 1..47: mol_type = other DNA
gttgtaatttgctctaaaattcttacctttgctatataagcaacagc

SEQ ID NO: 13023 - DNA, 46 bp, synthetic construct
  misc_feature 1..46: note = Description of Artificial Sequence: Synthetic oligonucleotide
  source 1..46: mol_type = other DNA
gttgtacaacatcaaagttattacagaattgaaagcaattcacaac

SEQ ID NO: 13024 - DNA, 36 bp, synthetic construct
  misc_feature 1..36: note = Description of Artificial Sequence: Synthetic oligonucleotide
  source 1..36: mol_type = other DNA
gttgtacagttacttaaatcttgagagtacaaaaac

SEQ ID NO: 13025 - DNA, 37 bp, synthetic construct
  misc_feature 1..37: note = Description of Artificial Sequence: Synthetic oligonucleotide
  source 1..37: mol_type = other DNA
gttgtacagttacttaaatcttgagagtacaaaaacc

SEQ ID NO: 13026 - DNA, 47 bp, synthetic construct
  misc_feature 1..47: note = Description of Artificial Sequence: Synthetic oligonucleotide
  source 1..47: mol_type = other DNA
gttgtacgtgctaatgcaaagatacacattttgaagcaattcacaac

SEQ ID NO: 13027 - DNA, 47 bp, synthetic construct
  misc_feature 1..47: note = Description of Artificial Sequence: Synthetic oligonucleotide
  source 1..47: mol_type = other DNA
gttgtactagctattacgaaggtactgaattgaaagctaatcacaac

SEQ ID NO: 13028 - DNA, 47 bp, synthetic construct
  misc_feature 1..47: note = Description of Artificial Sequence: Synthetic oligonucleotide
  source 1..47: mol_type = other DNA
gttgtactcaaagatcgcaagaactgaaattgaaagcaaatcacaac

SEQ ID NO: 13029 - DNA, 47 bp, synthetic construct
  misc_feature 1..47: note = Description of Artificial Sequence: Synthetic oligonucleotide
  source 1..47: mol_type = other DNA
gttgtacttgctattacaaagatactaattttcaagcaaatcacaac

SEQ ID NO: 13030 - DNA, 36 bp, synthetic construct
  misc_feature 1..36: note = Description of Artificial Sequence: Synthetic oligonucleotide
  source 1..36: mol_type = other DNA
gttgtagaagaatcggatttagcaatacactcaaac

SEQ ID NO: 13031 - DNA, 47 bp, synthetic construct
  misc_feature 1..47: note = Description of Artificial Sequence: Synthetic oligonucleotide
  source 1..47: mol_type = other DNA
gttgtagactatctgcaaaagtacaaaatttgaaagcgatccacaac

SEQ ID NO: 13032 - DNA, 36 bp, synthetic construct
  misc_feature 1..36: note = Description of Artificial Sequence: Synthetic oligonucleotide
  source 1..36: mol_type = other DNA
gttgtagattgattacaaaaaaggataagatacaat

SEQ ID NO: 13033 - DNA, 36 bp, synthetic construct
  misc_feature 1..36: note = Description of Artificial Sequence: Synthetic oligonucleotide
  source 1..36: mol_type = other DNA
gttgtagattggctataatttcgtaagtttgatagg

SEQ ID NO: 13034 - DNA, 36 bp, synthetic construct
  misc_feature 1..36: note = Description of Artificial Sequence: Synthetic oligonucleotide
  source 1..36: mol_type = other DNA
gttgtagcaaaacgagaggcgaccgcaagcctcagc

SEQ ID NO: 13035 - DNA, 46 bp, synthetic construct
  misc_feature 1..46: note = Description of Artificial Sequence: Synthetic oligonucleotide
  source 1..46: mol_type = other DNA
gttgtagcaaatatatcaaagaacaaatttgaaagcaattcacaac

SEQ ID NO: 13036 - DNA, 36 bp, synthetic construct
  misc_feature 1..36: note = Description of Artificial Sequence: Synthetic oligonucleotide
  source 1..36: mol_type = other DNA
gttgtagcagagagggaaacgaggtcaagccgcaac

SEQ ID NO: 13037 - DNA, 36 bp, synthetic construct
  misc_feature 1..36: note = Description of Artificial Sequence: Synthetic oligonucleotide
  source 1..36: mol_type = other DNA
gttgtagcccccgagtggtttttggtatggtataat

SEQ ID NO: 13038 - DNA, 36 bp, synthetic construct
  misc_feature 1..36: note = Description of Artificial Sequence: Synthetic oligonucleotide
  source 1..36: mol_type = other DNA
gttgtagcccccggatgatttttggtatggtataat

SEQ ID NO: 13039 - DNA, 36 bp, synthetic construct
  misc_feature 1..36: note = Description of Artificial Sequence: Synthetic oligonucleotide
  source 1..36: mol_type = other DNA
gttgtagccccctaataattttcggtatggtataat

SEQ ID NO: 13040 - DNA, 36 bp, synthetic construct
  misc_feature 1..36: note = Description of Artificial Sequence: Synthetic oligonucleotide
  source 1..36: mol_type = other DNA
gttgtagctaccatccaaaatcgaacctgctacaat

SEQ ID NO: 13041 - DNA, 36 bp, synthetic construct
  misc_feature 1..36: note = Description of Artificial Sequence: Synthetic oligonucleotide
  source 1..36: mol_type = other DNA
gttgtagctcccactctcaccccggaatgctacaat

SEQ ID NO: 13042 - DNA, 37 bp, synthetic construct
  misc_feature 1..37: note = Description of Artificial Sequence: Synthetic oligonucleotide
  source 1..37: mol_type = other DNA
gttgtagctcccactctcaccccggatagctacaatc

SEQ ID NO: 13043 - DNA, 36 bp, synthetic construct
  misc_feature 1..36: note = Description of Artificial Sequence: Synthetic oligonucleotide
  source 1..36: mol_type = other DNA
gttgtagctcccgctctcaccccggaacgctacaat

SEQ ID NO: 13044 - DNA, 36 bp, synthetic construct
  misc_feature 1..36: note = Description of Artificial Sequence: Synthetic oligonucleotide
  source 1..36: mol_type = other DNA
gttgtagctcccgctctcaccccggatagctacaat

SEQ ID NO: 13045 - DNA, 37 bp, synthetic construct
  misc_feature 1..37: note = Description of Artificial Sequence: Synthetic oligonucleotide
  source 1..37: mol_type = other DNA
gttgtagctcccgctctcaccccggatagctacactc

SEQ ID NO: 13046 - DNA, 36 bp, synthetic construct
  misc_feature 1..36: note = Description of Artificial Sequence: Synthetic oligonucleotide
  source 1..36: mol_type = other DNA
gttgtagctcccgctctcaccccggatggctacaat

SEQ ID NO: 13047 - DNA, 36 bp, synthetic construct
  misc_feature 1..36: note = Description of Artificial Sequence: Synthetic oligonucleotide
  source 1..36: mol_type = other DNA
gttgtagctccctctctcaccccggaaagctacaat

SEQ ID NO: 13048 - DNA, 37 bp, synthetic construct
  misc_feature 1..37: note = Description of Artificial Sequence: Synthetic oligonucleotide
  source 1..37: mol_type = other DNA
gttgtagctccctctctcaccccggaaagctacaatc

SEQ ID NO: 13049 - DNA, 38 bp, synthetic construct
  misc_feature 1..38: note = Description of Artificial Sequence: Synthetic oligonucleotide
  source 1..38: mol_type = other DNA
gttgtagctccctctctcaccccggaaagctacaatcc

SEQ ID NO: 13050 - DNA, 37 bp, synthetic construct
  misc_feature 1..37: note = Description of Artificial Sequence: Synthetic oligonucleotide
  source 1..37: mol_type = other DNA
gttgtagctccctctctcaccccggaaagctataatc

SEQ ID NO: 13051 - DNA, 36 bp, synthetic construct
  misc_feature 1..36: note = Description of Artificial Sequence: Synthetic oligonucleotide
  source 1..36: mol_type = other DNA
gttgtagctccctctctcaccccggaaggctacaat

SEQ ID NO: 13052 - DNA, 37 bp, synthetic construct
  misc_feature 1..37: note = Description of Artificial Sequence: Synthetic oligonucleotide
  source 1..37: mol_type = other DNA
gttgtagctccctctctcaccccggaaggctacaatc

SEQ ID NO: 13053 - DNA, 38 bp, synthetic construct
  misc_feature 1..38: note = Description of Artificial Sequence: Synthetic oligonucleotide
  source 1..38: mol_type = other DNA
gttgtagctccctctctcaccccggaaggctacaatcg

SEQ ID NO: 13054 - DNA, 36 bp, synthetic construct
  misc_feature 1..36: note = Description of Artificial Sequence: Synthetic oligonucleotide
  source 1..36: mol_type = other DNA
gttgtagctccctctctcaccccggactgctacaat

SEQ ID NO: 13055 - DNA, 36 bp, synthetic construct
  misc_feature 1..36: note = Description of Artificial Sequence: Synthetic oligonucleotide
  source 1..36: mol_type = other DNA
gttgtagctccctctctcaccccggatagctacaat

SEQ ID NO: 13056 - DNA, 37 bp, synthetic construct
  misc_feature 1..37: note = Description of Artificial Sequence: Synthetic oligonucleotide
  source 1..37: mol_type = other DNA
gttgtagctccctctctcaccccggatagctacaatc

SEQ ID NO: 13057 - DNA, 37 bp, synthetic construct
  misc_feature 1..37: note = Description of Artificial Sequence: Synthetic oligonucleotide
  source 1..37: mol_type = other DNA
gttgtagctccctctctcaccccggatagctacaatt

SEQ ID NO: 13058 - DNA, 36 bp, synthetic construct
  misc_feature 1..36: note = Description of Artificial Sequence: Synthetic oligonucleotide
  source 1..36: mol_type = other DNA
gttgtagctccctctctcaccccggatagctacact

SEQ ID NO: 13059 - DNA, 37 bp, synthetic construct
  misc_feature 1..37: note = Description of Artificial Sequence: Synthetic oligonucleotide
  source 1..37: mol_type = other DNA
gttgtagctccctctctcaccccggatagctacactc

SEQ ID NO: 13060 - DNA, 36 bp, synthetic construct
  misc_feature 1..36: note = Description of Artificial Sequence: Synthetic oligonucleotide
  source 1..36: mol_type = other DNA
gttgtagctccctctctcaccccggatagctaccat

SEQ ID NO: 13061 - DNA, 37 bp, synthetic construct
  misc_feature 1..37: note = Description of Artificial Sequence: Synthetic oligonucleotide
  source 1..37: mol_type = other DNA
gttgtagctccctctctcaccccggatagctatactc

SEQ ID NO: 13062 - DNA, 37 bp, synthetic construct
  misc_feature 1..37: note = Description of Artificial Sequence: Synthetic oligonucleotide
  source 1..37: mol_type = other DNA
gttgtagctccctctctcaccccggatgaactacaat

SEQ ID NO: 13063 - DNA, 37 bp, synthetic construct
  misc_feature 1..37: note = Description of Artificial Sequence: Synthetic oligonucleotide
  source 1..37: mol_type = other DNA
gttgtagctccctctctcaccccggatgaactacact

SEQ ID NO: 13064 - DNA, 37 bp, synthetic construct
  misc_feature 1..37: note = Description of Artificial Sequence: Synthetic oligonucleotide
  source 1..37: mol_type = other DNA
gttgtagctccctctctcaccccggatgagctaccat

SEQ ID NO: 13065 - DNA, 37 bp, synthetic construct
  misc_feature 1..37: note = Description of Artificial Sequence: Synthetic oligonucleotide
  source 1..37: mol_type = other DNA
gttgtagctccctctctcaccccggatgagctacgat

SEQ ID NO: 13066 - DNA, 37 bp, synthetic construct
  misc_feature 1..37: note = Description of Artificial Sequence: Synthetic oligonucleotide
  source 1..37: mol_type = other DNA
gttgtagctccctctctcaccccggatgatctacaat

SEQ ID NO: 13067 - DNA, 37 bp, synthetic construct
  misc_feature 1..37: note = Description of Artificial Sequence: Synthetic oligonucleotide
  source 1..37: mol_type = other DNA
gttgtagctccctctctcaccccggatgctctacaat

SEQ ID NO: 13068 - DNA, 36 bp, synthetic construct
  misc_feature 1..36: note = Description of Artificial Sequence: Synthetic oligonucleotide
  source 1..36: mol_type = other DNA
gttgtagctccctctctcaccccggattgctacaat

SEQ ID NO: 13069 - DNA, 36 bp, synthetic construct
  misc_feature 1..36: note = Description of Artificial Sequence: Synthetic oligonucleotide
  source 1..36: mol_type = other DNA
gttgtagctccctctctcaccccggttagctacaat

SEQ ID NO: 13070 - DNA, 36 bp, synthetic construct
  misc_feature 1..36: note = Description of Artificial Sequence: Synthetic oligonucleotide
  source 1..36: mol_type = other DNA
gttgtagctccctgataattttcggtatggtataat

SEQ ID NO: 13071 - DNA, 36 bp, synthetic construct
  misc_feature 1..36: note = Description of Artificial Sequence: Synthetic oligonucleotide
  source 1..36: mol_type = other DNA
gttgtagctccctgccgcactccgaaatgctataat

SEQ ID NO: 13072 - DNA, 36 bp, synthetic construct
  misc_feature 1..36: note = Description of Artificial Sequence: Synthetic oligonucleotide
  source 1..36: mol_type = other DNA
gttgtagctccctttctcatttcgcagtgctacaat

SEQ ID NO: 13073 - DNA, 36 bp, synthetic construct
  misc_feature 1..36: note = Description of Artificial Sequence: Synthetic oligonucleotide
  source 1..36: mol_type = other DNA
gttgtagctccctttttcatttcgcagtgctataat

SEQ ID NO: 13074 - DNA, 38 bp, synthetic construct
  misc_feature 1..38: note = Description of Artificial Sequence: Synthetic oligonucleotide
  source 1..38: mol_type = other DNA
gttgtagcttcctcagaaacccttactatgctacaatc

SEQ ID NO: 13075 - DNA, 37 bp, synthetic construct
  misc_feature 1..37: note = Description of Artificial Sequence: Synthetic oligonucleotide
  source 1..37: mol_type = other DNA
gttgtagcttcctctctcaccccggatagctacactc

SEQ ID NO: 13076 - DNA, 36 bp, synthetic construct
  misc_feature 1..36: note = Description of Artificial Sequence: Synthetic oligonucleotide
  source 1..36: mol_type = other DNA
gttgtaggatagcaaaattctagagggtaacaaaac

SEQ ID NO: 13077 - DNA, 36 bp, synthetic construct
  misc_feature 1..36: note = Description of Artificial Sequence: Synthetic oligonucleotide
  source 1..36: mol_type = other DNA
gttgtagtcccctgatatttcttggtatgatataat

SEQ ID NO: 13078 - DNA, 36 bp, synthetic construct
  misc_feature 1..36: note = Description of Artificial Sequence: Synthetic oligonucleotide
  source 1..36: mol_type = other DNA
gttgtagttccccttctcaccccggaaaactacaat

SEQ ID NO: 13079 - DNA, 36 bp, synthetic construct
  misc_feature 1..36: note = Description of Artificial Sequence: Synthetic oligonucleotide
  source 1..36: mol_type = other DNA
gttgtagttcccgctctcaccccggatagctacaat

SEQ ID NO: 13080 - DNA, 36 bp, synthetic construct
  misc_feature 1..36: note = Description of Artificial Sequence: Synthetic oligonucleotide
  source 1..36: mol_type = other DNA
gttgtagttccctaattattcttggtatggtataat

SEQ ID NO: 13081 - DNA, 26 bp, synthetic construct
  misc_feature 1..26: note = Description of Artificial Sequence: Synthetic oligonucleotide
  source 1..26: mol_type = other DNA
gttgtagttccctagcagttcttggt

SEQ ID NO: 13082 - DNA, 36 bp, synthetic construct
  misc_feature 1..36: note = Description of Artificial Sequence: Synthetic oligonucleotide
  source 1..36: mol_type = other DNA
gttgtagttccctattatctctctcaagggtataat

SEQ ID NO: 13083 - DNA, 36 bp, synthetic construct
  misc_feature 1..36: note = Description of Artificial Sequence: Synthetic oligonucleotide
  source 1..36: mol_type = other DNA
gttgtagttccctcgcgattcttggtatggtataac

SEQ ID NO: 13084 - DNA, 36 bp, synthetic construct
  misc_feature 1..36: note = Description of Artificial Sequence: Synthetic oligonucleotide
  source 1..36: mol_type = other DNA
gttgtagttccctctctcaccccggaaagctacaat

SEQ ID NO: 13085 - DNA, 36 bp, synthetic construct
  misc_feature 1..36: note = Description of Artificial Sequence: Synthetic oligonucleotide
  source 1..36: mol_type = other DNA
gttgtagttccctctctcaccccggataactacaat

SEQ ID NO: 13086 - DNA, 36 bp, synthetic construct
  misc_feature 1..36: note = Description of Artificial Sequence: Synthetic oligonucleotide
  source 1..36: mol_type = other DNA
gttgtagttccctctctcaccccggatgactacaat

SEQ ID NO: 13087 - DNA, 36 bp, synthetic construct
  misc_feature 1..36: note = Description of Artificial Sequence: Synthetic oligonucleotide
  source 1..36: mol_type = other DNA
gttgtagttccctctctcaccccggattgctacact

SEQ ID NO: 13088 - DNA, 36 bp, synthetic construct
  misc_feature 1..36: note = Description of Artificial Sequence: Synthetic oligonucleotide
  source 1..36: mol_type = other DNA
gttgtagttccctctctcaccccggcgtgctataac

SEQ ID NO: 13089 - DNA, 36 bp, synthetic construct
  misc_feature 1..36: note = Description of Artificial Sequence: Synthetic oligonucleotide
  source 1..36: mol_type = other DNA
gttgtagttccctctctcaccccgggatgctataat

SEQ ID NO: 13090 - DNA, 36 bp, synthetic construct
  misc_feature 1..36: note = Description of Artificial Sequence: Synthetic oligonucleotide
  source 1..36: mol_type = other DNA
gttgtagttccctgacggttcttggtatggtataat

SEQ ID NO: 13091 - DNA, 36 bp, synthetic construct
  misc_feature 1..36: note = Description of Artificial Sequence: Synthetic oligonucleotide
  source 1..36: mol_type = other DNA
gttgtagttccctgatagttcttggtatggtataac

SEQ ID NO: 13092 - DNA, 36 bp, synthetic construct
  misc_feature 1..36: note = Description of Artificial Sequence: Synthetic oligonucleotide
  source 1..36: mol_type = other DNA
gttgtagttccctgatcgttcttggtatggtataat

SEQ ID NO: 13093 - DNA, 36 bp, synthetic construct
  misc_feature 1..36: note = Description of Artificial Sequence: Synthetic oligonucleotide
  source 1..36: mol_type = other DNA
gttgtagttccctgatgattcttgatgtggtataat

SEQ ID NO: 13094 - DNA, 36 bp, synthetic construct
  misc_feature 1..36: note = Description of Artificial Sequence: Synthetic oligonucleotide
  source 1..36: mol_type = other DNA
gttgtagttccctgatttttcttggtatgttataat

SEQ ID NO: 13095 - DNA, 36 bp, synthetic construct
  misc_feature 1..36: note = Description of Artificial Sequence: Synthetic oligonucleotide
  source 1..36: mol_type = other DNA
gttgtagttccctggtagttcttggtatggtataat

SEQ ID NO: 13096 - DNA, 36 bp, synthetic construct
  misc_feature 1..36: note = Description of Artificial Sequence: Synthetic oligonucleotide
  source 1..36: mol_type = other DNA
gttgtagttccctgtattttcttgtagtggtataac

SEQ ID NO: 13097 - DNA, 36 bp, synthetic construct
  misc_feature 1..36: note = Description of Artificial Sequence: Synthetic oligonucleotide
  source 1..36: mol_type = other DNA
gttgtagttccctgttaatcattggtttggtacaat

SEQ ID NO: 13098 - DNA, 36 bp, synthetic construct
  misc_feature 1..36: note = Description of Artificial Sequence: Synthetic oligonucleotide
  source 1..36: mol_type = other DNA
gttgtagttccctgttagttcttggtatggtatgct

SEQ ID NO: 13099 - DNA, 36 bp, synthetic construct
  misc_feature 1..36: note = Description of Artificial Sequence: Synthetic oligonucleotide
  source 1..36: mol_type = other DNA
gttgtagttccctttctcaccccggacggctacaat

SEQ ID NO: 13100 - DNA, 36 bp, synthetic construct
  misc_feature 1..36: note = Description of Artificial Sequence: Synthetic oligonucleotide
  source 1..36: mol_type = other DNA
gttgtagttccctttctcaccccggatggctacaat

SEQ ID NO: 13101 - DNA, 36 bp, synthetic construct
  misc_feature 1..36: note = Description of Artificial Sequence: Synthetic oligonucleotide
  source 1..36: mol_type = other DNA
gttgtagttgactggtaatctcggcttggatacatt

SEQ ID NO: 13102 - DNA, 36 bp, synthetic construct
  misc_feature 1..36: note = Description of Artificial Sequence: Synthetic oligonucleotide
  source 1..36: mol_type = other DNA
gttgtagtttccgcgcagttttcgatttgctaaact

SEQ ID NO: 13103 - DNA, 36 bp, synthetic construct
  misc_feature 1..36: note = Description of Artificial Sequence: Synthetic oligonucleotide
  source 1..36: mol_type = other DNA
gttgtagtttgattaaagattagagaacacgatatt

SEQ ID NO: 13104 - DNA, 36 bp, synthetic construct
  misc_feature 1..36: note = Description of Artificial Sequence: Synthetic oligonucleotide
  source 1..36: mol_type = other DNA
gttgtagtttgattgaaaaaagttctttacgatatt

SEQ ID NO: 13105 - DNA, 47 bp, synthetic construct
  misc_feature 1..47: note = Description of Artificial Sequence: Synthetic oligonucleotide
  source 1..47: mol_type = other DNA
gttgtataagaactaagttacaataaaatctgaaagcaaatcacaac

SEQ ID NO: 13106 - DNA, 47 bp, synthetic construct
  misc_feature 1..47: note = Description of Artificial Sequence: Synthetic oligonucleotide
  source 1..47: mol_type = other DNA
gttgtataagagctaagctacataaaaatttgaaagcaaatcacaac

SEQ ID NO: 13107 - DNA, 47 bp, synthetic construct
  misc_feature 1..47: note = Description of Artificial Sequence: Synthetic oligonucleotide
  source 1..47: mol_type = other DNA
gttgtataagagctaagctacataataatttgaaagcaattcacaac

SEQ ID NO: 13108 - DNA, 47 bp, synthetic construct
  misc_feature 1..47: note = Description of Artificial Sequence: Synthetic oligonucleotide
  source 1..47: mol_type = other DNA
gttgtataagagctaagctacattaaaatttgaaagcaaatcacaac

SEQ ID NO: 13109 - DNA, 47 bp, synthetic construct
  misc_feature 1..47: note = Description of Artificial Sequence: Synthetic oligonucleotide
  source 1..47: mol_type = other DNA
gttgtataccatcacacaaatatcgtcatttgaaagctaatcacaac

SEQ ID NO: 13110 - DNA, 47 bp, synthetic construct
  misc_feature 1..47: note = Description of Artificial Sequence: Synthetic oligonucleotide
  source 1..47: mol_type = other DNA
gttgtataccctccgctaagatacaaaatttgaaagctaatcacaac

SEQ ID NO: 13111 - DNA, 36 bp, synthetic construct
  misc_feature 1..36: note = Description of Artificial Sequence: Synthetic oligonucleotide
  source 1..36: mol_type = other DNA
gttgtatatcatcctattcctacatcaaaccacaac

SEQ ID NO: 13112 - DNA, 36 bp, synthetic construct
  misc_feature 1..36: note = Description of Artificial Sequence: Synthetic oligonucleotide
  source 1..36: mol_type = other DNA
gttgtatatcatcctgttcctacatcaaaccacaac

SEQ ID NO: 13113 - DNA, 36 bp, synthetic construct
  misc_feature 1..36: note = Description of Artificial Sequence: Synthetic oligonucleotide
  source 1..36: mol_type = other DNA
gttgtatatcatccttttcctacatcaaaccacaac

SEQ ID NO: 13114 - DNA, 36 bp, synthetic construct
  misc_feature 1..36: note = Description of Artificial Sequence: Synthetic oligonucleotide
  source 1..36: mol_type = other DNA
gttgtatatcatctttttcctacatcaaaccacaac

SEQ ID NO: 13115 - DNA, 36 bp, synthetic construct
  misc_feature 1..36: note = Description of Artificial Sequence: Synthetic oligonucleotide
  source 1..36: mol_type = other DNA
gttgtatatcattataatcctacatcaaaccgcaac

SEQ ID NO: 13116 - DNA, 36 bp, synthetic construct
  misc_feature 1..36: note = Description of Artificial Sequence: Synthetic oligonucleotide
  source 1..36: mol_type = other DNA
gttgtatatctcttctcttcttcagcaagccacaac

SEQ ID NO: 13117 - DNA, 36 bp, synthetic construct
  misc_feature 1..36: note = Description of Artificial Sequence: Synthetic oligonucleotide
  source 1..36: mol_type = other DNA
gttgtatatcttatcatttctacatcaaaccacaac

SEQ ID NO: 13118 - DNA, 36 bp, synthetic construct
  misc_feature 1..36: note = Description of Artificial Sequence: Synthetic oligonucleotide
  source 1..36: mol_type = other DNA
gttgtatatctttgttttcctacatcaaaccgcaac

SEQ ID NO: 13119 - DNA, 36 bp, synthetic construct
  misc_feature 1..36: note = Description of Artificial Sequence: Synthetic oligonucleotide
  source 1..36: mol_type = other DNA
gttgtatatcttttatatcctacatcaaaccacaac

SEQ ID NO: 13120 - DNA, 36 bp, synthetic construct
  misc_feature 1..36: note = Description of Artificial Sequence: Synthetic oligonucleotide
  source 1..36: mol_type = other DNA
gttgtatatcttttgattcctacatcaaaccacaac

SEQ ID NO: 13121 - DNA, 36 bp, synthetic construct
  misc_feature 1..36: note = Description of Artificial Sequence: Synthetic oligonucleotide
  source 1..36: mol_type = other DNA
gttgtatatgatatgattttgtcagctattcacaac

SEQ ID NO: 13122 - DNA, 46 bp, synthetic construct
  misc_feature 1..46: note = Description of Artificial Sequence: Synthetic oligonucleotide
  source 1..46: mol_type = other DNA
gttgtatatgatatgtataagatactattttgagcctattcacaac

SEQ ID NO: 13123 - DNA, 47 bp, synthetic construct
  misc_feature 1..47: note = Description of Artificial Sequence: Synthetic oligonucleotide
  source 1..47: mol_type = other DNA
gttgtatatgcctatgcaaagatactaattttaaagcaaatcacaac

SEQ ID NO: 13124 - DNA, 47 bp, synthetic construct
  misc_feature 1..47: note = Description of Artificial Sequence: Synthetic oligonucleotide
  source 1..47: mol_type = other DNA
gttgtatcagaatatcaaagatataaatttcgaaagcaaatcacaac

SEQ ID NO: 13125 - DNA, 37 bp, synthetic construct
  misc_feature 1..37: note = Description of Artificial Sequence: Synthetic oligonucleotide
  source 1..37: mol_type = other DNA
gttgtatctagttccaaaattacatcaaaccacaacc

SEQ ID NO: 13126 - DNA, 36 bp, synthetic construct
  misc_feature 1..36: note = Description of Artificial Sequence: Synthetic oligonucleotide
  source 1..36: mol_type = other DNA
gttgtatctagttccctaaagtaatcaatccacaac

SEQ ID NO: 13127 - DNA, 47 bp, synthetic construct
  misc_feature 1..47: note = Description of Artificial Sequence: Synthetic oligonucleotide
  source 1..47: mol_type = other DNA
gttgtatctatagtaacaaagataagaattttaaagcaaatcacaac

SEQ ID NO: 13128 - DNA, 36 bp, synthetic construct
  misc_feature 1..36: note = Description of Artificial Sequence: Synthetic oligonucleotide
  source 1..36: mol_type = other DNA
gttgtatcttactctgtttctacatcaaaccacaac

SEQ ID NO: 13129 - DNA, 36 bp, synthetic construct
  misc_feature 1..36: note = Description of Artificial Sequence: Synthetic oligonucleotide
  source 1..36: mol_type = other DNA
gttgtatcttatcaaacatctacatcaaaccacaac

SEQ ID NO: 13130 - DNA, 36 bp, synthetic construct
  misc_feature 1..36: note = Description of Artificial Sequence: Synthetic oligonucleotide
  source 1..36: mol_type = other DNA
gttgtatcttatcaattttctacatcaaaccacaac

SEQ ID NO: 13131 - DNA, 36 bp, synthetic construct
  misc_feature 1..36: note = Description of Artificial Sequence: Synthetic oligonucleotide
  source 1..36: mol_type = other DNA
gttgtatcttatcagtgtcctacatcaaaccgcaac

SEQ ID NO: 13132 - DNA, 36 bp, synthetic construct
  misc_feature 1..36: note = Description of Artificial Sequence: Synthetic oligonucleotide
  source 1..36: mol_type = other DNA
gttgtatcttatccgttttctacatcaaaccacaac

SEQ ID NO: 13133 - DNA, 36 bp, synthetic construct
  misc_feature 1..36: note = Description of Artificial Sequence: Synthetic oligonucleotide
  source 1..36: mol_type = other DNA
gttgtatcttatcgaaattctacatcaaaccacaac

SEQ ID NO: 13134 - DNA, 36 bp, synthetic construct
  misc_feature 1..36: note = Description of Artificial Sequence: Synthetic oligonucleotide
  source 1..36: mol_type = other DNA
gttgtatcttattcggttcctacatcaaaccacaac

SEQ ID NO: 13135 - DNA, 36 bp, synthetic construct
  misc_feature 1..36: note = Description of Artificial Sequence: Synthetic oligonucleotide
  source 1..36: mol_type = other DNA
gttgtatcttattgaaattctacatcaaaccacaac

SEQ ID NO: 13136 - DNA, 36 bp, synthetic construct
  misc_feature 1..36: note = Description of Artificial Sequence: Synthetic oligonucleotide
  source 1..36: mol_type = other DNA
gttgtatcttattgaatttctacatcaaaccacaac

SEQ ID NO: 13137 - DNA, 36 bp, synthetic construct
  misc_feature 1..36: note = Description of Artificial Sequence: Synthetic oligonucleotide
  source 1..36: mol_type = other DNA
gttgtatcttatttaaaaactacatcaaaccacaac

SEQ ID NO: 13138 - DNA, 36 bp, synthetic construct
  misc_feature 1..36: note = Description of Artificial Sequence: Synthetic oligonucleotide
  source 1..36: mol_type = other DNA
gttgtatcttatttagttcctacatcaaaccacaac

SEQ ID NO: 13139 - DNA, 36 bp, synthetic construct
  misc_feature 1..36: note = Description of Artificial Sequence: Synthetic oligonucleotide
  source 1..36: mol_type = other DNA
gttgtatcttatttggctcctacatcaaaccacaac

SEQ ID NO: 13140 - DNA, 47 bp, synthetic construct
  misc_feature 1..47: note = Description of Artificial Sequence: Synthetic oligonucleotide
  source 1..47: mol_type = other DNA
gttgtattacttgatacaaagatacaaatttgaaagcaattcacaac

SEQ ID NO: 13141 - DNA, 36 bp, synthetic construct
  misc_feature 1..36: note = Description of Artificial Sequence: Synthetic oligonucleotide
  source 1..36: mol_type = other DNA
gttgtattatatcgtttctctacatcaaaccacaac

SEQ ID NO: 13142 - DNA, 36 bp, synthetic construct
  misc_feature 1..36: note = Description of Artificial Sequence: Synthetic oligonucleotide
  source 1..36: mol_type = other DNA
gttgtattatatcttatttctacatcaaaccacaac

SEQ ID NO: 13143 - DNA, 36 bp, synthetic construct
  misc_feature 1..36: note = Description of Artificial Sequence: Synthetic oligonucleotide
  source 1..36: mol_type = other DNA
gttgtattatatcttcattctacatcaaaccacaac

SEQ ID NO: 13144 - DNA, 36 bp, synthetic construct
  misc_feature 1..36: note = Description of Artificial Sequence: Synthetic oligonucleotide
  source 1..36: mol_type = other DNA
gttgtattatatctttaatctacatcaaaccacaac

SEQ ID NO: 13145 - DNA, 47 bp, synthetic construct
  misc_feature 1..47: note = Description of Artificial Sequence: Synthetic oligonucleotide
  source 1..47: mol_type = other DNA
gttgtattatgctgagcaaaattaagaaaatctaagcaaatcacaac

SEQ ID NO: 13146 - DNA, 47 bp, synthetic construct
  misc_feature 1..47: note = Description of Artificial Sequence: Synthetic oligonucleotide
  source 1..47: mol_type = other DNA
gttgtcaaagaacccagtaaaaatacaatttgaaagcaattcacaac

SEQ ID NO: 13147 - DNA, 46 bp, synthetic construct
  misc_feature 1..46: note = Description of Artificial Sequence: Synthetic oligonucleotide
  source 1..46: mol_type = other DNA
gttgtcaaagaccaaaggtaatttgaaattgaaagcaattcacaac

SEQ ID NO: 13148 - DNA, 46 bp, synthetic construct
  misc_feature 1..46: note = Description of Artificial Sequence: Synthetic oligonucleotide
  source 1..46: mol_type = other DNA
gttgtcaaagacctttaaaattcaaagatagaaagcaattcacaac

SEQ ID NO: 13149 - DNA, 36 bp, synthetic construct
  misc_feature 1..36: note = Description of Artificial Sequence: Synthetic oligonucleotide
  source 1..36: mol_type = other DNA
gttgtcaaagatcgcgttgcggtatcagatcacagc

SEQ ID NO: 13150 - DNA, 36 bp, synthetic construct
  misc_feature 1..36: note = Description of Artificial Sequence: Synthetic oligonucleotide
  source 1..36: mol_type = other DNA
gttgtcaaagatcgtacgttgaaagcaaatcacaac

SEQ ID NO: 13151 - DNA, 36 bp, synthetic construct
  misc_feature 1..36: note = Description of Artificial Sequence: Synthetic oligonucleotide
  source 1..36: mol_type = other DNA
gttgtcaaagatcgtctgttgaaagcaaatcacaac

SEQ ID NO: 13152 - DNA, 46 bp, synthetic construct
  misc_feature 1..46: note = Description of Artificial Sequence: Synthetic oligonucleotide
  source 1..46: mol_type = other DNA
gttgtcaaagatcgttgaaatactttgattgaaagcaagtcacaac

SEQ ID NO: 13153 - DNA, 36 bp, synthetic construct
  misc_feature 1..36: note = Description of Artificial Sequence: Synthetic oligonucleotide
  source 1..36: mol_type = other DNA
gttgtcaaagatcgtttgttgaaagcaaatcacaac

SEQ ID NO: 13154 - DNA, 36 bp, synthetic construct
  misc_feature 1..36: note = Description of Artificial Sequence: Synthetic oligonucleotide
  source 1..36: mol_type = other DNA
gttgtcaaagatctttcgatgaaggcaaatcacaac

SEQ ID NO: 13155 - DNA, 36 bp, synthetic construct
  misc_feature 1..36: note = Description of Artificial Sequence: Synthetic oligonucleotide
  source 1..36: mol_type = other DNA
gttgtcaaagttacgaatttgcaagcatctcacaac

SEQ ID NO: 13156 - DNA, 47 bp, synthetic construct
  misc_feature 1..47: note = Description of Artificial Sequence: Synthetic oligonucleotide
  source 1..47: mol_type = other DNA
gttgtcaatgcacttgcaaagatatgaaaaattcagctaatcacaac

SEQ ID NO: 13157 - DNA, 47 bp, synthetic construct
  misc_feature 1..47: note = Description of Artificial Sequence: Synthetic oligonucleotide
  source 1..47: mol_type = other DNA
gttgtcaatgcacttgcaaagatatgaaaaatttagctaatcacaac

SEQ ID NO: 13158 - DNA, 47 bp, synthetic construct
  misc_feature 1..47: note = Description of Artificial Sequence: Synthetic oligonucleotide
  source 1..47: mol_type = other DNA
gttgtcaatgcaggtgcaaagatacaaatttttaagcaaatcacaac

SEQ ID NO: 13159 - DNA, 47 bp, synthetic construct
  misc_feature 1..47: note = Description of Artificial Sequence: Synthetic oligonucleotide
  source 1..47: mol_type = other DNA
gttgtcaatgctgatgcaaagatactaattttttagcaaatcacaac

SEQ ID NO: 13160 - DNA, 46 bp, synthetic construct
  misc_feature 1..46: note = Description of Artificial Sequence: Synthetic oligonucleotide
  source 1..46: mol_type = other DNA
gttgtcataaatatctctaaatcaaagaacgaaagcaaatcacaac

SEQ ID NO: 13161 - DNA, 46 bp, synthetic construct
  misc_feature 1..46: note = Description of Artificial Sequence: Synthetic oligonucleotide
  source 1..46: mol_type = other DNA
gttgtcccaaatatcagttgtcaaagaattgaaagcaaatcacaac

SEQ ID NO: 13162 - DNA, 36 bp, synthetic construct
  misc_feature 1..36: note = Description of Artificial Sequence: Synthetic oligonucleotide
  source 1..36: mol_type = other DNA
gttgtcctagccccgcctattcccatgtgctagact

SEQ ID NO: 13163 - DNA, 47 bp, synthetic construct
  misc_feature 1..47: note = Description of Artificial Sequence: Synthetic oligonucleotide
  source 1..47: mol_type = other DNA
gttgtccttcatcacgaagataataatttttgaaagcaattcacaac

SEQ ID NO: 13164 - DNA, 47 bp, synthetic construct
  misc_feature 1..47: note = Description of Artificial Sequence: Synthetic oligonucleotide
  source 1..47: mol_type = other DNA
gttgtcgaagagctaagctacatcataaattgaaagcaaatcacaac

SEQ ID NO: 13165 - DNA, 46 bp, synthetic construct
  misc_feature 1..46: note = Description of Artificial Sequence: Synthetic oligonucleotide
  source 1..46: mol_type = other DNA
gttgtcgaagatctaagctacaccttgtttgaaagcaaatcacaac

SEQ ID NO: 13166 - DNA, 47 bp, synthetic construct
  misc_feature 1..47: note = Description of Artificial Sequence: Synthetic oligonucleotide
  source 1..47: mol_type = other DNA
gttgtcgcttatcgacctaaaagtacaaattgaaagcgaatcacaac

SEQ ID NO: 13167 - DNA, 47 bp, synthetic construct
  misc_feature 1..47: note = Description of Artificial Sequence: Synthetic oligonucleotide
  source 1..47: mol_type = other DNA
gttgtcgcttctgaaagcaaagatacaaaatgaaagctattcacaac

SEQ ID NO: 13168 - DNA, 36 bp, synthetic construct
  misc_feature 1..36: note = Description of Artificial Sequence: Synthetic oligonucleotide
  source 1..36: mol_type = other DNA
gttgtcggcaaaattactttgtgtccaatccgcaac

SEQ ID NO: 13169 - DNA, 46 bp, synthetic construct
  misc_feature 1..46: note = Description of Artificial Sequence: Synthetic oligonucleotide
  source 1..46: mol_type = other DNA
gttgtcgtaaatctcaatatttcaaagactgaaagcaaatcacaac

SEQ ID NO: 13170 - DNA, 47 bp, synthetic construct
  misc_feature 1..47: note = Description of Artificial Sequence: Synthetic oligonucleotide
  source 1..47: mol_type = other DNA
gttgtctatagtgagacaaagatacgaattttaaagctaatcacaac

SEQ ID NO: 13171 - DNA, 47 bp, synthetic construct
  misc_feature 1..47: note = Description of Artificial Sequence: Synthetic oligonucleotide
  source 1..47: mol_type = other DNA
gttgtctatgcaggtgcaaagatactaattttttagcaaatcacaac

SEQ ID NO: 13172 - DNA, 47 bp, synthetic construct
  misc_feature 1..47: note = Description of Artificial Sequence: Synthetic oligonucleotide
  source 1..47: mol_type = other DNA
gttgtctatgctggtgcaaagatactaattttttagcaaatcacaac

SEQ ID NO: 13173 - DNA, 47 bp, synthetic construct
  misc_feature 1..47: note = Description of Artificial Sequence: Synthetic oligonucleotide
  source 1..47: mol_type = other DNA
gttgtctatgctggtgcaaaggtactaatttttacgcaaatcacaac

SEQ ID NO: 13174 - DNA, 36 bp, synthetic construct
  misc_feature 1..36: note = Description of Artificial Sequence: Synthetic oligonucleotide
  source 1..36: mol_type = other DNA
gttgtctattatcaggattctacatcaaaccacaac

SEQ ID NO: 13175 - DNA, 47 bp, synthetic construct
  misc_feature 1..47: note = Description of Artificial Sequence: Synthetic oligonucleotide
  source 1..47: mol_type = other DNA
gttgtctcagacctaagttactgataaatttgaaagcagatcacaac

SEQ ID NO: 13176 - DNA, 47 bp, synthetic construct
  misc_feature 1..47: note = Description of Artificial Sequence: Synthetic oligonucleotide
  source 1..47: mol_type = other DNA
gttgtctccaatggttcaaagatactaatttgaaagcaaatcacaac

SEQ ID NO: 13177 - DNA, 47 bp, synthetic construct
  misc_feature 1..47: note = Description of Artificial Sequence: Synthetic oligonucleotide
  source 1..47: mol_type = other DNA
gttgtctccaatggttcaaagatactagtttgaaagcaaatcacaac

SEQ ID NO: 13178 - DNA, 36 bp, synthetic construct
  misc_feature 1..36: note = Description of Artificial Sequence: Synthetic oligonucleotide
  source 1..36: mol_type = other DNA
gttgtctcttattccctaaactgatcaatccacaac

SEQ ID NO: 13179 - DNA, 36 bp, synthetic construct
  misc_feature 1..36: note = Description of Artificial Sequence: Synthetic oligonucleotide
  source 1..36: mol_type = other DNA
gttgtctcttatttcatttcatcatcaaaccacaac

SEQ ID NO: 13180 - DNA, 36 bp, synthetic construct
  misc_feature 1..36: note = Description of Artificial Sequence: Synthetic oligonucleotide
  source 1..36: mol_type = other DNA
gttgtcttagcaccgcctattcccatgtgctaaact

SEQ ID NO: 13181 - DNA, 36 bp, synthetic construct
  misc_feature 1..36: note = Description of Artificial Sequence: Synthetic oligonucleotide
  source 1..36: mol_type = other DNA
gttgtcttatatctctgttctacatcaaaccacaac

SEQ ID NO: 13182 - DNA, 36 bp, synthetic construct
  misc_feature 1..36: note = Description of Artificial Sequence: Synthetic oligonucleotide
  source 1..36: mol_type = other DNA
gttgtctttcatcttaaatcatcatcaaaccacaac

SEQ ID NO: 13183 - DNA, 46 bp, synthetic construct
  misc_feature 1..46: note = Description of Artificial Sequence: Synthetic oligonucleotide
  source 1..46: mol_type = other DNA
gttgtctttcatctttaaagatacaattttgaaagctattcacaac

SEQ ID NO: 13184 - DNA, 47 bp, synthetic construct
  misc_feature 1..47: note = Description of Artificial Sequence: Synthetic oligonucleotide
  source 1..47: mol_type = other DNA
gttgtctttgtcaccgcaaaggtaatgaattttgagcaaatcacaac

SEQ ID NO: 13185 - DNA, 36 bp, synthetic construct
  misc_feature 1..36: note = Description of Artificial Sequence: Synthetic oligonucleotide
  source 1..36: mol_type = other DNA
gttgtcttttatctcttttctacatcaaaccacaac

SEQ ID NO: 13186 - DNA, 36 bp, synthetic construct
  misc_feature 1..36: note = Description of Artificial Sequence: Synthetic oligonucleotide
  source 1..36: mol_type = other DNA
gttgtgaaactcctcaatctgtaatcaatccacaac

SEQ ID NO: 13187 - DNA, 46 bp, synthetic construct
  misc_feature 1..46: note = Description of Artificial Sequence: Synthetic oligonucleotide
  source 1..46: mol_type = other DNA
gttgtgaaagaactaagttagtatcaaaaatctgaaagcaaatcac

SEQ ID NO: 13188 - DNA, 46 bp, synthetic construct
  misc_feature 1..46: note = Description of Artificial Sequence: Synthetic oligonucleotide
  source 1..46: mol_type = other DNA
gttgtgaaagggtttcaaaatgtatctttgatttatagtcaacaac

SEQ ID NO: 13189 - DNA, 47 bp, synthetic construct
  misc_feature 1..47: note = Description of Artificial Sequence: Synthetic oligonucleotide
  source 1..47: mol_type = other DNA
gttgtgaacgataatgcaaagatacgattctgaaagcaattcacaac

SEQ ID NO: 13190 - DNA, 36 bp, synthetic construct
  misc_feature 1..36: note = Description of Artificial Sequence: Synthetic oligonucleotide
  source 1..36: mol_type = other DNA
gttgtgaactgctatcaagcgccggtctcttacatt

SEQ ID NO: 13191 - DNA, 47 bp, synthetic construct
  misc_feature 1..47: note = Description of Artificial Sequence: Synthetic oligonucleotide
  source 1..47: mol_type = other DNA
gttgtgaactgctttcattttagtatctttgtagtattaggaacagt

SEQ ID NO: 13192 - DNA, 36 bp, synthetic construct
  misc_feature 1..36: note = Description of Artificial Sequence: Synthetic oligonucleotide
  source 1..36: mol_type = other DNA
gttgtgaacttgcgttatcctacatcaaaccacaac

SEQ ID NO: 13193 - DNA, 47 bp, synthetic construct
  misc_feature 1..47: note = Description of Artificial Sequence: Synthetic oligonucleotide
  source 1..47: mol_type = other DNA
gttgtgaatacctctcaaattagtacgaaagcaatatcataaacagt

SEQ ID NO: 13194 - DNA, 47 bp, synthetic construct
  misc_feature 1..47: note = Description of Artificial Sequence: Synthetic oligonucleotide
  source 1..47: mol_type = other DNA
gttgtgaatacctttcaaattagtatagaagcaatatcataaacatc

SEQ ID NO: 13195 - DNA, 47 bp, synthetic construct
  misc_feature 1..47: note = Description of Artificial Sequence: Synthetic oligonucleotide
  source 1..47: mol_type = other DNA
gttgtgaatagccgacaaaatcgtatctaatgcatatcgtaaacaac

SEQ ID NO: 13196 - DNA, 47 bp, synthetic construct
  misc_feature 1..47: note = Description of Artificial Sequence: Synthetic oligonucleotide
  source 1..47: mol_type = other DNA
gttgtgaatagctgacattttcgtatctacgacatatcataaacaac

SEQ ID NO: 13197 - DNA, 25 bp, synthetic construct
  misc_feature 1..25: note = Description of Artificial Sequence: Synthetic oligonucleotide
  source 1..25: mol_type = other DNA
gttgtgaatagcttgcagattatgt

SEQ ID NO: 13198 - DNA, 46 bp, synthetic construct
  misc_feature 1..46: note = Description of Artificial Sequence: Synthetic oligonucleotide
  source 1..46: mol_type = other DNA
gttgtgaatagctttcaaaattgtatctttaaagatgaaagacaac

SEQ ID NO: 13199 - DNA, 46 bp, synthetic construct
  misc_feature 1..46: note = Description of Artificial Sequence: Synthetic oligonucleotide
  source 1..46: mol_type = other DNA
gttgtgaatagctttcaaaattgtatctttagagatgagtcgcaac

SEQ ID NO: 13200 - DNA, 46 bp, synthetic construct
  misc_feature 1..46: note = Description of Artificial Sequence: Synthetic oligonucleotide
  source 1..46: mol_type = other DNA
gttgtgaatagctttcagattttgtaattttgtaattagatacaac

SEQ ID NO: 13201 - DNA, 47 bp, synthetic construct
  misc_feature 1..47: note = Description of Artificial Sequence: Synthetic oligonucleotide
  source 1..47: mol_type = other DNA
gttgtgaatagctttcatttctatgtatctttgacatccgaaacaac

SEQ ID NO: 13202 - DNA, 47 bp, synthetic construct
  misc_feature 1..47: note = Description of Artificial Sequence: Synthetic oligonucleotide
  source 1..47: mol_type = other DNA
gttgtgaatagctttcgtttttgtatctttgaattagtcacaacagt

SEQ ID NO: 13203 - DNA, 47 bp, synthetic construct
  misc_feature 1..47: note = Description of Artificial Sequence: Synthetic oligonucleotide
  source 1..47: mol_type = other DNA
gttgtgaataggctccaaaatggtatctttacattatcataaacaac

SEQ ID NO: 13204 - DNA, 36 bp, synthetic construct
  misc_feature 1..36: note = Description of Artificial Sequence: Synthetic oligonucleotide
  source 1..36: mol_type = other DNA
gttgtgaatcattccttttctacatcaaaccacaac

SEQ ID NO: 13205 - DNA, 36 bp, synthetic construct
  misc_feature 1..36: note = Description of Artificial Sequence: Synthetic oligonucleotide
  source 1..36: mol_type = other DNA
gttgtgaatcccgagcagacatcgattagctacact

SEQ ID NO: 13206 - DNA, 37 bp, synthetic construct
  misc_feature 1..37: note = Description of Artificial Sequence: Synthetic oligonucleotide
  source 1..37: mol_type = other DNA
gttgtgaatccctttcaaatttttgtagttttatcaa

SEQ ID NO: 13207 - DNA, 47 bp, synthetic construct
  misc_feature 1..47: note = Description of Artificial Sequence: Synthetic oligonucleotide
  source 1..47: mol_type = other DNA
gttgtgaatcgctttaaaaaaaatgtatctttacacgttgaaacaac

SEQ ID NO: 13208 - DNA, 47 bp, synthetic construct
  misc_feature 1..47: note = Description of Artificial Sequence: Synthetic oligonucleotide
  source 1..47: mol_type = other DNA
gttgtgaatcgctttcaattttttgtacctttgcaatctctataaac

SEQ ID NO: 13209 - DNA, 36 bp, synthetic construct
  misc_feature 1..36: note = Description of Artificial Sequence: Synthetic oligonucleotide
  source 1..36: mol_type = other DNA
gttgtgaatgactctcaaattcatatcagaagcatc

SEQ ID NO: 13210 - DNA, 36 bp, synthetic construct
  misc_feature 1..36: note = Description of Artificial Sequence: Synthetic oligonucleotide
  source 1..36: mol_type = other DNA
gttgtgaatggccaacggaccctgatcggttacact

SEQ ID NO: 13211 - DNA, 46 bp, synthetic construct
  misc_feature 1..46: note = Description of Artificial Sequence: Synthetic oligonucleotide
  source 1..46: mol_type = other DNA
gttgtgaatggcttacagaattgtaacttggcttagaagtcacacc

SEQ ID NO: 13212 - DNA, 47 bp, synthetic construct
  misc_feature 1..47: note = Description of Artificial Sequence: Synthetic oligonucleotide
  source 1..47: mol_type = other DNA
gttgtgaatggctttcattttttttatctttggcatatcacaacagc

SEQ ID NO: 13213 - DNA, 36 bp, synthetic construct
  misc_feature 1..36: note = Description of Artificial Sequence: Synthetic oligonucleotide
  source 1..36: mol_type = other DNA
gttgtgaatgggcaacggaccctgatcggttatact

SEQ ID NO: 13214 - DNA, 46 bp, synthetic construct
  misc_feature 1..46: note = Description of Artificial Sequence: Synthetic oligonucleotide
  source 1..46: mol_type = other DNA
gttgtgaattactttcaaaatttgtatctttgtgattgcaaacaac

SEQ ID NO: 13215 - DNA, 46 bp, synthetic construct
  misc_feature 1..46: note = Description of Artificial Sequence: Synthetic oligonucleotide
  source 1..46: mol_type = other DNA
gttgtgaattccttacaaattgtatctttgaagtattgaaaacagt

SEQ ID NO: 13216 - DNA, 36 bp, synthetic construct
  misc_feature 1..36: note = Description of Artificial Sequence: Synthetic oligonucleotide
  source 1..36: mol_type = other DNA
gttgtgaattgacatcaggtcgggattagttacact

SEQ ID NO: 13217 - DNA, 36 bp, synthetic construct
  misc_feature 1..36: note = Description of Artificial Sequence: Synthetic oligonucleotide
  source 1..36: mol_type = other DNA
gttgtgaattgaccacagaccaagaaatgctatgat

SEQ ID NO: 13218 - DNA, 36 bp, synthetic construct
  misc_feature 1..36: note = Description of Artificial Sequence: Synthetic oligonucleotide
  source 1..36: mol_type = other DNA
gttgtgaattgagtgggaaatagtatttttggcaac

SEQ ID NO: 13219 - DNA, 47 bp, synthetic construct
  misc_feature 1..47: note = Description of Artificial Sequence: Synthetic oligonucleotide
  source 1..47: mol_type = other DNA
gttgtgaattgatatcgattttgtatctttgacattggaatcacagt

SEQ ID NO: 13220 - DNA, 47 bp, synthetic construct
  misc_feature 1..47: note = Description of Artificial Sequence: Synthetic oligonucleotide
  source 1..47: mol_type = other DNA
gttgtgaattgattacattttgtatttttatgcctggctttacagca

SEQ ID NO: 13221 - DNA, 36 bp, synthetic construct
  misc_feature 1..36: note = Description of Artificial Sequence: Synthetic oligonucleotide
  source 1..36: mol_type = other DNA
gttgtgaattgattggaaggagttctttgatacatt

SEQ ID NO: 13222 - DNA, 47 bp, synthetic construct
  misc_feature 1..47: note = Description of Artificial Sequence: Synthetic oligonucleotide
  source 1..47: mol_type = other DNA
gttgtgaattgatttcaaattgatacttttatgtgatgattcacagt

SEQ ID NO: 13223 - DNA, 46 bp, synthetic construct
  misc_feature 1..46: note = Description of Artificial Sequence: Synthetic oligonucleotide
  source 1..46: mol_type = other DNA
gttgtgaattgatttcaaattgtatttttacgtgagcaatcacaag

SEQ ID NO: 13224 - DNA, 46 bp, synthetic construct
  misc_feature 1..46: note = Description of Artificial Sequence: Synthetic oligonucleotide
  source 1..46: mol_type = other DNA
gttgtgaattgatttcaaattgtatttttacgtgaggattcacaag

SEQ ID NO: 13225 - DNA, 36 bp, synthetic construct
  misc_feature 1..36: note = Description of Artificial Sequence: Synthetic oligonucleotide
  source 1..36: mol_type = other DNA
gttgtgaattgatttccattcaaggcctaaaccaac

SEQ ID NO: 13226 - DNA, 46 bp, synthetic construct
  misc_feature 1..46: note = Description of Artificial Sequence: Synthetic oligonucleotide
  source 1..46: mol_type = other DNA
gttgtgaattgattttaaattgtgttctttatatactaatttcaac

SEQ ID NO: 13227 - DNA, 36 bp, synthetic construct
  misc_feature 1..36: note = Description of Artificial Sequence: Synthetic oligonucleotide
  source 1..36: mol_type = other DNA
gttgtgaattgcaggcaggcatcggtcagctacaat

SEQ ID NO: 13228 - DNA, 36 bp, synthetic construct
  misc_feature 1..36: note = Description of Artificial Sequence: Synthetic oligonucleotide
  source 1..36: mol_type = other DNA
gttgtgaattgcatataacccttggtcgggtacact

SEQ ID NO: 13229 - DNA, 46 bp, synthetic construct
  misc_feature 1..46: note = Description of Artificial Sequence: Synthetic oligonucleotide
  source 1..46: mol_type = other DNA
gttgtgaattgcattaaaattagtatctttgcaccataataaacag

SEQ ID NO: 13230 - DNA, 47 bp, synthetic construct
  misc_feature 1..47: note = Description of Artificial Sequence: Synthetic oligonucleotide
  source 1..47: mol_type = other DNA
gttgtgaattgctaacattttgataactttgcaaaagcgtttgcagc

SEQ ID NO: 13231 - DNA, 47 bp, synthetic construct
  misc_feature 1..47: note = Description of Artificial Sequence: Synthetic oligonucleotide
  source 1..47: mol_type = other DNA
gttgtgaattgctactttttttgtacctttgcacgttcttttacaac

SEQ ID NO: 13232 - DNA, 36 bp, synthetic construct
  misc_feature 1..36: note = Description of Artificial Sequence: Synthetic oligonucleotide
  source 1..36: mol_type = other DNA
gttgtgaattgctcacagattagtacattttacatc

SEQ ID NO: 13233 - DNA, 36 bp, synthetic construct
  misc_feature 1..36: note = Description of Artificial Sequence: Synthetic oligonucleotide
  source 1..36: mol_type = other DNA
gttgtgaattgctgataaaatcgtatcatatacaac

SEQ ID NO: 13234 - DNA, 47 bp, synthetic construct
  misc_feature 1..47: note = Description of Artificial Sequence: Synthetic oligonucleotide
  source 1..47: mol_type = other DNA
gttgtgaattgctgtattattgagtcttgtaagacattgcacacaac

SEQ ID NO: 13235 - DNA, 46 bp, synthetic construct
  misc_feature 1..46: note = Description of Artificial Sequence: Synthetic oligonucleotide
  source 1..46: mol_type = other DNA
gttgtgaattgcttaaaaagagaacattgacacatacgataaacaa

SEQ ID NO: 13236 - DNA, 47 bp, synthetic construct
  misc_feature 1..47: note = Description of Artificial Sequence: Synthetic oligonucleotide
  source 1..47: mol_type = other DNA
gttgtgaattgcttaaaaagagaacattgacattgatgataaacacc

SEQ ID NO: 13237 - DNA, 47 bp, synthetic construct
  misc_feature 1..47: note = Description of Artificial Sequence: Synthetic oligonucleotide
  source 1..47: mol_type = other DNA
gttgtgaattgcttaaaaaggaaacacgataatagctctttgacatt

SEQ ID NO: 13238 - DNA, 47 bp, synthetic construct
  misc_feature 1..47: note = Description of Artificial Sequence: Synthetic oligonucleotide
  source 1..47: mol_type = other DNA
gttgtgaattgcttaaatagttagttcgatattagttctttgacatt

SEQ ID NO: 13239 - DNA, 47 bp, synthetic construct
  misc_feature 1..47: note = Description of Artificial Sequence: Synthetic oligonucleotide
  source 1..47: mol_type = other DNA
gttgtgaattgcttcaaaatgtgtatctttgcagtagcaagcacaat

SEQ ID NO: 13240 - DNA, 47 bp, synthetic construct
  misc_feature 1..47: note = Description of Artificial Sequence: Synthetic oligonucleotide
  source 1..47: mol_type = other DNA
gttgtgaattgcttcaaaatgtgtatctttgcagtggcaagcacaat

SEQ ID NO: 13241 - DNA, 47 bp, synthetic construct
  misc_feature 1..47: note = Description of Artificial Sequence: Synthetic oligonucleotide
  source 1..47: mol_type = other DNA
gttgtgaattgcttcaaaatgtgtatctttgcattagcacgtacaac

SEQ ID NO: 13242 - DNA, 47 bp, synthetic construct
  misc_feature 1..47: note = Description of Artificial Sequence: Synthetic oligonucleotide
  source 1..47: mol_type = other DNA
gttgtgaattgcttgaaaagagaacattgacactgataaatgacaac

SEQ ID NO: 13243 - DNA, 47 bp, synthetic construct
  misc_feature 1..47: note = Description of Artificial Sequence: Synthetic oligonucleotide
  source 1..47: mol_type = other DNA
gttgtgaattgcttgaaattcttcatctttgaaccatcatacacact

SEQ ID NO: 13244 - DNA, 47 bp, synthetic construct
  misc_feature 1..47: note = Description of Artificial Sequence: Synthetic oligonucleotide
  source 1..47: mol_type = other DNA
gttgtgaattgctttaaaattagtatcttgtactatcagatacaacg

SEQ ID NO: 13245 - DNA, 47 bp, synthetic construct
  misc_feature 1..47: note = Description of Artificial Sequence: Synthetic oligonucleotide
  source 1..47: mol_type = other DNA
gttgtgaattgctttaaaattagtatctttgtactatcaaacacaac

SEQ ID NO: 13246 - DNA, 47 bp, synthetic construct
  misc_feature 1..47: note = Description of Artificial Sequence: Synthetic oligonucleotide
  source 1..47: mol_type = other DNA
gttgtgaattgctttaaaattcgtacctttaaaccggtatatacacc

SEQ ID NO: 13247 - DNA, 47 bp, synthetic construct
  misc_feature 1..47: note = Description of Artificial Sequence: Synthetic oligonucleotide
  source 1..47: mol_type = other DNA
gttgtgaattgctttaaatttagtatctttgcatagtcatagacaac

SEQ ID NO: 13248 - DNA, 47 bp, synthetic construct
  misc_feature 1..47: note = Description of Artificial Sequence: Synthetic oligonucleotide
  source 1..47: mol_type = other DNA
gttgtgaattgctttattcttctatagtgattgagttctttgatagt

SEQ ID NO: 13249 - DNA, 47 bp, synthetic construct
  misc_feature 1..47: note = Description of Artificial Sequence: Synthetic oligonucleotide
  source 1..47: mol_type = other DNA
gttgtgaattgctttcaaaaaattgtatctttgatattctgaacaac

SEQ ID NO: 13250 - DNA, 47 bp, synthetic construct
  misc_feature 1..47: note = Description of Artificial Sequence: Synthetic oligonucleotide
  source 1..47: mol_type = other DNA
gttgtgaattgctttcaaaaacttgtatctttgctctttgaaacaac

SEQ ID NO: 13251 - DNA, 46 bp, synthetic construct
  misc_feature 1..46: note = Description of Artificial Sequence: Synthetic oligonucleotide
  source 1..46: mol_type = other DNA
gttgtgaattgctttcaaaaagtttaaatttgtgattaaacacaac

SEQ ID NO: 13252 - DNA, 47 bp, synthetic construct
  misc_feature 1..47: note = Description of Artificial Sequence: Synthetic oligonucleotide
  source 1..47: mol_type = other DNA
gttgtgaattgctttcaaaaattagtatctttgatatcacaaacaac

SEQ ID NO: 13253 - DNA, 47 bp, synthetic construct
  misc_feature 1..47: note = Description of Artificial Sequence: Synthetic oligonucleotide
  source 1..47: mol_type = other DNA
gttgtgaattgctttcaaaaattattatcttcgtgacacgacacaac

SEQ ID NO: 13254 - DNA, 47 bp, synthetic construct
  misc_feature 1..47: note = Description of Artificial Sequence: Synthetic oligonucleotide
  source 1..47: mol_type = other DNA
gttgtgaattgctttcaaaaattattatcttcgtgatgaaggacaac

SEQ ID NO: 13255 - DNA, 47 bp, synthetic construct
  misc_feature 1..47: note = Description of Artificial Sequence: Synthetic oligonucleotide
  source 1..47: mol_type = other DNA
gttgtgaattgctttcaaaaattattatcttcgtgattagtcacagc

SEQ ID NO: 13256 - DNA, 47 bp, synthetic construct
  misc_feature 1..47: note = Description of Artificial Sequence: Synthetic oligonucleotide
  source 1..47: mol_type = other DNA
gttgtgaattgctttcaaaaatttgtatctttgtagtctgaaacaac

SEQ ID NO: 13257 - DNA, 47 bp, synthetic construct
  misc_feature 1..47: note = Description of Artificial Sequence: Synthetic oligonucleotide
  source 1..47: mol_type = other DNA
gttgtgaattgctttcaaaaatttgtatctttgtagtttgaaacaac

SEQ ID NO: 13258 - DNA, 46 bp, synthetic construct
  misc_feature 1..46: note = Description of Artificial Sequence: Synthetic oligonucleotide
  source 1..46: mol_type = other DNA
gttgtgaattgctttcaaaagtttagtatctttgcggtctgaaaca

SEQ ID NO: 13259 - DNA, 44 bp, synthetic construct
  misc_feature 1..44: note = Description of Artificial Sequence: Synthetic oligonucleotide
  source 1..44: mol_type = other DNA
gttgtgaattgctttcaaaagtttgtatctttgtagtctgaaac

SEQ ID NO: 13260 - DNA, 47 bp, synthetic construct
  misc_feature 1..47: note = Description of Artificial Sequence: Synthetic oligonucleotide
  source 1..47: mol_type = other DNA
gttgtgaattgctttcaaaagtttgtatctttgtagtctgaaacaac

SEQ ID NO: 13261 - DNA, 46 bp, synthetic construct
  misc_feature 1..46: note = Description of Artificial Sequence: Synthetic oligonucleotide
  source 1..46: mol_type = other DNA
gttgtgaattgctttcaaaatgataacttcctatggaaatcacaac

SEQ ID NO: 13262 - DNA, 46 bp, synthetic construct
  misc_feature 1..46: note = Description of Artificial Sequence: Synthetic oligonucleotide
  source 1..46: mol_type = other DNA
gttgtgaattgctttcaaaatggtaatttcctagggaaatcacagc

SEQ ID NO: 13263 - DNA, 46 bp, synthetic construct
  misc_feature 1..46: note = Description of Artificial Sequence: Synthetic oligonucleotide
  source 1..46: mol_type = other DNA
gttgtgaattgctttcaaaatgttactttcctagggaaatcacagc

SEQ ID NO: 13264 - DNA, 46 bp, synthetic construct
  misc_feature 1..46: note = Description of Artificial Sequence: Synthetic oligonucleotide
  source 1..46: mol_type = other DNA
gttgtgaattgctttcaaaattattatcttcgtggttagtcacaac

SEQ ID NO: 13265 - DNA, 46 bp, synthetic construct
  misc_feature 1..46: note = Description of Artificial Sequence: Synthetic oligonucleotide
  source 1..46: mol_type = other DNA
gttgtgaattgctttcaaaattgtatcttaagagatgattcacagg

SEQ ID NO: 13266 - DNA, 47 bp, synthetic construct
  misc_feature 1..47: note = Description of Artificial Sequence: Synthetic oligonucleotide
  source 1..47: mol_type = other DNA
gttgtgaattgctttcaaaattgtatctttgacggattgaatacagc

SEQ ID NO: 13267 - DNA, 46 bp, synthetic construct
  misc_feature 1..46: note = Description of Artificial Sequence: Synthetic oligonucleotide
  source 1..46: mol_type = other DNA
gttgtgaattgctttcaaaattgtattttagcttataattcccaac

SEQ ID NO: 13268 - DNA, 46 bp, synthetic construct
  misc_feature 1..46: note = Description of Artificial Sequence: Synthetic oligonucleotide
  source 1..46: mol_type = other DNA
gttgtgaattgctttcaaaattgtatttttacttataattcccaat

SEQ ID NO: 13269 - DNA, 46 bp, synthetic construct
  misc_feature 1..46: note = Description of Artificial Sequence: Synthetic oligonucleotide
  source 1..46: mol_type = other DNA
gttgtgaattgctttcaaaattgtatttttacttataattctcaac

SEQ ID NO: 13270 - DNA, 46 bp, synthetic construct
  misc_feature 1..46: note = Description of Artificial Sequence: Synthetic oligonucleotide
  source 1..46: mol_type = other DNA
gttgtgaattgctttcaaaattgtatttttacttatgattctcaac

SEQ ID NO: 13271 - DNA, 46 bp, synthetic construct
  misc_feature 1..46: note = Description of Artificial Sequence: Synthetic oligonucleotide
  source 1..46: mol_type = other DNA
gttgtgaattgctttcaaaattgtatttttatagactattctcaac

SEQ ID NO: 13272 - DNA, 47 bp, synthetic construct
  misc_feature 1..47: note = Description of Artificial Sequence: Synthetic oligonucleotide
  source 1..47: mol_type = other DNA
gttgtgaattgctttcaaaattgtttatcttcgtgacacgacacaac

SEQ ID NO: 13273 - DNA, 47 bp, synthetic construct
  misc_feature 1..47: note = Description of Artificial Sequence: Synthetic oligonucleotide
  source 1..47: mol_type = other DNA
gttgtgaattgctttcaaaattgtttatcttcgtgatacgacacaac

SEQ ID NO: 13274 - DNA, 47 bp, synthetic construct
  misc_feature 1..47: note = Description of Artificial Sequence: Synthetic oligonucleotide
  source 1..47: mol_type = other DNA
gttgtgaattgctttcaaaatttattacctttgtggtcggaaacaac

SEQ ID NO: 13275 - DNA, 47 bp, synthetic construct
  misc_feature 1..47: note = Description of Artificial Sequence: Synthetic oligonucleotide
  source 1..47: mol_type = other DNA
gttgtgaattgctttcaaaatttattagctttgtgatgaagcacaac

SEQ ID NO: 13276 - DNA, 37 bp, synthetic construct
  misc_feature 1..37: note = Description of Artificial Sequence: Synthetic oligonucleotide
  source 1..37: mol_type = other DNA
gttgtgaattgctttcaaaatttattatctttatgat

SEQ ID NO: 13277 - DNA, 47 bp, synthetic construct
  misc_feature 1..47: note = Description of Artificial Sequence: Synthetic oligonucleotide
  source 1..47: mol_type = other DNA
gttgtgaattgctttcaaaatttattatctttgcagtcggaaacaac

SEQ ID NO: 13278 - DNA, 46 bp, synthetic construct
  misc_feature 1..46: note = Description of Artificial Sequence: Synthetic oligonucleotide
  source 1..46: mol_type = other DNA
gttgtgaattgctttcaaaatttgtatctttgacatcggaaacagc

SEQ ID NO: 13279 - DNA, 47 bp, synthetic construct
  misc_feature 1..47: note = Description of Artificial Sequence: Synthetic oligonucleotide
  source 1..47: mol_type = other DNA
gttgtgaattgctttcaaaatttgtgtaaatttgcatcggaaacaat

SEQ ID NO: 13280 - DNA, 47 bp, synthetic construct
  misc_feature 1..47: note = Description of Artificial Sequence: Synthetic oligonucleotide
  source 1..47: mol_type = other DNA
gttgtgaattgctttcaaaatttgtgtaattttgcattggaaacaac

SEQ ID NO: 13281 - DNA, 47 bp, synthetic construct
  misc_feature 1..47: note = Description of Artificial Sequence: Synthetic oligonucleotide
  source 1..47: mol_type = other DNA
gttgtgaattgctttcaaacatccataatggatagagaataaacacc

SEQ ID NO: 13282 - DNA, 44 bp, synthetic construct
  misc_feature 1..44: note = Description of Artificial Sequence: Synthetic oligonucleotide
  source 1..44: mol_type = other DNA
gttgtgaattgctttcaaacttgtatcaaacaaatagcatacac

SEQ ID NO: 13283 - DNA, 36 bp, synthetic construct
  misc_feature 1..36: note = Description of Artificial Sequence: Synthetic oligonucleotide
  source 1..36: mol_type = other DNA
gttgtgaattgctttcaaacttgtatcatactaatg

SEQ ID NO: 13284 - DNA, 47 bp, synthetic construct
  misc_feature 1..47: note = Description of Artificial Sequence: Synthetic oligonucleotide
  source 1..47: mol_type = other DNA
gttgtgaattgctttcaaacttgtatctatgtaatggcataaccatc

SEQ ID NO: 13285 - DNA, 47 bp, synthetic construct
  misc_feature 1..47: note = Description of Artificial Sequence: Synthetic oligonucleotide
  source 1..47: mol_type = other DNA
gttgtgaattgctttcaaactttagtatctttgggatacaacacaac

SEQ ID NO: 13286 - DNA, 47 bp, synthetic construct
  misc_feature 1..47: note = Description of Artificial Sequence: Synthetic oligonucleotide
  source 1..47: mol_type = other DNA
gttgtgaattgctttcaaactttattatctttgtgataatacacaac

SEQ ID NO: 13287 - DNA, 46 bp, synthetic construct
  misc_feature 1..46: note = Description of Artificial Sequence: Synthetic oligonucleotide
  source 1..46: mol_type = other DNA
gttgtgaattgctttcaaatgtttctttgacaatattaaaaccaag

SEQ ID NO: 13288 - DNA, 47 bp, synthetic construct
  misc_feature 1..47: note = Description of Artificial Sequence: Synthetic oligonucleotide
  source 1..47: mol_type = other DNA
gttgtgaattgctttcaaattaatatctttgtgtcgtcagacacaac

SEQ ID NO: 13289 - DNA, 47 bp, synthetic construct
  misc_feature 1..47: note = Description of Artificial Sequence: Synthetic oligonucleotide
  source 1..47: mol_type = other DNA
gttgtgaattgctttcaaattactatctttgtaagtgcataaacacc

SEQ ID NO: 13290 - DNA, 47 bp, synthetic construct
  misc_feature 1..47: note = Description of Artificial Sequence: Synthetic oligonucleotide
  source 1..47: mol_type = other DNA
gttgtgaattgctttcaaattagtatctttgcaagatagaagacaac

SEQ ID NO: 13291 - DNA, 47 bp, synthetic construct
  misc_feature 1..47: note = Description of Artificial Sequence: Synthetic oligonucleotide
  source 1..47: mol_type = other DNA
gttgtgaattgctttcaaattagtatctttgcaatatcatagacatc

SEQ ID NO: 13292 - DNA, 46 bp, synthetic construct
  misc_feature 1..46: note = Description of Artificial Sequence: Synthetic oligonucleotide
  source 1..46: mol_type = other DNA
gttgtgaattgctttcaaattagtatctttgcatatcacaaacaat

SEQ ID NO: 13293 - DNA, 47 bp, synthetic construct
  misc_feature 1..47: note = Description of Artificial Sequence: Synthetic oligonucleotide
  source 1..47: mol_type = other DNA
gttgtgaattgctttcaaattagtatctttgtcttattgataacagc

SEQ ID NO: 13294 - DNA, 45 bp, synthetic construct
  misc_feature 1..45: note = Description of Artificial Sequence: Synthetic oligonucleotide
  source 1..45: mol_type = other DNA
gttgtgaattgctttcaaattcgtaactttgtgatctcaaacaac

SEQ ID NO: 13295 - DNA, 47 bp, synthetic construct
  misc_feature 1..47: note = Description of Artificial Sequence: Synthetic oligonucleotide
  source 1..47: mol_type = other DNA
gttgtgaattgctttcaaattcttacctttatggggtgatacacaac

SEQ ID NO: 13296 - DNA, 46 bp, synthetic construct
  misc_feature 1..46: note = Description of Artificial Sequence: Synthetic oligonucleotide
  source 1..46: mol_type = other DNA
gttgtgaattgctttcaaattggtatcttcatatgataatcacagc

SEQ ID NO: 13297 - DNA, 47 bp, synthetic construct
  misc_feature 1..47: note = Description of Artificial Sequence: Synthetic oligonucleotide
  source 1..47: mol_type = other DNA
gttgtgaattgctttcaaattgtatctttattgggttcattaacagc

SEQ ID NO: 13298 - DNA, 46 bp, synthetic construct
  misc_feature 1..46: note = Description of Artificial Sequence: Synthetic oligonucleotide
  source 1..46: mol_type = other DNA
gttgtgaattgctttcaaattgtatctttgacatattggtcacaac

SEQ ID NO: 13299 - DNA, 46 bp, synthetic construct
  misc_feature 1..46: note = Description of Artificial Sequence: Synthetic oligonucleotide
  source 1..46: mol_type = other DNA
gttgtgaattgctttcaaattgtatctttgacttattgaacacagc

SEQ ID NO: 13300 - DNA, 46 bp, synthetic construct
  misc_feature 1..46: note = Description of Artificial Sequence: Synthetic oligonucleotide
  source 1..46: mol_type = other DNA
gttgtgaattgctttcaaattgtattctaacgatctttggcacagg

SEQ ID NO: 13301 - DNA, 46 bp, synthetic construct
  misc_feature 1..46: note = Description of Artificial Sequence: Synthetic oligonucleotide
  source 1..46: mol_type = other DNA
gttgtgaattgctttcaaattgtattttaccgatctttgacacagc

SEQ ID NO: 13302 - DNA, 36 bp, synthetic construct
  misc_feature 1..36: note = Description of Artificial Sequence: Synthetic oligonucleotide
  source 1..36: mol_type = other DNA
gttgtgaattgctttcaaattgtattttagcagcac

SEQ ID NO: 13303 - DNA, 47 bp, synthetic construct
  misc_feature 1..47: note = Description of Artificial Sequence: Synthetic oligonucleotide
  source 1..47: mol_type = other DNA
gttgtgaattgctttcaaattgtatttttactgtggcttaagacaac

SEQ ID NO: 13304 - DNA, 47 bp, synthetic construct
  misc_feature 1..47: note = Description of Artificial Sequence: Synthetic oligonucleotide
  source 1..47: mol_type = other DNA
gttgtgaattgctttcaaattgtatttttatatcggtctttgacaac

SEQ ID NO: 13305 - DNA, 47 bp, synthetic construct
  misc_feature 1..47: note = Description of Artificial Sequence: Synthetic oligonucleotide
  source 1..47: mol_type = other DNA
gttgtgaattgctttcaaattgtatttttatcaggttcattgacaac

SEQ ID NO: 13306 - DNA, 46 bp, synthetic construct
  misc_feature 1..46: note = Description of Artificial Sequence: Synthetic oligonucleotide
  source 1..46: mol_type = other DNA
gttgtgaattgctttcaaattgtgattttacgatctttgacacagc

SEQ ID NO: 13307 - DNA, 36 bp, synthetic construct
  misc_feature 1..36: note = Description of Artificial Sequence: Synthetic oligonucleotide
  source 1..36: mol_type = other DNA
gttgtgaattgctttcaaatttagtacctttgcagt

SEQ ID NO: 13308 - DNA, 47 bp, synthetic construct
  misc_feature 1..47: note = Description of Artificial Sequence: Synthetic oligonucleotide
  source 1..47: mol_type = other DNA
gttgtgaattgctttcaaatttgtatctttacatcgtggtagacaac

SEQ ID NO: 13309 - DNA, 47 bp, synthetic construct
  misc_feature 1..47: note = Description of Artificial Sequence: Synthetic oligonucleotide
  source 1..47: mol_type = other DNA
gttgtgaattgctttcaaatttgtatctttgcactggatattgcaac

SEQ ID NO: 13310 - DNA, 47 bp, synthetic construct
  misc_feature 1..47: note = Description of Artificial Sequence: Synthetic oligonucleotide
  source 1..47: mol_type = other DNA
gttgtgaattgctttcaaatttgtatctttgtaccgagctaaacaac

SEQ ID NO: 13311 - DNA, 47 bp, synthetic construct
  misc_feature 1..47: note = Description of Artificial Sequence: Synthetic oligonucleotide
  source 1..47: mol_type = other DNA
gttgtgaattgctttcaaatttgtatctttgtatcgagtaatacaac

SEQ ID NO: 13312 - DNA, 47 bp, synthetic construct
  misc_feature 1..47: note = Description of Artificial Sequence: Synthetic oligonucleotide
  source 1..47: mol_type = other DNA
gttgtgaattgctttcaaatttgtatctttgtatcggatgacacagc

SEQ ID NO: 13313 - DNA, 35 bp, synthetic construct
  misc_feature 1..35: note = Description of Artificial Sequence: Synthetic oligonucleotide
  source 1..35: mol_type = other DNA
gttgtgaattgctttcaaattttaactttgcaagg

SEQ ID NO: 13314 - DNA, 46 bp, synthetic construct
  misc_feature 1..46: note = Description of Artificial Sequence: Synthetic oligonucleotide
  source 1..46: mol_type = other DNA
gttgtgaattgctttcaaattttatgtagcttaggtctttaacaac

SEQ ID NO: 13315 - DNA, 46 bp, synthetic construct
  misc_feature 1..46: note = Description of Artificial Sequence: Synthetic oligonucleotide
  source 1..46: mol_type = other DNA
gttgtgaattgctttcaaattttgtagttttgagattgataacaac

SEQ ID NO: 13316 - DNA, 46 bp, synthetic construct
  misc_feature 1..46: note = Description of Artificial Sequence: Synthetic oligonucleotide
  source 1..46: mol_type = other DNA
gttgtgaattgctttcaaattttgtagttttgcgattgataacaac

SEQ ID NO: 13317 - DNA, 44 bp, synthetic construct
  misc_feature 1..44: note = Description of Artificial Sequence: Synthetic oligonucleotide
  source 1..44: mol_type = other DNA
gttgtgaattgctttcaaattttgtagttttgtgattgataaca

SEQ ID NO: 13318 - DNA, 46 bp, synthetic construct
  misc_feature 1..46: note = Description of Artificial Sequence: Synthetic oligonucleotide
  source 1..46: mol_type = other DNA
gttgtgaattgctttcaaattttgtagttttgtgattgataacaac

SEQ ID NO: 13319 - DNA, 47 bp, synthetic construct
  misc_feature 1..47: note = Description of Artificial Sequence: Synthetic oligonucleotide
  source 1..47: mol_type = other DNA
gttgtgaattgctttcaaattttgtagttttgtgattgataacaaca

SEQ ID NO: 13320 - DNA, 46 bp, synthetic construct
  misc_feature 1..46: note = Description of Artificial Sequence: Synthetic oligonucleotide
  source 1..46: mol_type = other DNA
gttgtgaattgctttcaaattttgtagttttgtgattgataacatc

SEQ ID NO: 13321 - DNA, 46 bp, synthetic construct
  misc_feature 1..46: note = Description of Artificial Sequence: Synthetic oligonucleotide
  source 1..46: mol_type = other DNA
gttgtgaattgctttcaaattttgtatctttgacatctgaaacaac

SEQ ID NO: 13322 - DNA, 46 bp, synthetic construct
  misc_feature 1..46: note = Description of Artificial Sequence: Synthetic oligonucleotide
  source 1..46: mol_type = other DNA
gttgtgaattgctttcaagtttttattaccttcggtctttgacaac

SEQ ID NO: 13323 - DNA, 47 bp, synthetic construct
  misc_feature 1..47: note = Description of Artificial Sequence: Synthetic oligonucleotide
  source 1..47: mol_type = other DNA
gttgtgaattgctttcaataattagtatctttgatattcggaacaac

SEQ ID NO: 13324 - DNA, 47 bp, synthetic construct
  misc_feature 1..47: note = Description of Artificial Sequence: Synthetic oligonucleotide
  source 1..47: mol_type = other DNA
gttgtgaattgctttcaattatttgtatctttgatattctgaacaac

SEQ ID NO: 13325 - DNA, 46 bp, synthetic construct
  misc_feature 1..46: note = Description of Artificial Sequence: Synthetic oligonucleotide
  source 1..46: mol_type = other DNA
gttgtgaattgctttcaattctgtaataactttgatgttgtacaac

SEQ ID NO: 13326 - DNA, 47 bp, synthetic construct
  misc_feature 1..47: note = Description of Artificial Sequence: Synthetic oligonucleotide
  source 1..47: mol_type = other DNA
gttgtgaattgctttcaatttcagtatcttagttcattgacagcagc

SEQ ID NO: 13327 - DNA, 46 bp, synthetic construct
  misc_feature 1..46: note = Description of Artificial Sequence: Synthetic oligonucleotide
  source 1..46: mol_type = other DNA
gttgtgaattgctttcaatttcgttcttacatttacgatacacaac

SEQ ID NO: 13328 - DNA, 46 bp, synthetic construct
  misc_feature 1..46: note = Description of Artificial Sequence: Synthetic oligonucleotide
  source 1..46: mol_type = other DNA
gttgtgaattgctttcaatttgtgatttaacgatctttgacacacc

SEQ ID NO: 13329 - DNA, 46 bp, synthetic construct
  misc_feature 1..46: note = Description of Artificial Sequence: Synthetic oligonucleotide
  source 1..46: mol_type = other DNA
gttgtgaattgctttcaatttgtgatttgacgatctttgacacacc

SEQ ID NO: 13330 - DNA, 45 bp, synthetic construct
  misc_feature 1..45: note = Description of Artificial Sequence: Synthetic oligonucleotide
  source 1..45: mol_type = other DNA
gttgtgaattgctttcaatttgttcattgatacttttgccacagc

SEQ ID NO: 13331 - DNA, 47 bp, synthetic construct
  misc_feature 1..47: note = Description of Artificial Sequence: Synthetic oligonucleotide
  source 1..47: mol_type = other DNA
gttgtgaattgctttcaattttgaatatctttgagatataacacaac

SEQ ID NO: 13332 - DNA, 47 bp, synthetic construct
  misc_feature 1..47: note = Description of Artificial Sequence: Synthetic oligonucleotide
  source 1..47: mol_type = other DNA
gttgtgaattgctttcaattttgagtatctttgagatataacacaac

SEQ ID NO: 13333 - DNA, 47 bp, synthetic construct
  misc_feature 1..47: note = Description of Artificial Sequence: Synthetic oligonucleotide
  source 1..47: mol_type = other DNA
gttgtgaattgctttcaattttgagtatctttgagatataacataac

SEQ ID NO: 13334 - DNA, 47 bp, synthetic construct
  misc_feature 1..47: note = Description of Artificial Sequence: Synthetic oligonucleotide
  source 1..47: mol_type = other DNA
gttgtgaattgctttcaattttgtatctttgctctttgaacaacaac

SEQ ID NO: 13335 - DNA, 46 bp, synthetic construct
  misc_feature 1..46: note = Description of Artificial Sequence: Synthetic oligonucleotide
  source 1..46: mol_type = other DNA
gttgtgaattgctttcaatttttgtagttttgtgattgataacaac

SEQ ID NO: 13336 - DNA, 47 bp, synthetic construct
  misc_feature 1..47: note = Description of Artificial Sequence: Synthetic oligonucleotide
  source 1..47: mol_type = other DNA
gttgtgaattgctttcagaaatttgtatctttaggatctaaaacagc

SEQ ID NO: 13337 - DNA, 46 bp, synthetic construct
  misc_feature 1..46: note = Description of Artificial Sequence: Synthetic oligonucleotide
  source 1..46: mol_type = other DNA
gttgtgaattgctttcagaatcgtaccttgtgttatgattcacagg

SEQ ID NO: 13338 - DNA, 47 bp, synthetic construct
  misc_feature 1..47: note = Description of Artificial Sequence: Synthetic oligonucleotide
  source 1..47: mol_type = other DNA
gttgtgaattgctttcagaatcgtaccttgtgttatgattcacaggt

SEQ ID NO: 13339 - DNA, 46 bp, synthetic construct
  misc_feature 1..46: note = Description of Artificial Sequence: Synthetic oligonucleotide
  source 1..46: mol_type = other DNA
gttgtgaattgctttcagaattactattttagtgatgattcacagg

SEQ ID NO: 13340 - DNA, 47 bp, synthetic construct
  misc_feature 1..47: note = Description of Artificial Sequence: Synthetic oligonucleotide
  source 1..47: mol_type = other DNA
gttgtgaattgctttcagaattcagtatctttgataccaacaacaac

SEQ ID NO: 13341 - DNA, 46 bp, synthetic construct
  misc_feature 1..46: note = Description of Artificial Sequence: Synthetic oligonucleotide
  source 1..46: mol_type = other DNA
gttgtgaattgctttcagaattgtattttagttgactattcacagg

SEQ ID NO: 13342 - DNA, 46 bp, synthetic construct
  misc_feature 1..46: note = Description of Artificial Sequence: Synthetic oligonucleotide
  source 1..46: mol_type = other DNA
gttgtgaattgctttcagaattgtatttttagcatagattcacagt

SEQ ID NO: 13343 - DNA, 46 bp, synthetic construct
  misc_feature 1..46: note = Description of Artificial Sequence: Synthetic oligonucleotide
  source 1..46: mol_type = other DNA
gttgtgaattgctttcagaattgtatttttagcttagattcacagg

SEQ ID NO: 13344 - DNA, 46 bp, synthetic construct
  misc_feature 1..46: note = Description of Artificial Sequence: Synthetic oligonucleotide
  source 1..46: mol_type = other DNA
gttgtgaattgctttcagaattgtatttttagcttagattcacagt

SEQ ID NO: 13345 - DNA, 47 bp, synthetic construct
  misc_feature 1..47: note = Description of Artificial Sequence: Synthetic oligonucleotide
  source 1..47: mol_type = other DNA
gttgtgaattgctttcagaattgtatttttatgtgatgattcacaag

SEQ ID NO: 13346 - DNA, 47 bp, synthetic construct
  misc_feature 1..47: note = Description of Artificial Sequence: Synthetic oligonucleotide
  source 1..47: mol_type = other DNA
gttgtgaattgctttcagaattttgtatctttgacttgattaacagc

SEQ ID NO: 13347 - DNA, 47 bp, synthetic construct
  misc_feature 1..47: note = Description of Artificial Sequence: Synthetic oligonucleotide
  source 1..47: mol_type = other DNA
gttgtgaattgctttcagacttgtatctaaagattggcataaacatc

SEQ ID NO: 13348 - DNA, 46 bp, synthetic construct
  misc_feature 1..46: note = Description of Artificial Sequence: Synthetic oligonucleotide
  source 1..46: mol_type = other DNA
gttgtgaattgctttcagattactactttagtagaagattcacagg

SEQ ID NO: 13349 - DNA, 46 bp, synthetic construct
  misc_feature 1..46: note = Description of Artificial Sequence: Synthetic oligonucleotide
  source 1..46: mol_type = other DNA
gttgtgaattgctttcagattgtatctttgacatagattccacaac

SEQ ID NO: 13350 - DNA, 47 bp, synthetic construct
  misc_feature 1..47: note = Description of Artificial Sequence: Synthetic oligonucleotide
  source 1..47: mol_type = other DNA
gttgtgaattgctttcagattgtatctttgacataggaaaccacaac

SEQ ID NO: 13351 - DNA, 46 bp, synthetic construct
  misc_feature 1..46: note = Description of Artificial Sequence: Synthetic oligonucleotide
  source 1..46: mol_type = other DNA
gttgtgaattgctttcagattgtatctttgacattggaaccacaac

SEQ ID NO: 13352 - DNA, 46 bp, synthetic construct
  misc_feature 1..46: note = Description of Artificial Sequence: Synthetic oligonucleotide
  source 1..46: mol_type = other DNA
gttgtgaattgctttcagattgtatctttgacttattaaacacaac

SEQ ID NO: 13353 - DNA, 46 bp, synthetic construct
  misc_feature 1..46: note = Description of Artificial Sequence: Synthetic oligonucleotide
  source 1..46: mol_type = other DNA
gttgtgaattgctttcagattgtatctttgacttattgaacacagc

SEQ ID NO: 13354 - DNA, 46 bp, synthetic construct
  misc_feature 1..46: note = Description of Artificial Sequence: Synthetic oligonucleotide
  source 1..46: mol_type = other DNA
gttgtgaattgctttcagattgtatctttgaggtattggtgacacc

SEQ ID NO: 13355 - DNA, 46 bp, synthetic construct
  misc_feature 1..46: note = Description of Artificial Sequence: Synthetic oligonucleotide
  source 1..46: mol_type = other DNA
gttgtgaattgctttcagattgtatctttgatttattgaacacagc

SEQ ID NO: 13356 - DNA, 46 bp, synthetic construct
  misc_feature 1..46: note = Description of Artificial Sequence: Synthetic oligonucleotide
  source 1..46: mol_type = other DNA
gttgtgaattgctttcagattgtatctttgatttattggtcacagc

SEQ ID NO: 13357 - DNA, 47 bp, synthetic construct
  misc_feature 1..47: note = Description of Artificial Sequence: Synthetic oligonucleotide
  source 1..47: mol_type = other DNA
gttgtgaattgctttcagattgtgtaattgacgatatttgtctcagc

SEQ ID NO: 13358 - DNA, 47 bp, synthetic construct
  misc_feature 1..47: note = Description of Artificial Sequence: Synthetic oligonucleotide
  source 1..47: mol_type = other DNA
gttgtgaattgctttcagattttgtatattcgttctttgaacacaat

SEQ ID NO: 13359 - DNA, 47 bp, synthetic construct
  misc_feature 1..47: note = Description of Artificial Sequence: Synthetic oligonucleotide
  source 1..47: mol_type = other DNA
gttgtgaattgctttcagattttgtatcttcgttctttgaacacaat

SEQ ID NO: 13360 - DNA, 46 bp, synthetic construct
  misc_feature 1..46: note = Description of Artificial Sequence: Synthetic oligonucleotide
  source 1..46: mol_type = other DNA
gttgtgaattgctttcagttattatctttataggatgattcgcagt

SEQ ID NO: 13361 - DNA, 46 bp, synthetic construct
  misc_feature 1..46: note = Description of Artificial Sequence: Synthetic oligonucleotide
  source 1..46: mol_type = other DNA
gttgtgaattgctttcagttccttaattttatggatagttcacagg

SEQ ID NO: 13362 - DNA, 46 bp, synthetic construct
  misc_feature 1..46: note = Description of Artificial Sequence: Synthetic oligonucleotide
  source 1..46: mol_type = other DNA
gttgtgaattgctttcagttcgtatctttgacataccggacacaac

SEQ ID NO: 13363 - DNA, 46 bp, synthetic construct
  misc_feature 1..46: note = Description of Artificial Sequence: Synthetic oligonucleotide
  source 1..46: mol_type = other DNA
gttgtgaattgctttcagttctctatttttatagatgattcacagt

SEQ ID NO: 13364 - DNA, 46 bp, synthetic construct
  misc_feature 1..46: note = Description of Artificial Sequence: Synthetic oligonucleotide
  source 1..46: mol_type = other DNA
gttgtgaattgctttcagttctgtaattttatagatgattcacagg

SEQ ID NO: 13365 - DNA, 46 bp, synthetic construct
  misc_feature 1..46: note = Description of Artificial Sequence: Synthetic oligonucleotide
  source 1..46: mol_type = other DNA
gttgtgaattgctttcagttcttatctttaaaggataattcacagt

SEQ ID NO: 13366 - DNA, 46 bp, synthetic construct
  misc_feature 1..46: note = Description of Artificial Sequence: Synthetic oligonucleotide
  source 1..46: mol_type = other DNA
gttgtgaattgctttcagttctttaaatttattgattattcacagg

SEQ ID NO: 13367 - DNA, 46 bp, synthetic construct
  misc_feature 1..46: note = Description of Artificial Sequence: Synthetic oligonucleotide
  source 1..46: mol_type = other DNA
gttgtgaattgctttcagttctttaattttaaggattattcacagg

SEQ ID NO: 13368 - DNA, 46 bp, synthetic construct
  misc_feature 1..46: note = Description of Artificial Sequence: Synthetic oligonucleotide
  source 1..46: mol_type = other DNA
gttgtgaattgctttcagttctttatatttatggagaattcacagg

SEQ ID NO: 13369 - DNA, 46 bp, synthetic construct
  misc_feature 1..46: note = Description of Artificial Sequence: Synthetic oligonucleotide
  source 1..46: mol_type = other DNA
gttgtgaattgctttcagtttgtatctttgaaatattgagcacaac

SEQ ID NO: 13370 - DNA, 46 bp, synthetic construct
  misc_feature 1..46: note = Description of Artificial Sequence: Synthetic oligonucleotide
  source 1..46: mol_type = other DNA
gttgtgaattgctttcagtttgtatctttgatatattgagcacaac

SEQ ID NO: 13371 - DNA, 47 bp, synthetic construct
  misc_feature 1..47: note = Description of Artificial Sequence: Synthetic oligonucleotide
  source 1..47: mol_type = other DNA
gttgtgaattgctttcagttttgtaatttagatcattgatatacacc

SEQ ID NO: 13372 - DNA, 47 bp, synthetic construct
  misc_feature 1..47: note = Description of Artificial Sequence: Synthetic oligonucleotide
  source 1..47: mol_type = other DNA
gttgtgaattgctttcagttttgtatctttgatataccggacacaac

SEQ ID NO: 13373 - DNA, 46 bp, synthetic construct
  misc_feature 1..46: note = Description of Artificial Sequence: Synthetic oligonucleotide
  source 1..46: mol_type = other DNA
gttgtgaattgctttcattctgtattttaatgatctttgacacagc

SEQ ID NO: 13374 - DNA, 47 bp, synthetic construct
  misc_feature 1..47: note = Description of Artificial Sequence: Synthetic oligonucleotide
  source 1..47: mol_type = other DNA
gttgtgaattgctttcattctttgaaatactgatatttagaacaaca

SEQ ID NO: 13375 - DNA, 47 bp, synthetic construct
  misc_feature 1..47: note = Description of Artificial Sequence: Synthetic oligonucleotide
  source 1..47: mol_type = other DNA
gttgtgaattgctttcattctttgaacgatctttgatctttgacaac

SEQ ID NO: 13376 - DNA, 46 bp, synthetic construct
  misc_feature 1..46: note = Description of Artificial Sequence: Synthetic oligonucleotide
  source 1..46: mol_type = other DNA
gttgtgaattgctttcattctttgatttaacgatatttacaacagc

SEQ ID NO: 13377 - DNA, 47 bp, synthetic construct
  misc_feature 1..47: note = Description of Artificial Sequence: Synthetic oligonucleotide
  source 1..47: mol_type = other DNA
gttgtgaattgctttcatttatccgtatctttgggatacaacacaac

SEQ ID NO: 13378 - DNA, 47 bp, synthetic construct
  misc_feature 1..47: note = Description of Artificial Sequence: Synthetic oligonucleotide
  source 1..47: mol_type = other DNA
gttgtgaattgctttcattttaccgtatctttgagatacaacacaac

SEQ ID NO: 13379 - DNA, 47 bp, synthetic construct
  misc_feature 1..47: note = Description of Artificial Sequence: Synthetic oligonucleotide
  source 1..47: mol_type = other DNA
gttgtgaattgctttcatttttaagtatctttgggatacaacacaac

SEQ ID NO: 13380 - DNA, 47 bp, synthetic construct
  misc_feature 1..47: note = Description of Artificial Sequence: Synthetic oligonucleotide
  source 1..47: mol_type = other DNA
gttgtgaattgctttcatttttcagtatctttgagatacaacacaac

SEQ ID NO: 13381 - DNA, 47 bp, synthetic construct
  misc_feature 1..47: note = Description of Artificial Sequence: Synthetic oligonucleotide
  source 1..47: mol_type = other DNA
gttgtgaattgctttcatttttcggtatctttgggatacaacacaac

SEQ ID NO: 13382 - DNA, 47 bp, synthetic construct
  misc_feature 1..47: note = Description of Artificial Sequence: Synthetic oligonucleotide
  source 1..47: mol_type = other DNA
gttgtgaattgctttcatttttcggtatctttgggatacacaacaac

SEQ ID NO: 13383 - DNA, 47 bp, synthetic construct
  misc_feature 1..47: note = Description of Artificial Sequence: Synthetic oligonucleotide
  source 1..47: mol_type = other DNA
gttgtgaattgctttcatttttgagtatctttgagatacaacacaac

SEQ ID NO: 13384 - DNA, 47 bp, synthetic construct
  misc_feature 1..47: note = Description of Artificial Sequence: Synthetic oligonucleotide
  source 1..47: mol_type = other DNA
gttgtgaattgctttcatttttgagtatctttgagatataacacaac

SEQ ID NO: 13385 - DNA, 47 bp, synthetic construct
  misc_feature 1..47: note = Description of Artificial Sequence: Synthetic oligonucleotide
  source 1..47: mol_type = other DNA
gttgtgaattgctttcatttttgagtatctttgagatatgacacaac

SEQ ID NO: 13386 - DNA, 47 bp, synthetic construct
  misc_feature 1..47: note = Description of Artificial Sequence: Synthetic oligonucleotide
  source 1..47: mol_type = other DNA
gttgtgaattgctttcatttttgagtatctttgggatacaatacaac

SEQ ID NO: 13387 - DNA, 47 bp, synthetic construct
  misc_feature 1..47: note = Description of Artificial Sequence: Synthetic oligonucleotide
  source 1..47: mol_type = other DNA
gttgtgaattgctttcgaaaatttgtaactttgccaacgctcacaac

SEQ ID NO: 13388 - DNA, 46 bp, synthetic construct
  misc_feature 1..46: note = Description of Artificial Sequence: Synthetic oligonucleotide
  source 1..46: mol_type = other DNA
gttgtgaattgctttcgaaattgtatcttatgagataattcacagg

SEQ ID NO: 13389 - DNA, 47 bp, synthetic construct
  misc_feature 1..47: note = Description of Artificial Sequence: Synthetic oligonucleotide
  source 1..47: mol_type = other DNA
gttgtgaattgctttcgaaattgtatctttgctgtataagcaacacc

SEQ ID NO: 13390 - DNA, 47 bp, synthetic construct
  misc_feature 1..47: note = Description of Artificial Sequence: Synthetic oligonucleotide
  source 1..47: mol_type = other DNA
gttgtgaattgctttcgaattactatctttgacatataaagcacagc

SEQ ID NO: 13391 - DNA, 46 bp, synthetic construct
  misc_feature 1..46: note = Description of Artificial Sequence: Synthetic oligonucleotide
  source 1..46: mol_type = other DNA
gttgtgaattgctttcgaattgtatctttgaattattgaaaacagc

SEQ ID NO: 13392 - DNA, 47 bp, synthetic construct
  misc_feature 1..47: note = Description of Artificial Sequence: Synthetic oligonucleotide
  source 1..47: mol_type = other DNA
gttgtgaattgctttcgaatttgtatctttgactcagattttacaat

SEQ ID NO: 13393 - DNA, 46 bp, synthetic construct
  misc_feature 1..46: note = Description of Artificial Sequence: Synthetic oligonucleotide
  source 1..46: mol_type = other DNA
gttgtgaattgctttcgatttgtatctttgaaatattgaacacaac

SEQ ID NO: 13394 - DNA, 46 bp, synthetic construct
  misc_feature 1..46: note = Description of Artificial Sequence: Synthetic oligonucleotide
  source 1..46: mol_type = other DNA
gttgtgaattgctttcgttctttcacttattgacctttgtcacagt

SEQ ID NO: 13395 - DNA, 47 bp, synthetic construct
  misc_feature 1..47: note = Description of Artificial Sequence: Synthetic oligonucleotide
  source 1..47: mol_type = other DNA
gttgtgaattgctttcgttctttgacatgtaagagatttgttccgct

SEQ ID NO: 13396 - DNA, 46 bp, synthetic construct
  misc_feature 1..46: note = Description of Artificial Sequence: Synthetic oligonucleotide
  source 1..46: mol_type = other DNA
gttgtgaattgctttcgttctttgtacctttgggtgaatttacagc

SEQ ID NO: 13397 - DNA, 46 bp, synthetic construct
  misc_feature 1..46: note = Description of Artificial Sequence: Synthetic oligonucleotide
  source 1..46: mol_type = other DNA
gttgtgaattgctttcgttctttgtacctttgggttgatttacagc

SEQ ID NO: 13398 - DNA, 46 bp, synthetic construct
  misc_feature 1..46: note = Description of Artificial Sequence: Synthetic oligonucleotide
  source 1..46: mol_type = other DNA
gttgtgaattgctttcgttcttttatctttagagataattcgcagt

SEQ ID NO: 13399 - DNA, 47 bp, synthetic construct
  misc_feature 1..47: note = Description of Artificial Sequence: Synthetic oligonucleotide
  source 1..47: mol_type = other DNA
gttgtgaattgctttcgtttttgtatctttgacttcacggttccaac

SEQ ID NO: 13400 - DNA, 46 bp, synthetic construct
  misc_feature 1..46: note = Description of Artificial Sequence: Synthetic oligonucleotide
  source 1..46: mol_type = other DNA
gttgtgaattgctttctatctttgaattttaaaggtctttgacaac

SEQ ID NO: 13401 - DNA, 46 bp, synthetic construct
  misc_feature 1..46: note = Description of Artificial Sequence: Synthetic oligonucleotide
  source 1..46: mol_type = other DNA
gttgtgaattgctttgatttcagtatttttagtgagcattcacagg

SEQ ID NO: 13402 - DNA, 36 bp, synthetic construct
  misc_feature 1..36: note = Description of Artificial Sequence: Synthetic oligonucleotide
  source 1..36: mol_type = other DNA
gttgtgaattgcttttaaaaaactatctttgacaac

SEQ ID NO: 13403 - DNA, 46 bp, synthetic construct
  misc_feature 1..46: note = Description of Artificial Sequence: Synthetic oligonucleotide
  source 1..46: mol_type = other DNA
gttgtgaattgcttttaaattgtatctttgaccggattcacacatc

SEQ ID NO: 13404 - DNA, 45 bp, synthetic construct
  misc_feature 1..45: note = Description of Artificial Sequence: Synthetic oligonucleotide
  source 1..45: mol_type = other DNA
gttgtgaattgcttttaaatttgtatttttgcggtatctaacaac

SEQ ID NO: 13405 - DNA, 46 bp, synthetic construct
  misc_feature 1..46: note = Description of Artificial Sequence: Synthetic oligonucleotide
  source 1..46: mol_type = other DNA
gttgtgaattgcttttagattgtatctttgaaatattgaacacagc

SEQ ID NO: 13406 - DNA, 46 bp, synthetic construct
  misc_feature 1..46: note = Description of Artificial Sequence: Synthetic oligonucleotide
  source 1..46: mol_type = other DNA
gttgtgaattgcttttagattgtatctttgaaatattgagcacagc

SEQ ID NO: 13407 - DNA, 46 bp, synthetic construct
  misc_feature 1..46: note = Description of Artificial Sequence: Synthetic oligonucleotide
  source 1..46: mol_type = other DNA
gttgtgaattgcttttagattgtatctttgattgaccgaacacaac

SEQ ID NO: 13408 - DNA, 46 bp, synthetic construct
  misc_feature 1..46: note = Description of Artificial Sequence: Synthetic oligonucleotide
  source 1..46: mol_type = other DNA
gttgtgaattgcttttagattgtatctttgattgactgaacacaac

SEQ ID NO: 13409 - DNA, 46 bp, synthetic construct
  misc_feature 1..46: note = Description of Artificial Sequence: Synthetic oligonucleotide
  source 1..46: mol_type = other DNA
gttgtgaattgcttttgaattgtatctttgaaatattgagcacaac

SEQ ID NO: 13410 - DNA, 46 bp, synthetic construct
  misc_feature 1..46: note = Description of Artificial Sequence: Synthetic oligonucleotide
  source 1..46: mol_type = other DNA
gttgtgaattgcttttgaattgtatctttgagagattgagcacaac

SEQ ID NO: 13411 - DNA, 46 bp, synthetic construct
  misc_feature 1..46: note = Description of Artificial Sequence: Synthetic oligonucleotide
  source 1..46: mol_type = other DNA
gttgtgaattgcttttgaattgtatctttgaggtattgaacacaac

SEQ ID NO: 13412 - DNA, 46 bp, synthetic construct
  misc_feature 1..46: note = Description of Artificial Sequence: Synthetic oligonucleotide
  source 1..46: mol_type = other DNA
gttgtgaattggtctcattttgtatctttgacatattgaaaacaac

SEQ ID NO: 13413 - DNA, 36 bp, synthetic construct
  misc_feature 1..36: note = Description of Artificial Sequence: Synthetic oligonucleotide
  source 1..36: mol_type = other DNA
gttgtgaattggtttcaaaatagtatcattctcatt

SEQ ID NO: 13414 - DNA, 47 bp, synthetic construct
  misc_feature 1..47: note = Description of Artificial Sequence: Synthetic oligonucleotide
  source 1..47: mol_type = other DNA
gttgtgaattggtttcaaaattttgtatctttgtggtctgaaacagt

SEQ ID NO: 13415 - DNA, 47 bp, synthetic construct
  misc_feature 1..47: note = Description of Artificial Sequence: Synthetic oligonucleotide
  source 1..47: mol_type = other DNA
gttgtgaattggtttcaaattgtatctttgtcttattgattatcaac

SEQ ID NO: 13416 - DNA, 47 bp, synthetic construct
  misc_feature 1..47: note = Description of Artificial Sequence: Synthetic oligonucleotide
  source 1..47: mol_type = other DNA
gttgtgaattggtttcagattgtatttttattcgttctttacacaac

SEQ ID NO: 13417 - DNA, 47 bp, synthetic construct
  misc_feature 1..47: note = Description of Artificial Sequence: Synthetic oligonucleotide
  source 1..47: mol_type = other DNA
gttgtgaattggtttcatctgagttattttaagggggtattcacaac

SEQ ID NO: 13418 - DNA, 47 bp, synthetic construct
  misc_feature 1..47: note = Description of Artificial Sequence: Synthetic oligonucleotide
  source 1..47: mol_type = other DNA
gttgtgaattggtttcattttaattattttataggaggattcacaac

SEQ ID NO: 13419 - DNA, 47 bp, synthetic construct
  misc_feature 1..47: note = Description of Artificial Sequence: Synthetic oligonucleotide
  source 1..47: mol_type = other DNA
gttgtgaattggtttcattttctaactttgtagagttcttaaacaat

SEQ ID NO: 13420 - DNA, 45 bp, synthetic construct
  misc_feature 1..45: note = Description of Artificial Sequence: Synthetic oligonucleotide
  source 1..45: mol_type = other DNA
gttgtgaattggtttgatttttctaaatttaggattgttcgcaac

SEQ ID NO: 13421 - DNA, 36 bp, synthetic construct
  misc_feature 1..36: note = Description of Artificial Sequence: Synthetic oligonucleotide
  source 1..36: mol_type = other DNA
gttgtgaattgtttcatttacagtatcaatcatatc

SEQ ID NO: 13422 - DNA, 36 bp, synthetic construct
  misc_feature 1..36: note = Description of Artificial Sequence: Synthetic oligonucleotide
  source 1..36: mol_type = other DNA
gttgtgaattgtttccagaatagtattataaacatc

SEQ ID NO: 13423 - DNA, 46 bp, synthetic construct
  misc_feature 1..46: note = Description of Artificial Sequence: Synthetic oligonucleotide
  source 1..46: mol_type = other DNA
gttgtgaattgttttctttctttaatttaacgatatctacgacacc

SEQ ID NO: 13424 - DNA, 47 bp, synthetic construct
  misc_feature 1..47: note = Description of Artificial Sequence: Synthetic oligonucleotide
  source 1..47: mol_type = other DNA
gttgtgactaatccacgaaaatacaaattttgaaagcaattcacaac

SEQ ID NO: 13425 - DNA, 36 bp, synthetic construct
  misc_feature 1..36: note = Description of Artificial Sequence: Synthetic oligonucleotide
  source 1..36: mol_type = other DNA
gttgtgactggctttcaaatcgtattttagtcaaac

SEQ ID NO: 13426 - DNA, 36 bp, synthetic construct
  misc_feature 1..36: note = Description of Artificial Sequence: Synthetic oligonucleotide
  source 1..36: mol_type = other DNA
gttgtgacttgatgcaaaaaactgactaaaaagaac

SEQ ID NO: 13427 - DNA, 36 bp, synthetic construct
  misc_feature 1..36: note = Description of Artificial Sequence: Synthetic oligonucleotide
  source 1..36: mol_type = other DNA
gttgtgacttgcactcaggcacggatcagttataat

SEQ ID NO: 13428 - DNA, 36 bp, synthetic construct
  misc_feature 1..36: note = Description of Artificial Sequence: Synthetic oligonucleotide
  source 1..36: mol_type = other DNA
gttgtgacttgccctcagacgcggatcagctacaat

SEQ ID NO: 13429 - DNA, 36 bp, synthetic construct
  misc_feature 1..36: note = Description of Artificial Sequence: Synthetic oligonucleotide
  source 1..36: mol_type = other DNA
gttgtgacttgccctcagacgcggatcagttacaat

SEQ ID NO: 13430 - DNA, 36 bp, synthetic construct
  misc_feature 1..36: note = Description of Artificial Sequence: Synthetic oligonucleotide
  source 1..36: mol_type = other DNA
gttgtgacttgccctcaggcgcggatcagttacaat

SEQ ID NO: 13431 - DNA, 47 bp, synthetic construct
  misc_feature 1..47: note = Description of Artificial Sequence: Synthetic oligonucleotide
  source 1..47: mol_type = other DNA
gttgtgacttgctctcaaaagttagtacctttggtatctggaacaac

SEQ ID NO: 13432 - DNA, 47 bp, synthetic construct
  misc_feature 1..47: note = Description of Artificial Sequence: Synthetic oligonucleotide
  source 1..47: mol_type = other DNA
gttgtgacttgctctcaaaagtttgtatctttggtttctggaacaac

SEQ ID NO: 13433 - DNA, 36 bp, synthetic construct
  misc_feature 1..36: note = Description of Artificial Sequence: Synthetic oligonucleotide
  source 1..36: mol_type = other DNA
gttgtgacttgctctcaggcacggatcagttataat

SEQ ID NO: 13434 - DNA, 36 bp, synthetic construct
  misc_feature 1..36: note = Description of Artificial Sequence: Synthetic oligonucleotide
  source 1..36: mol_type = other DNA
gttgtgacttgctctcaggcatggattagttacaat

SEQ ID NO: 13435 - DNA, 36 bp, synthetic construct
  misc_feature 1..36: note = Description of Artificial Sequence: Synthetic oligonucleotide
  source 1..36: mol_type = other DNA
gttgtgacttggctttaggcatccgttagatacaat

SEQ ID NO: 13436 - DNA, 47 bp, synthetic construct
  misc_feature 1..47: note = Description of Artificial Sequence: Synthetic oligonucleotide
  source 1..47: mol_type = other DNA
gttgtgagtcgctttcaaattctttaactttgtggatacatcacagc

SEQ ID NO: 13437 - DNA, 47 bp, synthetic construct
  misc_feature 1..47: note = Description of Artificial Sequence: Synthetic oligonucleotide
  source 1..47: mol_type = other DNA
gttgtgagttcctttcaatttggtatatttatcaaagtaattacaac

SEQ ID NO: 13438 - DNA, 47 bp, synthetic construct
  misc_feature 1..47: note = Description of Artificial Sequence: Synthetic oligonucleotide
  source 1..47: mol_type = other DNA
gttgtgagttcctttcacttttagtaattttacgtaagtagttacaa

SEQ ID NO: 13439 - DNA, 36 bp, synthetic construct
  misc_feature 1..36: note = Description of Artificial Sequence: Synthetic oligonucleotide
  source 1..36: mol_type = other DNA
gttgtgagttgccctcaaacccggatatgttataat

SEQ ID NO: 13440 - DNA, 36 bp, synthetic construct
  misc_feature 1..36: note = Description of Artificial Sequence: Synthetic oligonucleotide
  source 1..36: mol_type = other DNA
gttgtgagttgcgacgattctcttatctgctaaact

SEQ ID NO: 13441 - DNA, 46 bp, synthetic construct
  misc_feature 1..46: note = Description of Artificial Sequence: Synthetic oligonucleotide
  source 1..46: mol_type = other DNA
gttgtgagttgctttcaaaattctagtatcttagttctttaacaac

SEQ ID NO: 13442 - DNA, 47 bp, synthetic construct
  misc_feature 1..47: note = Description of Artificial Sequence: Synthetic oligonucleotide
  source 1..47: mol_type = other DNA
gttgtgagttgctttcaaaatttgtatctttgacatcgtgaaacagt

SEQ ID NO: 13443 - DNA, 37 bp, synthetic construct
  misc_feature 1..37: note = Description of Artificial Sequence: Synthetic oligonucleotide
  source 1..37: mol_type = other DNA
gttgtgagttgctttcaaacttcgcgagaacttcaac

SEQ ID NO: 13444 - DNA, 34 bp, synthetic construct
  misc_feature 1..34: note = Description of Artificial Sequence: Synthetic oligonucleotide
  source 1..34: mol_type = other DNA
gttgtgagttgctttcaaattcgtaactttgtga

SEQ ID NO: 13445 - DNA, 45 bp, synthetic construct
  misc_feature 1..45: note = Description of Artificial Sequence: Synthetic oligonucleotide
  source 1..45: mol_type = other DNA
gttgtgagttgctttcaaattcgtaactttgtgacctcaaacaac

SEQ ID NO: 13446 - DNA, 47 bp, synthetic construct
  misc_feature 1..47: note = Description of Artificial Sequence: Synthetic oligonucleotide
  source 1..47: mol_type = other DNA
gttgtgagttgctttcaaattctttaactttgtggatacatcacagc

SEQ ID NO: 13447 - DNA, 36 bp, synthetic construct
  misc_feature 1..36: note = Description of Artificial Sequence: Synthetic oligonucleotide
  source 1..36: mol_type = other DNA
gttgtgagttgctttcaagcataggtctgttataat

SEQ ID NO: 13448 - DNA, 36 bp, synthetic construct
  misc_feature 1..36: note = Description of Artificial Sequence: Synthetic oligonucleotide
  source 1..36: mol_type = other DNA
gttgtgagttgtgcgcagatgtcggtcggttacacc

SEQ ID NO: 13449 - DNA, 47 bp, synthetic construct
  misc_feature 1..47: note = Description of Artificial Sequence: Synthetic oligonucleotide
  source 1..47: mol_type = other DNA
gttgtgataagctttcaattttgtatcttaggtcattgaaatacagc

SEQ ID NO: 13450 - DNA, 47 bp, synthetic construct
  misc_feature 1..47: note = Description of Artificial Sequence: Synthetic oligonucleotide
  source 1..47: mol_type = other DNA
gttgtgataagctttcaattttgtatcttagttccttgaaatacagt

SEQ ID NO: 13451 - DNA, 47 bp, synthetic construct
  misc_feature 1..47: note = Description of Artificial Sequence: Synthetic oligonucleotide
  source 1..47: mol_type = other DNA
gttgtgataagctttcatttttgtatcttagctcattgaagtacaac

SEQ ID NO: 13452 - DNA, 47 bp, synthetic construct
  misc_feature 1..47: note = Description of Artificial Sequence: Synthetic oligonucleotide
  source 1..47: mol_type = other DNA
gttgtgatctgctttcaaattattcggtaacttaggtccgagacaac

SEQ ID NO: 13453 - DNA, 47 bp, synthetic construct
  misc_feature 1..47: note = Description of Artificial Sequence: Synthetic oligonucleotide
  source 1..47: mol_type = other DNA
gttgtgatctgctttcaattctttcctttggtgcaggctgatccaac

SEQ ID NO: 13454 - DNA, 47 bp, synthetic construct
  misc_feature 1..47: note = Description of Artificial Sequence: Synthetic oligonucleotide
  source 1..47: mol_type = other DNA
gttgtgatctgctttcaattttatcggtaacttaggtccgaaacaac

SEQ ID NO: 13455 - DNA, 47 bp, synthetic construct
  misc_feature 1..47: note = Description of Artificial Sequence: Synthetic oligonucleotide
  source 1..47: mol_type = other DNA
gttgtgatgtatccacaaagttaaagaatttgaaagcaactcacaac

SEQ ID NO: 13456 - DNA, 36 bp, synthetic construct
  misc_feature 1..36: note = Description of Artificial Sequence: Synthetic oligonucleotide
  source 1..36: mol_type = other DNA
gttgtgattaaatctcaaattgtattttagtacagc

SEQ ID NO: 13457 - DNA, 47 bp, synthetic construct
  misc_feature 1..47: note = Description of Artificial Sequence: Synthetic oligonucleotide
  source 1..47: mol_type = other DNA
gttgtgattagcaaaaaattgattacctttgcagagacatcaacagc

SEQ ID NO: 13458 - DNA, 47 bp, synthetic construct
  misc_feature 1..47: note = Description of Artificial Sequence: Synthetic oligonucleotide
  source 1..47: mol_type = other DNA
gttgtgattagctaaaaaattagtatcattgcaaaagaagaaacaac

SEQ ID NO: 13459 - DNA, 47 bp, synthetic construct
  misc_feature 1..47: note = Description of Artificial Sequence: Synthetic oligonucleotide
  source 1..47: mol_type = other DNA
gttgtgattagctaaaaaattcgtatctttgcaaccgcatatatatc

SEQ ID NO: 13460 - DNA, 47 bp, synthetic construct
  misc_feature 1..47: note = Description of Artificial Sequence: Synthetic oligonucleotide
  source 1..47: mol_type = other DNA
gttgtgattagctaaaaaatttctatctttgatgcattcaaaacaac

SEQ ID NO: 13461 - DNA, 47 bp, synthetic construct
  misc_feature 1..47: note = Description of Artificial Sequence: Synthetic oligonucleotide
  source 1..47: mol_type = other DNA
gttgtgattagctagaattttcgtacctttgtggtcgaatcaacaac

SEQ ID NO: 13462 - DNA, 36 bp, synthetic construct
  misc_feature 1..36: note = Description of Artificial Sequence: Synthetic oligonucleotide
  source 1..36: mol_type = other DNA
gttgtgattagctctcaaattgtaatttagcacagg

SEQ ID NO: 13463 - DNA, 47 bp, synthetic construct
  misc_feature 1..47: note = Description of Artificial Sequence: Synthetic oligonucleotide
  source 1..47: mol_type = other DNA
gttgtgattagctctcagaatgtatttttatcgtgagaaatcacaag

SEQ ID NO: 13464 - DNA, 47 bp, synthetic construct
  misc_feature 1..47: note = Description of Artificial Sequence: Synthetic oligonucleotide
  source 1..47: mol_type = other DNA
gttgtgattagctgaaattttcttacctttgtaaggtaatcaacaac

SEQ ID NO: 13465 - DNA, 47 bp, synthetic construct
  misc_feature 1..47: note = Description of Artificial Sequence: Synthetic oligonucleotide
  source 1..47: mol_type = other DNA
gttgtgattagctgaatttttcgccccccccaagggtcatcaacaac

SEQ ID NO: 13466 - DNA, 47 bp, synthetic construct
  misc_feature 1..47: note = Description of Artificial Sequence: Synthetic oligonucleotide
  source 1..47: mol_type = other DNA
gttgtgattagcttcaattttggtatctttgggatattaatgacaac

SEQ ID NO: 13467 - DNA, 47 bp, synthetic construct
  misc_feature 1..47: note = Description of Artificial Sequence: Synthetic oligonucleotide
  source 1..47: mol_type = other DNA
gttgtgattagctttaaaattagtatctttgcattatcaaatacaac

SEQ ID NO: 13468 - DNA, 47 bp, synthetic construct
  misc_feature 1..47: note = Description of Artificial Sequence: Synthetic oligonucleotide
  source 1..47: mol_type = other DNA
gttgtgattagctttcaaaagtttacctttgctctagcaacagcaac

SEQ ID NO: 13469 - DNA, 47 bp, synthetic construct
  misc_feature 1..47: note = Description of Artificial Sequence: Synthetic oligonucleotide
  source 1..47: mol_type = other DNA
gttgtgattagctttcaaaatgtatctttagtgtggttagtcacagg

SEQ ID NO: 13470 - DNA, 47 bp, synthetic construct
  misc_feature 1..47: note = Description of Artificial Sequence: Synthetic oligonucleotide
  source 1..47: mol_type = other DNA
gttgtgattagctttcaaaatgtatttttactgtggtgaatcacaag

SEQ ID NO: 13471 - DNA, 47 bp, synthetic construct
  misc_feature 1..47: note = Description of Artificial Sequence: Synthetic oligonucleotide
  source 1..47: mol_type = other DNA
gttgtgattagctttcaaactgttatcttagtgtggtgaatcacagc

SEQ ID NO: 13472 - DNA, 47 bp, synthetic construct
  misc_feature 1..47: note = Description of Artificial Sequence: Synthetic oligonucleotide
  source 1..47: mol_type = other DNA
gttgtgattagctttcaattcagaaccttcgtaatagctagtacaac

SEQ ID NO: 13473 - DNA, 47 bp, synthetic construct
  misc_feature 1..47: note = Description of Artificial Sequence: Synthetic oligonucleotide
  source 1..47: mol_type = other DNA
gttgtgattagctttcaattcagtaccttcataatagctagtacaac

SEQ ID NO: 13474 - DNA, 47 bp, synthetic construct
  misc_feature 1..47: note = Description of Artificial Sequence: Synthetic oligonucleotide
  source 1..47: mol_type = other DNA
gttgtgattagctttcaattcagtaccttcgtaatagctagtacaac

SEQ ID NO: 13475 - DNA, 46 bp, synthetic construct
  misc_feature 1..46: note = Description of Artificial Sequence: Synthetic oligonucleotide
  source 1..46: mol_type = other DNA
gttgtgattagctttcaattcagtaccttcgtatcgctaatgcaac

SEQ ID NO: 13476 - DNA, 47 bp, synthetic construct
  misc_feature 1..47: note = Description of Artificial Sequence: Synthetic oligonucleotide
  source 1..47: mol_type = other DNA
gttgtgattagctttcaatttcgtatctttgacataattataacagc

SEQ ID NO: 13477 - DNA, 47 bp, synthetic construct
  misc_feature 1..47: note = Description of Artificial Sequence: Synthetic oligonucleotide
  source 1..47: mol_type = other DNA
gttgtgattagctttcaatttgtatctttgatgtggtgaatcacaat

SEQ ID NO: 13478 - DNA, 27 bp, synthetic construct
  misc_feature 1..27: note = Description of Artificial Sequence: Synthetic oligonucleotide
  source 1..27: mol_type = other DNA
gttgtgattagctttcagattccgtac

SEQ ID NO: 13479 - DNA, 32 bp, synthetic construct
  misc_feature 1..32: note = Description of Artificial Sequence: Synthetic oligonucleotide
  source 1..32: mol_type = other DNA
gttgtgattagctttcagattccgtaccttca

SEQ ID NO: 13480 - DNA, 46 bp, synthetic construct
  misc_feature 1..46: note = Description of Artificial Sequence: Synthetic oligonucleotide
  source 1..46: mol_type = other DNA
gttgtgattagctttcattttgtatttttgtgtgatcaatcacagc

SEQ ID NO: 13481 - DNA, 46 bp, synthetic construct
  misc_feature 1..46: note = Description of Artificial Sequence: Synthetic oligonucleotide
  source 1..46: mol_type = other DNA
gttgtgattagctttcgttttgtatctttgacatattggtcgcagc

SEQ ID NO: 13482 - DNA, 47 bp, synthetic construct
  misc_feature 1..47: note = Description of Artificial Sequence: Synthetic oligonucleotide
  source 1..47: mol_type = other DNA
gttgtgattagcttttaaattgtatctttgcagtggttattcacagg

SEQ ID NO: 13483 - DNA, 47 bp, synthetic construct
  misc_feature 1..47: note = Description of Artificial Sequence: Synthetic oligonucleotide
  source 1..47: mol_type = other DNA
gttgtgattagcttttaaattgtatctttgttgtggttattcacagg

SEQ ID NO: 13484 - DNA, 47 bp, synthetic construct
  misc_feature 1..47: note = Description of Artificial Sequence: Synthetic oligonucleotide
  source 1..47: mol_type = other DNA
gttgtgattcatccgcaaagataaagaatttgaaagttactcacaac

SEQ ID NO: 13485 - DNA, 47 bp, synthetic construct
  misc_feature 1..47: note = Description of Artificial Sequence: Synthetic oligonucleotide
  source 1..47: mol_type = other DNA
gttgtgattcgcaaaaaaaatgtatctttgaacgctctttaaacaac

SEQ ID NO: 13486 - DNA, 46 bp, synthetic construct
  misc_feature 1..46: note = Description of Artificial Sequence: Synthetic oligonucleotide
  source 1..46: mol_type = other DNA
gttgtgattcgctaaaaaattgtatctttgcaagttcttaaacatc

SEQ ID NO: 13487 - DNA, 47 bp, synthetic construct
  misc_feature 1..47: note = Description of Artificial Sequence: Synthetic oligonucleotide
  source 1..47: mol_type = other DNA
gttgtgattcgctctcaaatttgtatctttgacttattaaatacagc

SEQ ID NO: 13488 - DNA, 47 bp, synthetic construct
  misc_feature 1..47: note = Description of Artificial Sequence: Synthetic oligonucleotide
  source 1..47: mol_type = other DNA
gttgtgattcgctttcaaaaaaggaactttgatatatttgcaacaac

SEQ ID NO: 13489 - DNA, 47 bp, synthetic construct
  misc_feature 1..47: note = Description of Artificial Sequence: Synthetic oligonucleotide
  source 1..47: mol_type = other DNA
gttgtgattcgctttcaaaattgtacctttgacatatctgaaacagt

SEQ ID NO: 13490 - DNA, 47 bp, synthetic construct
  misc_feature 1..47: note = Description of Artificial Sequence: Synthetic oligonucleotide
  source 1..47: mol_type = other DNA
gttgtgattcgctttcaaaattgtatttttaccagagcattaacagc

SEQ ID NO: 13491 - DNA, 47 bp, synthetic construct
  misc_feature 1..47: note = Description of Artificial Sequence: Synthetic oligonucleotide
  source 1..47: mol_type = other DNA
gttgtgattcgctttcaaattagtacatttgcaccattaaaaacagc

SEQ ID NO: 13492 - DNA, 46 bp, synthetic construct
  misc_feature 1..46: note = Description of Artificial Sequence: Synthetic oligonucleotide
  source 1..46: mol_type = other DNA
gttgtgattcgctttcaaattgtatctttgacataacagcttcaag

SEQ ID NO: 13493 - DNA, 36 bp, synthetic construct
  misc_feature 1..36: note = Description of Artificial Sequence: Synthetic oligonucleotide
  source 1..36: mol_type = other DNA
gttgtgattcgctttcaaattgtattttagtacagc

SEQ ID NO: 13494 - DNA, 47 bp, synthetic construct
  misc_feature 1..47: note = Description of Artificial Sequence: Synthetic oligonucleotide
  source 1..47: mol_type = other DNA
gttgtgattcgctttcaaatttgtatctttgacatattaaatacagc

SEQ ID NO: 13495 - DNA, 47 bp, synthetic construct
  misc_feature 1..47: note = Description of Artificial Sequence: Synthetic oligonucleotide
  source 1..47: mol_type = other DNA
gttgtgattcgctttcaatttgtatttttaggagcgtaagcgacaac

SEQ ID NO: 13496 - DNA, 47 bp, synthetic construct
  misc_feature 1..47: note = Description of Artificial Sequence: Synthetic oligonucleotide
  source 1..47: mol_type = other DNA
gttgtgattgataagaacgaagttacaatatgaaagcaattcacaac

SEQ ID NO: 13497 - DNA, 36 bp, synthetic construct
  misc_feature 1..36: note = Description of Artificial Sequence: Synthetic oligonucleotide
  source 1..36: mol_type = other DNA
gttgtgattggcggacaggcattaatcagttacaat

SEQ ID NO: 13498 - DNA, 47 bp, synthetic construct
  misc_feature 1..47: note = Description of Artificial Sequence: Synthetic oligonucleotide
  source 1..47: mol_type = other DNA
gttgtgattggctctcaaaagtttgtacctttggtatctggaacaac

SEQ ID NO: 13499 - DNA, 31 bp, synthetic construct
  misc_feature 1..31: note = Description of Artificial Sequence: Synthetic oligonucleotide
  source 1..31: mol_type = other DNA
gttgtgattggcttcccgtttatgtactttc

SEQ ID NO: 13500 - DNA, 47 bp, synthetic construct
  misc_feature 1..47: note = Description of Artificial Sequence: Synthetic oligonucleotide
  source 1..47: mol_type = other DNA
gttgtgatttactttcaatttagtatctttgaaccattgagtacagc

SEQ ID NO: 13501 - DNA, 47 bp, synthetic construct
  misc_feature 1..47: note = Description of Artificial Sequence: Synthetic oligonucleotide
  source 1..47: mol_type = other DNA
gttgtgatttcctttcaaatttgtatctttgaccaattgaaaacaat

SEQ ID NO: 13502 - DNA, 46 bp, synthetic construct
  misc_feature 1..46: note = Description of Artificial Sequence: Synthetic oligonucleotide
  source 1..46: mol_type = other DNA
gttgtgatttcctttcattttgtatctttgacatattaattacagc

SEQ ID NO: 13503 - DNA, 36 bp, synthetic construct
  misc_feature 1..36: note = Description of Artificial Sequence: Synthetic oligonucleotide
  source 1..36: mol_type = other DNA
gttgtgatttgaataggatttattatttttgacaac

SEQ ID NO: 13504 - DNA, 36 bp, synthetic construct
  misc_feature 1..36: note = Description of Artificial Sequence: Synthetic oligonucleotide
  source 1..36: mol_type = other DNA
gttgtgatttgatcaggaattggaatgatattcaac

SEQ ID NO: 13505 - DNA, 36 bp, synthetic construct
  misc_feature 1..36: note = Description of Artificial Sequence: Synthetic oligonucleotide
  source 1..36: mol_type = other DNA
gttgtgatttgatgcactctttttagtttcaacaat

SEQ ID NO: 13506 - DNA, 36 bp, synthetic construct
  misc_feature 1..36: note = Description of Artificial Sequence: Synthetic oligonucleotide
  source 1..36: mol_type = other DNA
gttgtgatttgatgcactttggatttgtcttgcaat

SEQ ID NO: 13507 - DNA, 36 bp, synthetic construct
  misc_feature 1..36: note = Description of Artificial Sequence: Synthetic oligonucleotide
  source 1..36: mol_type = other DNA
gttgtgatttgatgcgatttggatttgtgcttcact

SEQ ID NO: 13508 - DNA, 36 bp, synthetic construct
  misc_feature 1..36: note = Description of Artificial Sequence: Synthetic oligonucleotide
  source 1..36: mol_type = other DNA
gttgtgatttgatgctattttgatttggggttcaat

SEQ ID NO: 13509 - DNA, 36 bp, synthetic construct
  misc_feature 1..36: note = Description of Artificial Sequence: Synthetic oligonucleotide
  source 1..36: mol_type = other DNA
gttgtgatttgatgctctttgaaattggttttcagt

SEQ ID NO: 13510 - DNA, 36 bp, synthetic construct
  misc_feature 1..36: note = Description of Artificial Sequence: Synthetic oligonucleotide
  source 1..36: mol_type = other DNA
gttgtgatttgatgctctttgaaattgtctttcagt

SEQ ID NO: 13511 - DNA, 36 bp, synthetic construct
  misc_feature 1..36: note = Description of Artificial Sequence: Synthetic oligonucleotide
  source 1..36: mol_type = other DNA
gttgtgatttgatgctctttgagaatcgggaacagt

SEQ ID NO: 13512 - DNA, 36 bp, synthetic construct
  misc_feature 1..36: note = Description of Artificial Sequence: Synthetic oligonucleotide
  source 1..36: mol_type = other DNA
gttgtgatttgatgctctttgctacagtgttccatt

SEQ ID NO: 13513 - DNA, 36 bp, synthetic construct
  misc_feature 1..36: note = Description of Artificial Sequence: Synthetic oligonucleotide
  source 1..36: mol_type = other DNA
gttgtgatttgatgctcttttgaaatgtgaaacagt

SEQ ID NO: 13514 - DNA, 36 bp, synthetic construct
  misc_feature 1..36: note = Description of Artificial Sequence: Synthetic oligonucleotide
  source 1..36: mol_type = other DNA
gttgtgatttgatgcttatttgatttgaggaacaat

SEQ ID NO: 13515 - DNA, 36 bp, synthetic construct
  misc_feature 1..36: note = Description of Artificial Sequence: Synthetic oligonucleotide
  source 1..36: mol_type = other DNA
gttgtgatttgatgcttttcaatatggtgtgacatt

SEQ ID NO: 13516 - DNA, 36 bp, synthetic construct
  misc_feature 1..36: note = Description of Artificial Sequence: Synthetic oligonucleotide
  source 1..36: mol_type = other DNA
gttgtgatttgatgtagaaattgaatactatacaac

SEQ ID NO: 13517 - DNA, 36 bp, synthetic construct
  misc_feature 1..36: note = Description of Artificial Sequence: Synthetic oligonucleotide
  source 1..36: mol_type = other DNA
gttgtgatttgatgtagaagaagcataaggaacaac

SEQ ID NO: 13518 - DNA, 36 bp, synthetic construct
  misc_feature 1..36: note = Description of Artificial Sequence: Synthetic oligonucleotide
  source 1..36: mol_type = other DNA
gttgtgatttgatgttattgtgaggtgtgctatatt

SEQ ID NO: 13519 - DNA, 36 bp, synthetic construct
  misc_feature 1..36: note = Description of Artificial Sequence: Synthetic oligonucleotide
  source 1..36: mol_type = other DNA
gttgtgatttgatgttctttgagaatcggaaacagt

SEQ ID NO: 13520 - DNA, 36 bp, synthetic construct
  misc_feature 1..36: note = Description of Artificial Sequence: Synthetic oligonucleotide
  source 1..36: mol_type = other DNA
gttgtgatttgatgttctttgagaatttgttatact

SEQ ID NO: 13521 - DNA, 36 bp, synthetic construct
  misc_feature 1..36: note = Description of Artificial Sequence: Synthetic oligonucleotide
  source 1..36: mol_type = other DNA
gttgtgatttgatgttctttggagattcagtacact

SEQ ID NO: 13522 - DNA, 36 bp, synthetic construct
  misc_feature 1..36: note = Description of Artificial Sequence: Synthetic oligonucleotide
  source 1..36: mol_type = other DNA
gttgtgatttgattaggaattgaagtctaagacatt

SEQ ID NO: 13523 - DNA, 36 bp, synthetic construct
  misc_feature 1..36: note = Description of Artificial Sequence: Synthetic oligonucleotide
  source 1..36: mol_type = other DNA
gttgtgatttgattgggatttaaaatgaaacgcagt

SEQ ID NO: 13524 - DNA, 36 bp, synthetic construct
  misc_feature 1..36: note = Description of Artificial Sequence: Synthetic oligonucleotide
  source 1..36: mol_type = other DNA
gttgtgatttgatttcaaaggtagagtttcgacagt

SEQ ID NO: 13525 - DNA, 47 bp, synthetic construct
  misc_feature 1..47: note = Description of Artificial Sequence: Synthetic oligonucleotide
  source 1..47: mol_type = other DNA
gttgtgatttgatttcgttctttgaaaaaaatgtggtacttttgacc

SEQ ID NO: 13526 - DNA, 36 bp, synthetic construct
  misc_feature 1..36: note = Description of Artificial Sequence: Synthetic oligonucleotide
  source 1..36: mol_type = other DNA
gttgtgatttgattttttagagaggtgtgctatatt

SEQ ID NO: 13527 - DNA, 47 bp, synthetic construct
  misc_feature 1..47: note = Description of Artificial Sequence: Synthetic oligonucleotide
  source 1..47: mol_type = other DNA
gttgtgatttgcagaaaaattagtatctttgcgtattcgcatacatc

SEQ ID NO: 13528 - DNA, 36 bp, synthetic construct
  misc_feature 1..36: note = Description of Artificial Sequence: Synthetic oligonucleotide
  source 1..36: mol_type = other DNA
gttgtgatttgcagatagaccttagtcggttacact

SEQ ID NO: 13529 - DNA, 36 bp, synthetic construct
  misc_feature 1..36: note = Description of Artificial Sequence: Synthetic oligonucleotide
  source 1..36: mol_type = other DNA
gttgtgatttgcagatagaccttagtcggttacagt

SEQ ID NO: 13530 - DNA, 36 bp, synthetic construct
  misc_feature 1..36: note = Description of Artificial Sequence: Synthetic oligonucleotide
  source 1..36: mol_type = other DNA
gttgtgatttgcagatagatcttagtcggttacagt

SEQ ID NO: 13531 - DNA, 36 bp, synthetic construct
  misc_feature 1..36: note = Description of Artificial Sequence: Synthetic oligonucleotide
  source 1..36: mol_type = other DNA
gttgtgatttgcagataggccttggttggttacact

SEQ ID NO: 13532 - DNA, 36 bp, synthetic construct
  misc_feature 1..36: note = Description of Artificial Sequence: Synthetic oligonucleotide
  source 1..36: mol_type = other DNA
gttgtgatttgcggataaaccttagtcggttacact

SEQ ID NO: 13533 - DNA, 36 bp, synthetic construct
  misc_feature 1..36: note = Description of Artificial Sequence: Synthetic oligonucleotide
  source 1..36: mol_type = other DNA
gttgtgatttgcggatagaccttagtcggttacact

SEQ ID NO: 13534 - DNA, 36 bp, synthetic construct
  misc_feature 1..36: note = Description of Artificial Sequence: Synthetic oligonucleotide
  source 1..36: mol_type = other DNA
gttgtgatttgcggttaggctatagttggttacact

SEQ ID NO: 13535 - DNA, 36 bp, synthetic construct
  misc_feature 1..36: note = Description of Artificial Sequence: Synthetic oligonucleotide
  source 1..36: mol_type = other DNA
gttgtgatttgcgtttaggcgatagtcggttacaat

SEQ ID NO: 13536 - DNA, 47 bp, synthetic construct
  misc_feature 1..47: note = Description of Artificial Sequence: Synthetic oligonucleotide
  source 1..47: mol_type = other DNA
gttgtgatttgctaaaaaaatagtatctttgcagtggcagaaacatc

SEQ ID NO: 13537 - DNA, 47 bp, synthetic construct
  misc_feature 1..47: note = Description of Artificial Sequence: Synthetic oligonucleotide
  source 1..47: mol_type = other DNA
gttgtgatttgctaaaaaattaatacctttgcacctgcatatacaac

SEQ ID NO: 13538 - DNA, 47 bp, synthetic construct
  misc_feature 1..47: note = Description of Artificial Sequence: Synthetic oligonucleotide
  source 1..47: mol_type = other DNA
gttgtgatttgctaaaaaattagtacctttgaaccgacaaagacaac

SEQ ID NO: 13539 - DNA, 47 bp, synthetic construct
  misc_feature 1..47: note = Description of Artificial Sequence: Synthetic oligonucleotide
  source 1..47: mol_type = other DNA
gttgtgatttgctaaaaaattagtacctttgcacctgcataaacaac

SEQ ID NO: 13540 - DNA, 47 bp, synthetic construct
  misc_feature 1..47: note = Description of Artificial Sequence: Synthetic oligonucleotide
  source 1..47: mol_type = other DNA
gttgtgatttgctaaaaaattagtacctttgcagtagcattaacatc

SEQ ID NO: 13541 - DNA, 47 bp, synthetic construct
  misc_feature 1..47: note = Description of Artificial Sequence: Synthetic oligonucleotide
  source 1..47: mol_type = other DNA
gttgtgatttgctaaaaaattagtacctttgcagtggcataaacatc

SEQ ID NO: 13542 - DNA, 47 bp, synthetic construct
  misc_feature 1..47: note = Description of Artificial Sequence: Synthetic oligonucleotide
  source 1..47: mol_type = other DNA
gttgtgatttgctaaaaaattagtatctttgcaccagcatacacatc

SEQ ID NO: 13543 - DNA, 47 bp, synthetic construct
  misc_feature 1..47: note = Description of Artificial Sequence: Synthetic oligonucleotide
  source 1..47: mol_type = other DNA
gttgtgatttgctaaaaaattagtatctttgcacctgcataaacaac

SEQ ID NO: 13544 - DNA, 47 bp, synthetic construct
  misc_feature 1..47: note = Description of Artificial Sequence: Synthetic oligonucleotide
  source 1..47: mol_type = other DNA
gttgtgatttgctaaaaaattagtatctttgcacctgcatagacaac

SEQ ID NO: 13545 - DNA, 47 bp, synthetic construct
  misc_feature 1..47: note = Description of Artificial Sequence: Synthetic oligonucleotide
  source 1..47: mol_type = other DNA
gttgtgatttgctaaaaaattagtatctttgcagtggcagaaacaac

SEQ ID NO: 13546 - DNA, 47 bp, synthetic construct
  misc_feature 1..47: note = Description of Artificial Sequence: Synthetic oligonucleotide
  source 1..47: mol_type = other DNA
gttgtgatttgctaaaaaattagtatctttgcatcagcactaacaac

SEQ ID NO: 13547 - DNA, 47 bp, synthetic construct
  misc_feature 1..47: note = Description of Artificial Sequence: Synthetic oligonucleotide
  source 1..47: mol_type = other DNA
gttgtgatttgctaaaaatttagtacctttgcagtggcataaacatc

SEQ ID NO: 13548 - DNA, 47 bp, synthetic construct
  misc_feature 1..47: note = Description of Artificial Sequence: Synthetic oligonucleotide
  source 1..47: mol_type = other DNA
gttgtgatttgctaacaattttctacctttgaatggataatcacaat

SEQ ID NO: 13549 - DNA, 46 bp, synthetic construct
  misc_feature 1..46: note = Description of Artificial Sequence: Synthetic oligonucleotide
  source 1..46: mol_type = other DNA
gttgtgatttgctatcaatctttaaattcgttcttacaatcacact

SEQ ID NO: 13550 - DNA, 47 bp, synthetic construct
  misc_feature 1..47: note = Description of Artificial Sequence: Synthetic oligonucleotide
  source 1..47: mol_type = other DNA
gttgtgatttgctcaaaattcactacctttgcagtagaatcaccaac

SEQ ID NO: 13551 - DNA, 47 bp, synthetic construct
  misc_feature 1..47: note = Description of Artificial Sequence: Synthetic oligonucleotide
  source 1..47: mol_type = other DNA
gttgtgatttgctctcaaattagtatctttgcaataccagaaacatc

SEQ ID NO: 13552 - DNA, 47 bp, synthetic construct
  misc_feature 1..47: note = Description of Artificial Sequence: Synthetic oligonucleotide
  source 1..47: mol_type = other DNA
gttgtgatttgctctcaaattcgtaccttggaaccgaagcaaacaac

SEQ ID NO: 13553 - DNA, 47 bp, synthetic construct
  misc_feature 1..47: note = Description of Artificial Sequence: Synthetic oligonucleotide
  source 1..47: mol_type = other DNA
gttgtgatttgctctcaaattgtatctttactgagtccgatcacagg

SEQ ID NO: 13554 - DNA, 46 bp, synthetic construct
  misc_feature 1..46: note = Description of Artificial Sequence: Synthetic oligonucleotide
  source 1..46: mol_type = other DNA
gttgtgatttgctctcaactttcctgtaccttctttcttacacagc

SEQ ID NO: 13555 - DNA, 47 bp, synthetic construct
  misc_feature 1..47: note = Description of Artificial Sequence: Synthetic oligonucleotide
  source 1..47: mol_type = other DNA
gttgtgatttgctctcattttagtacctttgtaatataggaaacagc

SEQ ID NO: 13556 - DNA, 47 bp, synthetic construct
  misc_feature 1..47: note = Description of Artificial Sequence: Synthetic oligonucleotide
  source 1..47: mol_type = other DNA
gttgtgatttgctgaaaaattagtacctttgcacccgcatatacaac

SEQ ID NO: 13557 - DNA, 47 bp, synthetic construct
  misc_feature 1..47: note = Description of Artificial Sequence: Synthetic oligonucleotide
  source 1..47: mol_type = other DNA
gttgtgatttgctgaaaaattagtatctttgcattgtcacagacatc

SEQ ID NO: 13558 - DNA, 47 bp, synthetic construct
  misc_feature 1..47: note = Description of Artificial Sequence: Synthetic oligonucleotide
  source 1..47: mol_type = other DNA
gttgtgatttgctgtcaatcttgtatctttgaaatagttgaaacacc

SEQ ID NO: 13559 - DNA, 47 bp, synthetic construct
  misc_feature 1..47: note = Description of Artificial Sequence: Synthetic oligonucleotide
  source 1..47: mol_type = other DNA
gttgtgatttgcttaaaaatcagtacttttgaatcgtcataaacaac

SEQ ID NO: 13560 - DNA, 38 bp, synthetic construct
  misc_feature 1..38: note = Description of Artificial Sequence: Synthetic oligonucleotide
  source 1..38: mol_type = other DNA
gttgtgatttgcttaaaaattagtacctttgcaatagc

SEQ ID NO: 13561 - DNA, 47 bp, synthetic construct
  misc_feature 1..47: note = Description of Artificial Sequence: Synthetic oligonucleotide
  source 1..47: mol_type = other DNA
gttgtgatttgcttaaaaattcgtatatttgcatagagacaaacatc

SEQ ID NO: 13562 - DNA, 47 bp, synthetic construct
  misc_feature 1..47: note = Description of Artificial Sequence: Synthetic oligonucleotide
  source 1..47: mol_type = other DNA
gttgtgatttgcttaaaatttcgtatctttgcagagtgataaacacc

SEQ ID NO: 13563 - DNA, 46 bp, synthetic construct
  misc_feature 1..46: note = Description of Artificial Sequence: Synthetic oligonucleotide
  source 1..46: mol_type = other DNA
gttgtgatttgcttaagaactttgaaatattgatatttgcaacaac

SEQ ID NO: 13564 - DNA, 46 bp, synthetic construct
  misc_feature 1..46: note = Description of Artificial Sequence: Synthetic oligonucleotide
  source 1..46: mol_type = other DNA
gttgtgatttgcttacaaacagttctttgaagatattgagtttacc

SEQ ID NO: 13565 - DNA, 47 bp, synthetic construct
  misc_feature 1..47: note = Description of Artificial Sequence: Synthetic oligonucleotide
  source 1..47: mol_type = other DNA
gttgtgatttgcttacaaattagtatctttgaactattgaatacaac

SEQ ID NO: 13566 - DNA, 47 bp, synthetic construct
  misc_feature 1..47: note = Description of Artificial Sequence: Synthetic oligonucleotide
  source 1..47: mol_type = other DNA
gttgtgatttgcttacaatttctttcttacctttggtaatacacaac

SEQ ID NO: 13567 - DNA, 47 bp, synthetic construct
  misc_feature 1..47: note = Description of Artificial Sequence: Synthetic oligonucleotide
  source 1..47: mol_type = other DNA
gttgtgatttgcttacaattttgtacttttgagaggttcttttcagt

SEQ ID NO: 13568 - DNA, 47 bp, synthetic construct
  misc_feature 1..47: note = Description of Artificial Sequence: Synthetic oligonucleotide
  source 1..47: mol_type = other DNA
gttgtgatttgcttacagttcttatctttgatgtggtcataaacaat

SEQ ID NO: 13569 - DNA, 47 bp, synthetic construct
  misc_feature 1..47: note = Description of Artificial Sequence: Synthetic oligonucleotide
  source 1..47: mol_type = other DNA
gttgtgatttgcttacatttttgtatctttgataggttcttttcagc

SEQ ID NO: 13570 - DNA, 47 bp, synthetic construct
  misc_feature 1..47: note = Description of Artificial Sequence: Synthetic oligonucleotide
  source 1..47: mol_type = other DNA
gttgtgatttgcttcaaaaagtgtatctttgcagtaacacaaacaac

SEQ ID NO: 13571 - DNA, 47 bp, synthetic construct
  misc_feature 1..47: note = Description of Artificial Sequence: Synthetic oligonucleotide
  source 1..47: mol_type = other DNA
gttgtgatttgcttccaaatgtatatctttgcaatatcataagcaac

SEQ ID NO: 13572 - DNA, 47 bp, synthetic construct
  misc_feature 1..47: note = Description of Artificial Sequence: Synthetic oligonucleotide
  source 1..47: mol_type = other DNA
gttgtgatttgcttgaaaaatcgtacttttgcagtatcgcaaacaac

SEQ ID NO: 13573 - DNA, 47 bp, synthetic construct
  misc_feature 1..47: note = Description of Artificial Sequence: Synthetic oligonucleotide
  source 1..47: mol_type = other DNA
gttgtgatttgcttgaaaactcgtacatttgcagtatcgcaaacagc

SEQ ID NO: 13574 - DNA, 47 bp, synthetic construct
  misc_feature 1..47: note = Description of Artificial Sequence: Synthetic oligonucleotide
  source 1..47: mol_type = other DNA
gttgtgatttgcttgaaaactcgtacttttgcagtatcgcaaacaac

SEQ ID NO: 13575 - DNA, 47 bp, synthetic construct
  misc_feature 1..47: note = Description of Artificial Sequence: Synthetic oligonucleotide
  source 1..47: mol_type = other DNA
gttgtgatttgcttgaaaatacgtacctttgtggtagcaacaacaac

SEQ ID NO: 13576 - DNA, 47 bp, synthetic construct
  misc_feature 1..47: note = Description of Artificial Sequence: Synthetic oligonucleotide
  source 1..47: mol_type = other DNA
gttgtgatttgcttgaaaatatctatctttgtggtatcaacaacaac

SEQ ID NO: 13577 - DNA, 47 bp, synthetic construct
  misc_feature 1..47: note = Description of Artificial Sequence: Synthetic oligonucleotide
  source 1..47: mol_type = other DNA
gttgtgatttgcttgaaaatcagtacctttgtggtatctaaaacaac

SEQ ID NO: 13578 - DNA, 47 bp, synthetic construct
  misc_feature 1..47: note = Description of Artificial Sequence: Synthetic oligonucleotide
  source 1..47: mol_type = other DNA
gttgtgatttgcttgaaaatctgtacctttgtggtatctaaaacaac

SEQ ID NO: 13579 - DNA, 47 bp, synthetic construct
  misc_feature 1..47: note = Description of Artificial Sequence: Synthetic oligonucleotide
  source 1..47: mol_type = other DNA
gttgtgatttgcttgaaaattattatctttgtactataatcaacaac

SEQ ID NO: 13580 - DNA, 47 bp, synthetic construct
  misc_feature 1..47: note = Description of Artificial Sequence: Synthetic oligonucleotide
  source 1..47: mol_type = other DNA
gttgtgatttgcttgaaaatttgtacctttgcggtagcaacaacaac

SEQ ID NO: 13581 - DNA, 47 bp, synthetic construct
  misc_feature 1..47: note = Description of Artificial Sequence: Synthetic oligonucleotide
  source 1..47: mol_type = other DNA
gttgtgatttgcttgaattttaatacctttgcactataagcaacaac

SEQ ID NO: 13582 - DNA, 47 bp, synthetic construct
  misc_feature 1..47: note = Description of Artificial Sequence: Synthetic oligonucleotide
  source 1..47: mol_type = other DNA
gttgtgatttgcttgaattttaatacctttgtactataagcaacaac

SEQ ID NO: 13583 - DNA, 47 bp, synthetic construct
  misc_feature 1..47: note = Description of Artificial Sequence: Synthetic oligonucleotide
  source 1..47: mol_type = other DNA
gttgtgatttgcttgcagaatgtatctttgatgtgttgaattacaac

SEQ ID NO: 13584 - DNA, 47 bp, synthetic construct
  misc_feature 1..47: note = Description of Artificial Sequence: Synthetic oligonucleotide
  source 1..47: mol_type = other DNA
gttgtgatttgctttaaaaatagtatatttgcactatcacaaacaac

SEQ ID NO: 13585 - DNA, 47 bp, synthetic construct
  misc_feature 1..47: note = Description of Artificial Sequence: Synthetic oligonucleotide
  source 1..47: mol_type = other DNA
gttgtgatttgctttaaaattagtatctttgcaatattggaaacatc

SEQ ID NO: 13586 - DNA, 47 bp, synthetic construct
  misc_feature 1..47: note = Description of Artificial Sequence: Synthetic oligonucleotide
  source 1..47: mol_type = other DNA
gttgtgatttgctttaaaattcctatctttgcagagtaacaaacatc

SEQ ID NO: 13587 - DNA, 47 bp, synthetic construct
  misc_feature 1..47: note = Description of Artificial Sequence: Synthetic oligonucleotide
  source 1..47: mol_type = other DNA
gttgtgatttgctttaaaattcgtatctttatgccaagacaaacatc

SEQ ID NO: 13588 - DNA, 47 bp, synthetic construct
  misc_feature 1..47: note = Description of Artificial Sequence: Synthetic oligonucleotide
  source 1..47: mol_type = other DNA
gttgtgatttgctttaaaattcgtatctttgcgcttagacaaacatc

SEQ ID NO: 13589 - DNA, 47 bp, synthetic construct
  misc_feature 1..47: note = Description of Artificial Sequence: Synthetic oligonucleotide
  source 1..47: mol_type = other DNA
gttgtgatttgctttaaaattcgtatctttgtggtgacaaatgcacc

SEQ ID NO: 13590 - DNA, 47 bp, synthetic construct
  misc_feature 1..47: note = Description of Artificial Sequence: Synthetic oligonucleotide
  source 1..47: mol_type = other DNA
gttgtgatttgctttaaaattcttatctttgcatagtaacaaacatc

SEQ ID NO: 13591 - DNA, 47 bp, synthetic construct
  misc_feature 1..47: note = Description of Artificial Sequence: Synthetic oligonucleotide
  source 1..47: mol_type = other DNA
gttgtgatttgctttaaaattcttatctttgcatagtgacaaacatc

SEQ ID NO: 13592 - DNA, 47 bp, synthetic construct
  misc_feature 1..47: note = Description of Artificial Sequence: Synthetic oligonucleotide
  source 1..47: mol_type = other DNA
gttgtgatttgctttaaaattcttatctttgcgctaagacaaacatc

SEQ ID NO: 13593 - DNA, 46 bp, synthetic construct
  misc_feature 1..46: note = Description of Artificial Sequence: Synthetic oligonucleotide
  source 1..46: mol_type = other DNA
gttgtgatttgctttaaattcgtatctttgacatcttataaacaac

SEQ ID NO: 13594 - DNA, 46 bp, synthetic construct
  misc_feature 1..46: note = Description of Artificial Sequence: Synthetic oligonucleotide
  source 1..46: mol_type = other DNA
gttgtgatttgctttagttcttacatttgatgatatttgcaacagc

SEQ ID NO: 13595 - DNA, 47 bp, synthetic construct
  misc_feature 1..47: note = Description of Artificial Sequence: Synthetic oligonucleotide
  source 1..47: mol_type = other DNA
gttgtgatttgctttcaaaaaattgtatctttgacttgataaacaac

SEQ ID NO: 13596 - DNA, 47 bp, synthetic construct
  misc_feature 1..47: note = Description of Artificial Sequence: Synthetic oligonucleotide
  source 1..47: mol_type = other DNA
gttgtgatttgctttcaaaaaattgtatctttgatattataaacacc

SEQ ID NO: 13597 - DNA, 46 bp, synthetic construct
  misc_feature 1..46: note = Description of Artificial Sequence: Synthetic oligonucleotide
  source 1..46: mol_type = other DNA
gttgtgatttgctttcaaaaagtatctttgatttattgattacaac

SEQ ID NO: 13598 - DNA, 47 bp, synthetic construct
  misc_feature 1..47: note = Description of Artificial Sequence: Synthetic oligonucleotide
  source 1..47: mol_type = other DNA
gttgtgatttgctttcaaaaagtatctttgatttattgattacaacc

SEQ ID NO: 13599 - DNA, 46 bp, synthetic construct
  misc_feature 1..46: note = Description of Artificial Sequence: Synthetic oligonucleotide
  source 1..46: mol_type = other DNA
gttgtgatttgctttcaaaaagttcttttgcaatatttgtaacaac

SEQ ID NO: 13600 - DNA, 47 bp, synthetic construct
  misc_feature 1..47: note = Description of Artificial Sequence: Synthetic oligonucleotide
  source 1..47: mol_type = other DNA
gttgtgatttgctttcaaaaattgtatctttgacattgataaacaac

SEQ ID NO: 13601 - DNA, 47 bp, synthetic construct
  misc_feature 1..47: note = Description of Artificial Sequence: Synthetic oligonucleotide
  source 1..47: mol_type = other DNA
gttgtgatttgctttcaaaaattgtatctttgactctgtcaaacaac

SEQ ID NO: 13602 - DNA, 46 bp, synthetic construct
  misc_feature 1..46: note = Description of Artificial Sequence: Synthetic oligonucleotide
  source 1..46: mol_type = other DNA
gttgtgatttgctttcaaaagttttctttgacatatttgtaacaac

SEQ ID NO: 13603 - DNA, 47 bp, synthetic construct
  misc_feature 1..47: note = Description of Artificial Sequence: Synthetic oligonucleotide
  source 1..47: mol_type = other DNA
gttgtgatttgctttcaaaatccgttcattgcaatgtcgaaaacaac

SEQ ID NO: 13604 - DNA, 47 bp, synthetic construct
  misc_feature 1..47: note = Description of Artificial Sequence: Synthetic oligonucleotide
  source 1..47: mol_type = other DNA
gttgtgatttgctttcaaaatgtatctttgacttactgataaacatc

SEQ ID NO: 13605 - DNA, 40 bp, synthetic construct
  misc_feature 1..40: note = Description of Artificial Sequence: Synthetic oligonucleotide
  source 1..40: mol_type = other DNA
gttgtgatttgctttcaaaatgtatctttgacttattgat

SEQ ID NO: 13606 - DNA, 46 bp, synthetic construct
  misc_feature 1..46: note = Description of Artificial Sequence: Synthetic oligonucleotide
  source 1..46: mol_type = other DNA
gttgtgatttgctttcaaaatgtatctttgacttattgataaaaac

SEQ ID NO: 13607 - DNA, 47 bp, synthetic construct
  misc_feature 1..47: note = Description of Artificial Sequence: Synthetic oligonucleotide
  source 1..47: mol_type = other DNA
gttgtgatttgctttcaaaatgtatctttgacttattgataaacaac

SEQ ID NO: 13608 - DNA, 47 bp, synthetic construct
  misc_feature 1..47: note = Description of Artificial Sequence: Synthetic oligonucleotide
  source 1..47: mol_type = other DNA
gttgtgatttgctttcaaaatgtatctttgacttattgataaacacc

SEQ ID NO: 13609 - DNA, 47 bp, synthetic construct
  misc_feature 1..47: note = Description of Artificial Sequence: Synthetic oligonucleotide
  source 1..47: mol_type = other DNA
gttgtgatttgctttcaaaatgtatctttgacttattgataaacact

SEQ ID NO: 13610 - DNA, 47 bp, synthetic construct
  misc_feature 1..47: note = Description of Artificial Sequence: Synthetic oligonucleotide
  source 1..47: mol_type = other DNA
gttgtgatttgctttcaaaatgtatctttgacttattgataaacatc

SEQ ID NO: 13611 - DNA, 47 bp, synthetic construct
  misc_feature 1..47: note = Description of Artificial Sequence: Synthetic oligonucleotide
  source 1..47: mol_type = other DNA
gttgtgatttgctttcaaaatgtatctttgacttattgatattcact

SEQ ID NO: 13612 - DNA, 47 bp, synthetic construct
  misc_feature 1..47: note = Description of Artificial Sequence: Synthetic oligonucleotide
  source 1..47: mol_type = other DNA
gttgtgatttgctttcaaaatgtatctttgagctactgataaacaac

SEQ ID NO: 13613 - DNA, 47 bp, synthetic construct
  misc_feature 1..47: note = Description of Artificial Sequence: Synthetic oligonucleotide
  source 1..47: mol_type = other DNA
gttgtgatttgctttcaaaatgtatctttgatttattgataaacact

SEQ ID NO: 13614 - DNA, 47 bp, synthetic construct
  misc_feature 1..47: note = Description of Artificial Sequence: Synthetic oligonucleotide
  source 1..47: mol_type = other DNA
gttgtgatttgctttcaaaatgtattagacgatctttgatagacaac

SEQ ID NO: 13615 - DNA, 47 bp, synthetic construct
  misc_feature 1..47: note = Description of Artificial Sequence: Synthetic oligonucleotide
  source 1..47: mol_type = other DNA
gttgtgatttgctttcaaaatgtatttcgcgttctttgatacacaac

SEQ ID NO: 13616 - DNA, 45 bp, synthetic construct
  misc_feature 1..45: note = Description of Artificial Sequence: Synthetic oligonucleotide
  source 1..45: mol_type = other DNA
gttgtgatttgctttcaaaatgttctttaataagtttgcaacaac

SEQ ID NO: 13617 - DNA, 46 bp, synthetic construct
  misc_feature 1..46: note = Description of Artificial Sequence: Synthetic oligonucleotide
  source 1..46: mol_type = other DNA
gttgtgatttgctttcaaaatgttttttgacaagattggaatcaac

SEQ ID NO: 13618 - DNA, 46 bp, synthetic construct
  misc_feature 1..46: note = Description of Artificial Sequence: Synthetic oligonucleotide
  source 1..46: mol_type = other DNA
gttgtgatttgctttcaaaatgttttttgacaatcttaaaaccaag

SEQ ID NO: 13619 - DNA, 47 bp, synthetic construct
  misc_feature 1..47: note = Description of Artificial Sequence: Synthetic oligonucleotide
  source 1..47: mol_type = other DNA
gttgtgatttgctttcaaaattctatcttcgaaggacgataaccagc

SEQ ID NO: 13620 - DNA, 47 bp, synthetic construct
  misc_feature 1..47: note = Description of Artificial Sequence: Synthetic oligonucleotide
  source 1..47: mol_type = other DNA
gttgtgatttgctttcaaaattgtatctttgacttacttcatacagc

SEQ ID NO: 13621 - DNA, 47 bp, synthetic construct
  misc_feature 1..47: note = Description of Artificial Sequence: Synthetic oligonucleotide
  source 1..47: mol_type = other DNA
gttgtgatttgctttcaaaattgtatctttgataggtctgaaacacc

SEQ ID NO: 13622 - DNA, 47 bp, synthetic construct
  misc_feature 1..47: note = Description of Artificial Sequence: Synthetic oligonucleotide
  source 1..47: mol_type = other DNA
gttgtgatttgctttcaaaattgtatctttggccggattcacacagc

SEQ ID NO: 13623 - DNA, 47 bp, synthetic construct
  misc_feature 1..47: note = Description of Artificial Sequence: Synthetic oligonucleotide
  source 1..47: mol_type = other DNA
gttgtgatttgctttcaaaattgtatctttggtcggataaacacagc

SEQ ID NO: 13624 - DNA, 47 bp, synthetic construct
  misc_feature 1..47: note = Description of Artificial Sequence: Synthetic oligonucleotide
  source 1..47: mol_type = other DNA
gttgtgatttgctttcaaaattgtatttttagacattgataaacaac

SEQ ID NO: 13625 - DNA, 46 bp, synthetic construct
  misc_feature 1..46: note = Description of Artificial Sequence: Synthetic oligonucleotide
  source 1..46: mol_type = other DNA
gttgtgatttgctttcaaaattgttctttggtagatttgcaatagc

SEQ ID NO: 13626 - DNA, 47 bp, synthetic construct
  misc_feature 1..47: note = Description of Artificial Sequence: Synthetic oligonucleotide
  source 1..47: mol_type = other DNA
gttgtgatttgctttcaaaatttatatctttgatattctgatacaac

SEQ ID NO: 13627 - DNA, 47 bp, synthetic construct
  misc_feature 1..47: note = Description of Artificial Sequence: Synthetic oligonucleotide
  source 1..47: mol_type = other DNA
gttgtgatttgctttcaaaatttggattaacttagttcttcgacaac

SEQ ID NO: 13628 - DNA, 47 bp, synthetic construct
  misc_feature 1..47: note = Description of Artificial Sequence: Synthetic oligonucleotide
  source 1..47: mol_type = other DNA
gttgtgatttgctttcaaaattttatctttgacataccggatacagc

SEQ ID NO: 13629 - DNA, 47 bp, synthetic construct
  misc_feature 1..47: note = Description of Artificial Sequence: Synthetic oligonucleotide
  source 1..47: mol_type = other DNA
gttgtgatttgctttcaaaattttcgatctttgatgtcgtgaacaac

SEQ ID NO: 13630 - DNA, 47 bp, synthetic construct
  misc_feature 1..47: note = Description of Artificial Sequence: Synthetic oligonucleotide
  source 1..47: mol_type = other DNA
gttgtgatttgctttcaaacaacgatctttgaggtatcagaaacaac

SEQ ID NO: 13631 - DNA, 46 bp, synthetic construct
  misc_feature 1..46: note = Description of Artificial Sequence: Synthetic oligonucleotide
  source 1..46: mol_type = other DNA
gttgtgatttgctttcaaacgtatctttgacctattgataaatacc

SEQ ID NO: 13632 - DNA, 47 bp, synthetic construct
  misc_feature 1..47: note = Description of Artificial Sequence: Synthetic oligonucleotide
  source 1..47: mol_type = other DNA
gttgtgatttgctttcaaactttagattgacgttctttgataacaac

SEQ ID NO: 13633 - DNA, 47 bp, synthetic construct
  misc_feature 1..47: note = Description of Artificial Sequence: Synthetic oligonucleotide
  source 1..47: mol_type = other DNA
gttgtgatttgctttcaaactttgttctttctaattttgataacaac

SEQ ID NO: 13634 - DNA, 46 bp, synthetic construct
  misc_feature 1..46: note = Description of Artificial Sequence: Synthetic oligonucleotide
  source 1..46: mol_type = other DNA
gttgtgatttgctttcaaacttttactaacttagttcttacacaac

SEQ ID NO: 13635 - DNA, 47 bp, synthetic construct
  misc_feature 1..47: note = Description of Artificial Sequence: Synthetic oligonucleotide
  source 1..47: mol_type = other DNA
gttgtgatttgctttcaaacttttgactaacttagttcttacacaac

SEQ ID NO: 13636 - DNA, 46 bp, synthetic construct
  misc_feature 1..46: note = Description of Artificial Sequence: Synthetic oligonucleotide
  source 1..46: mol_type = other DNA
gttgtgatttgctttcaaagcgtatctttgacatattgaaaacatc

SEQ ID NO: 13637 - DNA, 47 bp, synthetic construct
  misc_feature 1..47: note = Description of Artificial Sequence: Synthetic oligonucleotide
  source 1..47: mol_type = other DNA
gttgtgatttgctttcaaattaagttcttacgatctttgataacaac

SEQ ID NO: 13638 - DNA, 47 bp, synthetic construct
  misc_feature 1..47: note = Description of Artificial Sequence: Synthetic oligonucleotide
  source 1..47: mol_type = other DNA
gttgtgatttgctttcaaattagtatctttgaaccattgaaaacaac

SEQ ID NO: 13639 - DNA, 47 bp, synthetic construct
  misc_feature 1..47: note = Description of Artificial Sequence: Synthetic oligonucleotide
  source 1..47: mol_type = other DNA
gttgtgatttgctttcaaattagtatctttgaaccattgaatacagc

SEQ ID NO: 13640 - DNA, 47 bp, synthetic construct
  misc_feature 1..47: note = Description of Artificial Sequence: Synthetic oligonucleotide
  source 1..47: mol_type = other DNA
gttgtgatttgctttcaaattagtatctttgaaccattggaaacaac

SEQ ID NO: 13641 - DNA, 47 bp, synthetic construct
  misc_feature 1..47: note = Description of Artificial Sequence: Synthetic oligonucleotide
  source 1..47: mol_type = other DNA
gttgtgatttgctttcaaattagtatctttgaaccattggaaacaat

SEQ ID NO: 13642 - DNA, 47 bp, synthetic construct
  misc_feature 1..47: note = Description of Artificial Sequence: Synthetic oligonucleotide
  source 1..47: mol_type = other DNA
gttgtgatttgctttcaaattagtatctttgagccattgaatacagc

SEQ ID NO: 13643 - DNA, 47 bp, synthetic construct
  misc_feature 1..47: note = Description of Artificial Sequence: Synthetic oligonucleotide
  source 1..47: mol_type = other DNA
gttgtgatttgctttcaaattagtatctttgagctataagaaacaac

SEQ ID NO: 13644 - DNA, 47 bp, synthetic construct
  misc_feature 1..47: note = Description of Artificial Sequence: Synthetic oligonucleotide
  source 1..47: mol_type = other DNA
gttgtgatttgctttcaaattagtatctttgcaaaagggaatacagc

SEQ ID NO: 13645 - DNA, 47 bp, synthetic construct
  misc_feature 1..47: note = Description of Artificial Sequence: Synthetic oligonucleotide
  source 1..47: mol_type = other DNA
gttgtgatttgctttcaaattattatgtagcttagatcttttacagc

SEQ ID NO: 13646 - DNA, 47 bp, synthetic construct
  misc_feature 1..47: note = Description of Artificial Sequence: Synthetic oligonucleotide
  source 1..47: mol_type = other DNA
gttgtgatttgctttcaaattattctgtagcttagggctacgacaac

SEQ ID NO: 13647 - DNA, 47 bp, synthetic construct
  misc_feature 1..47: note = Description of Artificial Sequence: Synthetic oligonucleotide
  source 1..47: mol_type = other DNA
gttgtgatttgctttcaaattattgcttagcttcggctagcaacatc

SEQ ID NO: 13648 - DNA, 47 bp, synthetic construct
  misc_feature 1..47: note = Description of Artificial Sequence: Synthetic oligonucleotide
  source 1..47: mol_type = other DNA
gttgtgatttgctttcaaattcttacctttgcagtatctgcgacagc

SEQ ID NO: 13649 - DNA, 47 bp, synthetic construct
  misc_feature 1..47: note = Description of Artificial Sequence: Synthetic oligonucleotide
  source 1..47: mol_type = other DNA
gttgtgatttgctttcaaattctttttgttcgatctttgaatacaac

SEQ ID NO: 13650 - DNA, 46 bp, synthetic construct
  misc_feature 1..46: note = Description of Artificial Sequence: Synthetic oligonucleotide
  source 1..46: mol_type = other DNA
gttgtgatttgctttcaaattgatactaacttagttctttcacaac

SEQ ID NO: 13651 - DNA, 47 bp, synthetic construct
  misc_feature 1..47: note = Description of Artificial Sequence: Synthetic oligonucleotide
  source 1..47: mol_type = other DNA
gttgtgatttgctttcaaattgtatctttagtgcgttctatcacatc

SEQ ID NO: 13652 - DNA, 47 bp, synthetic construct
  misc_feature 1..47: note = Description of Artificial Sequence: Synthetic oligonucleotide
  source 1..47: mol_type = other DNA
gttgtgatttgctttcaaattgtatctttataaagttctctgacaac

SEQ ID NO: 13653 - DNA, 47 bp, synthetic construct
  misc_feature 1..47: note = Description of Artificial Sequence: Synthetic oligonucleotide
  source 1..47: mol_type = other DNA
gttgtgatttgctttcaaattgtatctttatcaagttctatcacatc

SEQ ID NO: 13654 - DNA, 47 bp, synthetic construct
  misc_feature 1..47: note = Description of Artificial Sequence: Synthetic oligonucleotide
  source 1..47: mol_type = other DNA
gttgtgatttgctttcaaattgtatctttgacacactgataaacacc

SEQ ID NO: 13655 - DNA, 47 bp, synthetic construct
  misc_feature 1..47: note = Description of Artificial Sequence: Synthetic oligonucleotide
  source 1..47: mol_type = other DNA
gttgtgatttgctttcaaattgtatctttgacatactgatattcacc

SEQ ID NO: 13656 - DNA, 47 bp, synthetic construct
  misc_feature 1..47: note = Description of Artificial Sequence: Synthetic oligonucleotide
  source 1..47: mol_type = other DNA
gttgtgatttgctttcaaattgtatctttgacatagttgcttacaat

SEQ ID NO: 13657 - DNA, 35 bp, synthetic construct
  misc_feature 1..35: note = Description of Artificial Sequence: Synthetic oligonucleotide
  source 1..35: mol_type = other DNA
gttgtgatttgctttcaaattgtatctttgaccta

SEQ ID NO: 13658 - DNA, 47 bp, synthetic construct
  misc_feature 1..47: note = Description of Artificial Sequence: Synthetic oligonucleotide
  source 1..47: mol_type = other DNA
gttgtgatttgctttcaaattgtatctttgacctattgataatcacc

SEQ ID NO: 13659 - DNA, 47 bp, synthetic construct
  misc_feature 1..47: note = Description of Artificial Sequence: Synthetic oligonucleotide
  source 1..47: mol_type = other DNA
gttgtgatttgctttcaaattgtatctttgacgtatagacaaccaac

SEQ ID NO: 13660 - DNA, 47 bp, synthetic construct
  misc_feature 1..47: note = Description of Artificial Sequence: Synthetic oligonucleotide
  source 1..47: mol_type = other DNA
gttgtgatttgctttcaaattgtatctttgatttattgataaacaac

SEQ ID NO: 13661 - DNA, 46 bp, synthetic construct
  misc_feature 1..46: note = Description of Artificial Sequence: Synthetic oligonucleotide
  source 1..46: mol_type = other DNA
gttgtgatttgctttcaaattgtatttaacttagttctttaacaac

SEQ ID NO: 13662 - DNA, 47 bp, synthetic construct
  misc_feature 1..47: note = Description of Artificial Sequence: Synthetic oligonucleotide
  source 1..47: mol_type = other DNA
gttgtgatttgctttcaaattgttctttcattatctttaatcacagt

SEQ ID NO: 13663 - DNA, 47 bp, synthetic construct
  misc_feature 1..47: note = Description of Artificial Sequence: Synthetic oligonucleotide
  source 1..47: mol_type = other DNA
gttgtgatttgctttcaaatttgtaattaccttagttctttcacatc

SEQ ID NO: 13664 - DNA, 46 bp, synthetic construct
  misc_feature 1..46: note = Description of Artificial Sequence: Synthetic oligonucleotide
  source 1..46: mol_type = other DNA
gttgtgatttgctttcaaatttgttcttaacttaggatgacacaac

SEQ ID NO: 13665 - DNA, 47 bp, synthetic construct
  misc_feature 1..47: note = Description of Artificial Sequence: Synthetic oligonucleotide
  source 1..47: mol_type = other DNA
gttgtgatttgctttcaaattttagtatctttgacatcgtaaacagc

SEQ ID NO: 13666 - DNA, 47 bp, synthetic construct
  misc_feature 1..47: note = Description of Artificial Sequence: Synthetic oligonucleotide
  source 1..47: mol_type = other DNA
gttgtgatttgctttcaaattttattttaccttagctcttatacaac

SEQ ID NO: 13667 - DNA, 47 bp, synthetic construct
  misc_feature 1..47: note = Description of Artificial Sequence: Synthetic oligonucleotide
  source 1..47: mol_type = other DNA
gttgtgatttgctttcaaatttttatgtagcttagttctatcgcaac

SEQ ID NO: 13668 - DNA, 46 bp, synthetic construct
  misc_feature 1..46: note = Description of Artificial Sequence: Synthetic oligonucleotide
  source 1..46: mol_type = other DNA
gttgtgatttgctttcaaatttttcattcagtagattttattcagt

SEQ ID NO: 13669 - DNA, 47 bp, synthetic construct
  misc_feature 1..47: note = Description of Artificial Sequence: Synthetic oligonucleotide
  source 1..47: mol_type = other DNA
gttgtgatttgctttcaaatttttgtgtagcttagctcttatacaac

SEQ ID NO: 13670 - DNA, 47 bp, synthetic construct
  misc_feature 1..47: note = Description of Artificial Sequence: Synthetic oligonucleotide
  source 1..47: mol_type = other DNA
gttgtgatttgctttcaacattccgtaacttcaagttcttttacagc

SEQ ID NO: 13671 - DNA, 47 bp, synthetic construct
  misc_feature 1..47: note = Description of Artificial Sequence: Synthetic oligonucleotide
  source 1..47: mol_type = other DNA
gttgtgatttgctttcaacttaagttctttctatcttcggatacaac

SEQ ID NO: 13672 - DNA, 46 bp, synthetic construct
  misc_feature 1..46: note = Description of Artificial Sequence: Synthetic oligonucleotide
  source 1..46: mol_type = other DNA
gttgtgatttgctttcaacttttatctttgtcagagttctttcaat

SEQ ID NO: 13673 - DNA, 47 bp, synthetic construct
  misc_feature 1..47: note = Description of Artificial Sequence: Synthetic oligonucleotide
  source 1..47: mol_type = other DNA
gttgtgatttgctttcaacttttgttctttgtagatttgattacaac

SEQ ID NO: 13674 - DNA, 47 bp, synthetic construct
  misc_feature 1..47: note = Description of Artificial Sequence: Synthetic oligonucleotide
  source 1..47: mol_type = other DNA
gttgtgatttgctttcaagttctttatttttacggttgagttacaac

SEQ ID NO: 13675 - DNA, 36 bp, synthetic construct
  misc_feature 1..36: note = Description of Artificial Sequence: Synthetic oligonucleotide
  source 1..36: mol_type = other DNA
gttgtgatttgctttcaataaacgatctttgacaac

SEQ ID NO: 13676 - DNA, 47 bp, synthetic construct
  misc_feature 1..47: note = Description of Artificial Sequence: Synthetic oligonucleotide
  source 1..47: mol_type = other DNA
gttgtgatttgctttcaataatttgtatctttgacatcactaacagc

SEQ ID NO: 13677 - DNA, 47 bp, synthetic construct
  misc_feature 1..47: note = Description of Artificial Sequence: Synthetic oligonucleotide
  source 1..47: mol_type = other DNA
gttgtgatttgctttcaatctcagttctttctatcttcggatacagc

SEQ ID NO: 13678 - DNA, 46 bp, synthetic construct
  misc_feature 1..46: note = Description of Artificial Sequence: Synthetic oligonucleotide
  source 1..46: mol_type = other DNA
gttgtgatttgctttcaatctttaaacaactgatatttggaacaac

SEQ ID NO: 13679 - DNA, 46 bp, synthetic construct
  misc_feature 1..46: note = Description of Artificial Sequence: Synthetic oligonucleotide
  source 1..46: mol_type = other DNA
gttgtgatttgctttcaatctttgaactactgatatttaccacagc

SEQ ID NO: 13680 - DNA, 47 bp, synthetic construct
  misc_feature 1..47: note = Description of Artificial Sequence: Synthetic oligonucleotide
  source 1..47: mol_type = other DNA
gttgtgatttgctttcaatcttttctgtagcttaggtctttgacaac

SEQ ID NO: 13681 - DNA, 47 bp, synthetic construct
  misc_feature 1..47: note = Description of Artificial Sequence: Synthetic oligonucleotide
  source 1..47: mol_type = other DNA
gttgtgatttgctttcaatgttttatctttgacataccgcacacagc

SEQ ID NO: 13682 - DNA, 46 bp, synthetic construct
  misc_feature 1..46: note = Description of Artificial Sequence: Synthetic oligonucleotide
  source 1..46: mol_type = other DNA
gttgtgatttgctttcaattactgattttctgatatttagcacaac

SEQ ID NO: 13683 - DNA, 47 bp, synthetic construct
  misc_feature 1..47: note = Description of Artificial Sequence: Synthetic oligonucleotide
  source 1..47: mol_type = other DNA
gttgtgatttgctttcaattattggtatctttggtattctgaacaac

SEQ ID NO: 13684 - DNA, 46 bp, synthetic construct
  misc_feature 1..46: note = Description of Artificial Sequence: Synthetic oligonucleotide
  source 1..46: mol_type = other DNA
gttgtgatttgctttcaattctgaaaaatcagagattcgtgacaac

SEQ ID NO: 13685 - DNA, 47 bp, synthetic construct
  misc_feature 1..47: note = Description of Artificial Sequence: Synthetic oligonucleotide
  source 1..47: mol_type = other DNA
gttgtgatttgctttcaatttaatctgtaacttcgatcatcaacaac

SEQ ID NO: 13686 - DNA, 47 bp, synthetic construct
  misc_feature 1..47: note = Description of Artificial Sequence: Synthetic oligonucleotide
  source 1..47: mol_type = other DNA
gttgtgatttgctttcaatttagtaactttgctccataaggaacagc

SEQ ID NO: 13687 - DNA, 47 bp, synthetic construct
  misc_feature 1..47: note = Description of Artificial Sequence: Synthetic oligonucleotide
  source 1..47: mol_type = other DNA
gttgtgatttgctttcaatttagtatctttgaaccattggacacaac

SEQ ID NO: 13688 - DNA, 47 bp, synthetic construct
  misc_feature 1..47: note = Description of Artificial Sequence: Synthetic oligonucleotide
  source 1..47: mol_type = other DNA
gttgtgatttgctttcaatttattaactagcttagttctttcacagt

SEQ ID NO: 13689 - DNA, 47 bp, synthetic construct
  misc_feature 1..47: note = Description of Artificial Sequence: Synthetic oligonucleotide
  source 1..47: mol_type = other DNA
gttgtgatttgctttcaatttattctgtagcttcggtatcgtacagc

SEQ ID NO: 13690 - DNA, 47 bp, synthetic construct
  misc_feature 1..47: note = Description of Artificial Sequence: Synthetic oligonucleotide
  source 1..47: mol_type = other DNA
gttgtgatttgctttcaatttctgttctgacgatctttgaacacaac

SEQ ID NO: 13691 - DNA, 47 bp, synthetic construct
  misc_feature 1..47: note = Description of Artificial Sequence: Synthetic oligonucleotide
  source 1..47: mol_type = other DNA
gttgtgatttgctttcaatttgtatctttactgctggtaagcacagc

SEQ ID NO: 13692 - DNA, 47 bp, synthetic construct
  misc_feature 1..47: note = Description of Artificial Sequence: Synthetic oligonucleotide
  source 1..47: mol_type = other DNA
gttgtgatttgctttcaatttgtatctttgacatcatcataaacaac

SEQ ID NO: 13693 - DNA, 47 bp, synthetic construct
  misc_feature 1..47: note = Description of Artificial Sequence: Synthetic oligonucleotide
  source 1..47: mol_type = other DNA
gttgtgatttgctttcaatttgtatctttgacatcattataaacaac

SEQ ID NO: 13694 - DNA, 46 bp, synthetic construct
  misc_feature 1..46: note = Description of Artificial Sequence: Synthetic oligonucleotide
  source 1..46: mol_type = other DNA
gttgtgatttgctttcaatttgttctttgaagattttagtaacaac

SEQ ID NO: 13695 - DNA, 46 bp, synthetic construct
  misc_feature 1..46: note = Description of Artificial Sequence: Synthetic oligonucleotide
  source 1..46: mol_type = other DNA
gttgtgatttgctttcaatttgttctttgacgatatttgatacaat

SEQ ID NO: 13696 - DNA, 46 bp, synthetic construct
  misc_feature 1..46: note = Description of Artificial Sequence: Synthetic oligonucleotide
  source 1..46: mol_type = other DNA
gttgtgatttgctttcaatttgttctttgacgatatttgttacaac

SEQ ID NO: 13697 - DNA, 46 bp, synthetic construct
  misc_feature 1..46: note = Description of Artificial Sequence: Synthetic oligonucleotide
  source 1..46: mol_type = other DNA
gttgtgatttgctttcaatttgttctttgaggatattaaaaacaac

SEQ ID NO: 13698 - DNA, 46 bp, synthetic construct
  misc_feature 1..46: note = Description of Artificial Sequence: Synthetic oligonucleotide
  source 1..46: mol_type = other DNA
gttgtgatttgctttcaatttgttctttgatgatattcgcatcagt

SEQ ID NO: 13699 - DNA, 46 bp, synthetic construct
  misc_feature 1..46: note = Description of Artificial Sequence: Synthetic oligonucleotide
  source 1..46: mol_type = other DNA
gttgtgatttgctttcaatttgttttttgacaaagtttaaaacagc

SEQ ID NO: 13700 - DNA, 46 bp, synthetic construct
  misc_feature 1..46: note = Description of Artificial Sequence: Synthetic oligonucleotide
  source 1..46: mol_type = other DNA
gttgtgatttgctttcaatttgttttttgaggatattaaaaacaac

SEQ ID NO: 13701 - DNA, 47 bp, synthetic construct
  misc_feature 1..47: note = Description of Artificial Sequence: Synthetic oligonucleotide
  source 1..47: mol_type = other DNA
gttgtgatttgctttcaattttaggaacaacgatctttgagaacaac

SEQ ID NO: 13702 - DNA, 47 bp, synthetic construct
  misc_feature 1..47: note = Description of Artificial Sequence: Synthetic oligonucleotide
  source 1..47: mol_type = other DNA
gttgtgatttgctttcaattttagttcttactaattttacaaacaac

SEQ ID NO: 13703 - DNA, 47 bp, synthetic construct
  misc_feature 1..47: note = Description of Artificial Sequence: Synthetic oligonucleotide
  source 1..47: mol_type = other DNA
gttgtgatttgctttcaattttatcagtagattcggtctttgacaac

SEQ ID NO: 13704 - DNA, 47 bp, synthetic construct
  misc_feature 1..47: note = Description of Artificial Sequence: Synthetic oligonucleotide
  source 1..47: mol_type = other DNA
gttgtgatttgctttcaattttgagtatctttgatactgctaacaac

SEQ ID NO: 13705 - DNA, 47 bp, synthetic construct
  misc_feature 1..47: note = Description of Artificial Sequence: Synthetic oligonucleotide
  source 1..47: mol_type = other DNA
gttgtgatttgctttcaattttgagtatctttgatatcgctatcacc

SEQ ID NO: 13706 - DNA, 47 bp, synthetic construct
  misc_feature 1..47: note = Description of Artificial Sequence: Synthetic oligonucleotide
  source 1..47: mol_type = other DNA
gttgtgatttgctttcaattttttttaccttcggggtgtaacacaac

SEQ ID NO: 13707 - DNA, 47 bp, synthetic construct
  misc_feature 1..47: note = Description of Artificial Sequence: Synthetic oligonucleotide
  source 1..47: mol_type = other DNA
gttgtgatttgctttcagaatcgtacatttgtactactagcgacaac

SEQ ID NO: 13708 - DNA, 47 bp, synthetic construct
  misc_feature 1..47: note = Description of Artificial Sequence: Synthetic oligonucleotide
  source 1..47: mol_type = other DNA
gttgtgatttgctttcagaattatatctttgacctattgataacaac

SEQ ID NO: 13709 - DNA, 47 bp, synthetic construct
  misc_feature 1..47: note = Description of Artificial Sequence: Synthetic oligonucleotide
  source 1..47: mol_type = other DNA
gttgtgatttgctttcagaattgtatctttgaacgattgataacagc

SEQ ID NO: 13710 - DNA, 47 bp, synthetic construct
  misc_feature 1..47: note = Description of Artificial Sequence: Synthetic oligonucleotide
  source 1..47: mol_type = other DNA
gttgtgatttgctttcagaattgtatctttgatctcttgataacaac

SEQ ID NO: 13711 - DNA, 47 bp, synthetic construct
  misc_feature 1..47: note = Description of Artificial Sequence: Synthetic oligonucleotide
  source 1..47: mol_type = other DNA
gttgtgatttgctttcagacttgtatctttgacataattataacagc

SEQ ID NO: 13712 - DNA, 47 bp, synthetic construct
  misc_feature 1..47: note = Description of Artificial Sequence: Synthetic oligonucleotide
  source 1..47: mol_type = other DNA
gttgtgatttgctttcagattaagttcttacgatctttgataacaac

SEQ ID NO: 13713 - DNA, 46 bp, synthetic construct
  misc_feature 1..46: note = Description of Artificial Sequence: Synthetic oligonucleotide
  source 1..46: mol_type = other DNA
gttgtgatttgctttcagattgtatctttgaaatattgaaaacagc

SEQ ID NO: 13714 - DNA, 47 bp, synthetic construct
  misc_feature 1..47: note = Description of Artificial Sequence: Synthetic oligonucleotide
  source 1..47: mol_type = other DNA
gttgtgatttgctttcagattgtatctttgaagaaatgataaacaac

SEQ ID NO: 13715 - DNA, 47 bp, synthetic construct
  misc_feature 1..47: note = Description of Artificial Sequence: Synthetic oligonucleotide
  source 1..47: mol_type = other DNA
gttgtgatttgctttcagattgtatctttgacatagtggcttacagc

SEQ ID NO: 13716 - DNA, 47 bp, synthetic construct
  misc_feature 1..47: note = Description of Artificial Sequence: Synthetic oligonucleotide
  source 1..47: mol_type = other DNA
gttgtgatttgctttcagattgtatctttgacgtattgataaacaac

SEQ ID NO: 13717 - DNA, 46 bp, synthetic construct
  misc_feature 1..46: note = Description of Artificial Sequence: Synthetic oligonucleotide
  source 1..46: mol_type = other DNA
gttgtgatttgctttcagattgtatctttgatatattgagcacagg

SEQ ID NO: 13718 - DNA, 47 bp, synthetic construct
  misc_feature 1..47: note = Description of Artificial Sequence: Synthetic oligonucleotide
  source 1..47: mol_type = other DNA
gttgtgatttgctttcagattgtgttctttgatagattgcagacagt

SEQ ID NO: 13719 - DNA, 46 bp, synthetic construct
  misc_feature 1..46: note = Description of Artificial Sequence: Synthetic oligonucleotide
  source 1..46: mol_type = other DNA
gttgtgatttgctttcagattgttctttgataagattgcatatact

SEQ ID NO: 13720 - DNA, 47 bp, synthetic construct
  misc_feature 1..47: note = Description of Artificial Sequence: Synthetic oligonucleotide
  source 1..47: mol_type = other DNA
gttgtgatttgctttcagatttgttctttgctatatttaacaacaac

SEQ ID NO: 13721 - DNA, 47 bp, synthetic construct
  misc_feature 1..47: note = Description of Artificial Sequence: Synthetic oligonucleotide
  source 1..47: mol_type = other DNA
gttgtgatttgctttcaggatttcgtagtttggagctcttaaatacc

SEQ ID NO: 13722 - DNA, 47 bp, synthetic construct
  misc_feature 1..47: note = Description of Artificial Sequence: Synthetic oligonucleotide
  source 1..47: mol_type = other DNA
gttgtgatttgctttcagttctttgagagtgtattttggaatccagc

SEQ ID NO: 13723 - DNA, 47 bp, synthetic construct
  misc_feature 1..47: note = Description of Artificial Sequence: Synthetic oligonucleotide
  source 1..47: mol_type = other DNA
gttgtgatttgctttcagttcttttatttttgtggatagattacaac

SEQ ID NO: 13724 - DNA, 47 bp, synthetic construct
  misc_feature 1..47: note = Description of Artificial Sequence: Synthetic oligonucleotide
  source 1..47: mol_type = other DNA
gttgtgatttgctttcagttttattatctttgcatacagcagacacc

SEQ ID NO: 13725 - DNA, 46 bp, synthetic construct
  misc_feature 1..46: note = Description of Artificial Sequence: Synthetic oligonucleotide
  source 1..46: mol_type = other DNA
gttgtgatttgctttcatcaattggactactgatatttacaacaac

SEQ ID NO: 13726 - DNA, 46 bp, synthetic construct
  misc_feature 1..46: note = Description of Artificial Sequence: Synthetic oligonucleotide
  source 1..46: mol_type = other DNA
gttgtgatttgctttcatcttgtatctttgaaatattgaaagcatc

SEQ ID NO: 13727 - DNA, 47 bp, synthetic construct
  misc_feature 1..47: note = Description of Artificial Sequence: Synthetic oligonucleotide
  source 1..47: mol_type = other DNA
gttgtgatttgctttcattattttgtatctttgacttgattaacagc

SEQ ID NO: 13728 - DNA, 46 bp, synthetic construct
  misc_feature 1..46: note = Description of Artificial Sequence: Synthetic oligonucleotide
  source 1..46: mol_type = other DNA
gttgtgatttgctttcattcattgcacaacctatattagaaacacc

SEQ ID NO: 13729 - DNA, 47 bp, synthetic construct
  misc_feature 1..47: note = Description of Artificial Sequence: Synthetic oligonucleotide
  source 1..47: mol_type = other DNA
gttgtgatttgctttcattcttaggaacaacgatctttgataacaac

SEQ ID NO: 13730 - DNA, 47 bp, synthetic construct
  misc_feature 1..47: note = Description of Artificial Sequence: Synthetic oligonucleotide
  source 1..47: mol_type = other DNA
gttgtgatttgctttcattcttagttcttgcgatatttgatatcaac

SEQ ID NO: 13731 - DNA, 46 bp, synthetic construct
  misc_feature 1..46: note = Description of Artificial Sequence: Synthetic oligonucleotide
  source 1..46: mol_type = other DNA
gttgtgatttgctttcattctttgaaatactgatatttaccacaac

SEQ ID NO: 13732 - DNA, 46 bp, synthetic construct
  misc_feature 1..46: note = Description of Artificial Sequence: Synthetic oligonucleotide
  source 1..46: mol_type = other DNA
gttgtgatttgctttcattctttgaacaactgatatttgcaacaac

SEQ ID NO: 13733 - DNA, 46 bp, synthetic construct
  misc_feature 1..46: note = Description of Artificial Sequence: Synthetic oligonucleotide
  source 1..46: mol_type = other DNA
gttgtgatttgctttcattctttgaacaactgatatttgtaacaac

SEQ ID NO: 13734 - DNA, 46 bp, synthetic construct
  misc_feature 1..46: note = Description of Artificial Sequence: Synthetic oligonucleotide
  source 1..46: mol_type = other DNA
gttgtgatttgctttcattctttgaactactgatatttacaacaat

SEQ ID NO: 13735 - DNA, 46 bp, synthetic construct
  misc_feature 1..46: note = Description of Artificial Sequence: Synthetic oligonucleotide
  source 1..46: mol_type = other DNA
gttgtgatttgctttcattctttgaactattgatatttacaacaac

SEQ ID NO: 13736 - DNA, 46 bp, synthetic construct
  misc_feature 1..46: note = Description of Artificial Sequence: Synthetic oligonucleotide
  source 1..46: mol_type = other DNA
gttgtgatttgctttcattctttgacagaacgatatttacaacagt

SEQ ID NO: 13737 - DNA, 46 bp, synthetic construct
  misc_feature 1..46: note = Description of Artificial Sequence: Synthetic oligonucleotide
  source 1..46: mol_type = other DNA
gttgtgatttgctttcattctttgacatgccgatatttaccatagt

SEQ ID NO: 13738 - DNA, 46 bp, synthetic construct
  misc_feature 1..46: note = Description of Artificial Sequence: Synthetic oligonucleotide
  source 1..46: mol_type = other DNA
gttgtgatttgctttcattctttgacctactgatatttgctccact

SEQ ID NO: 13739 - DNA, 46 bp, synthetic construct
  misc_feature 1..46: note = Description of Artificial Sequence: Synthetic oligonucleotide
  source 1..46: mol_type = other DNA
gttgtgatttgctttcattctttgatctactgatatttgttacaac

SEQ ID NO: 13740 - DNA, 46 bp, synthetic construct
  misc_feature 1..46: note = Description of Artificial Sequence: Synthetic oligonucleotide
  source 1..46: mol_type = other DNA
gttgtgatttgctttcatttagtatctttgaaatattggaaatagt

SEQ ID NO: 13741 - DNA, 47 bp, synthetic construct
  misc_feature 1..47: note = Description of Artificial Sequence: Synthetic oligonucleotide
  source 1..47: mol_type = other DNA
gttgtgatttgctttcattttactatctttgtcgtactaggaacaac

SEQ ID NO: 13742 - DNA, 47 bp, synthetic construct
  misc_feature 1..47: note = Description of Artificial Sequence: Synthetic oligonucleotide
  source 1..47: mol_type = other DNA
gttgtgatttgctttcattttagtaactttgagccattggaaacagc

SEQ ID NO: 13743 - DNA, 47 bp, synthetic construct
  misc_feature 1..47: note = Description of Artificial Sequence: Synthetic oligonucleotide
  source 1..47: mol_type = other DNA
gttgtgatttgctttcattttagtaactttgcataagaacttacagc

SEQ ID NO: 13744 - DNA, 47 bp, synthetic construct
  misc_feature 1..47: note = Description of Artificial Sequence: Synthetic oligonucleotide
  source 1..47: mol_type = other DNA
gttgtgatttgctttcattttagtatatttgaaccattagaaacaac

SEQ ID NO: 13745 - DNA, 47 bp, synthetic construct
  misc_feature 1..47: note = Description of Artificial Sequence: Synthetic oligonucleotide
  source 1..47: mol_type = other DNA
gttgtgatttgctttcattttagtatctttgaaccatcggaaacaac

SEQ ID NO: 13746 - DNA, 47 bp, synthetic construct
  misc_feature 1..47: note = Description of Artificial Sequence: Synthetic oligonucleotide
  source 1..47: mol_type = other DNA
gttgtgatttgctttcattttagtatctttgaaccattagaaacagc

SEQ ID NO: 13747 - DNA, 47 bp, synthetic construct
  misc_feature 1..47: note = Description of Artificial Sequence: Synthetic oligonucleotide
  source 1..47: mol_type = other DNA
gttgtgatttgctttcattttagtatctttgaaccattagaaacagt

SEQ ID NO: 13748 - DNA, 47 bp, synthetic construct
  misc_feature 1..47: note = Description of Artificial Sequence: Synthetic oligonucleotide
  source 1..47: mol_type = other DNA
gttgtgatttgctttcattttagtatctttgaaccattggaaacaac

SEQ ID NO: 13749 - DNA, 47 bp, synthetic construct
  misc_feature 1..47: note = Description of Artificial Sequence: Synthetic oligonucleotide
  source 1..47: mol_type = other DNA
gttgtgatttgctttcattttagtatctttgaaccattggaaacagc

SEQ ID NO: 13750 - DNA, 47 bp, synthetic construct
  misc_feature 1..47: note = Description of Artificial Sequence: Synthetic oligonucleotide
  source 1..47: mol_type = other DNA
gttgtgatttgctttcattttagtatctttgaatcattggaaacaac

SEQ ID NO: 13751 - DNA, 47 bp, synthetic construct
  misc_feature 1..47: note = Description of Artificial Sequence: Synthetic oligonucleotide
  source 1..47: mol_type = other DNA
gttgtgatttgctttcattttagtatctttgaatcattggagacaac

SEQ ID NO: 13752 - DNA, 46 bp, synthetic construct
  misc_feature 1..46: note = Description of Artificial Sequence: Synthetic oligonucleotide
  source 1..46: mol_type = other DNA
gttgtgatttgctttcattttgtatctttgaaatattgataacagc

SEQ ID NO: 13753 - DNA, 47 bp, synthetic construct
  misc_feature 1..47: note = Description of Artificial Sequence: Synthetic oligonucleotide
  source 1..47: mol_type = other DNA
gttgtgatttgctttcattttgtatctttgacatattgataaacaac

SEQ ID NO: 13754 - DNA, 46 bp, synthetic construct
  misc_feature 1..46: note = Description of Artificial Sequence: Synthetic oligonucleotide
  source 1..46: mol_type = other DNA
gttgtgatttgctttcattttgttatttgataagtttgtaaacagc

SEQ ID NO: 13755 - DNA, 47 bp, synthetic construct
  misc_feature 1..47: note = Description of Artificial Sequence: Synthetic oligonucleotide
  source 1..47: mol_type = other DNA
gttgtgatttgctttcatttttcccttatattcgggggataaacaac

SEQ ID NO: 13756 - DNA, 47 bp, synthetic construct
  misc_feature 1..47: note = Description of Artificial Sequence: Synthetic oligonucleotide
  source 1..47: mol_type = other DNA
gttgtgatttgctttcatttttgtatctttgaactattagaaacaac

SEQ ID NO: 13757 - DNA, 46 bp, synthetic construct
  misc_feature 1..46: note = Description of Artificial Sequence: Synthetic oligonucleotide
  source 1..46: mol_type = other DNA
gttgtgatttgctttccttctttgaactactgatatttaacacaat

SEQ ID NO: 13758 - DNA, 47 bp, synthetic construct
  misc_feature 1..47: note = Description of Artificial Sequence: Synthetic oligonucleotide
  source 1..47: mol_type = other DNA
gttgtgatttgctttcgaattagtatctttgatccattggaaacatc

SEQ ID NO: 13759 - DNA, 46 bp, synthetic construct
  misc_feature 1..46: note = Description of Artificial Sequence: Synthetic oligonucleotide
  source 1..46: mol_type = other DNA
gttgtgatttgctttcgaattagtatctttgcatatcataaacaac

SEQ ID NO: 13760 - DNA, 47 bp, synthetic construct
  misc_feature 1..47: note = Description of Artificial Sequence: Synthetic oligonucleotide
  source 1..47: mol_type = other DNA
gttgtgatttgctttcgaatttgtatctttgactcagattttacaac

SEQ ID NO: 13761 - DNA, 46 bp, synthetic construct
  misc_feature 1..46: note = Description of Artificial Sequence: Synthetic oligonucleotide
  source 1..46: mol_type = other DNA
gttgtgatttgctttcgatctttaaaatactgatatttgcgccaac

SEQ ID NO: 13762 - DNA, 46 bp, synthetic construct
  misc_feature 1..46: note = Description of Artificial Sequence: Synthetic oligonucleotide
  source 1..46: mol_type = other DNA
gttgtgatttgctttcgatctttgaaataatgatatttgccacaac

SEQ ID NO: 13763 - DNA, 46 bp, synthetic construct
  misc_feature 1..46: note = Description of Artificial Sequence: Synthetic oligonucleotide
  source 1..46: mol_type = other DNA
gttgtgatttgctttcgattttttctttgggtatagttctttgaat

SEQ ID NO: 13764 - DNA, 47 bp, synthetic construct
  misc_feature 1..47: note = Description of Artificial Sequence: Synthetic oligonucleotide
  source 1..47: mol_type = other DNA
gttgtgatttgctttcggatttgatactaacttagttctttcacaac

SEQ ID NO: 13765 - DNA, 46 bp, synthetic construct
  misc_feature 1..46: note = Description of Artificial Sequence: Synthetic oligonucleotide
  source 1..46: mol_type = other DNA
gttgtgatttgctttcgttctgccaattagtgagatttactacaac

SEQ ID NO: 13766 - DNA, 46 bp, synthetic construct
  misc_feature 1..46: note = Description of Artificial Sequence: Synthetic oligonucleotide
  source 1..46: mol_type = other DNA
gttgtgatttgctttcgttctttaaaatattgagattgatgacaac

SEQ ID NO: 13767 - DNA, 46 bp, synthetic construct
  misc_feature 1..46: note = Description of Artificial Sequence: Synthetic oligonucleotide
  source 1..46: mol_type = other DNA
gttgtgatttgctttcgttctttgaatttatgatatttgccacaac

SEQ ID NO: 13768 - DNA, 46 bp, synthetic construct
  misc_feature 1..46: note = Description of Artificial Sequence: Synthetic oligonucleotide
  source 1..46: mol_type = other DNA
gttgtgatttgctttcgtttcgtatctttgaactactaattacaac

SEQ ID NO: 13769 - DNA, 46 bp, synthetic construct
  misc_feature 1..46: note = Description of Artificial Sequence: Synthetic oligonucleotide
  source 1..46: mol_type = other DNA
gttgtgatttgctttctaattgtatctttgacgtgctataaacaac

SEQ ID NO: 13770 - DNA, 47 bp, synthetic construct
  misc_feature 1..47: note = Description of Artificial Sequence: Synthetic oligonucleotide
  source 1..47: mol_type = other DNA
gttgtgatttgctttggatttattatttttgcactataaatcacacc

SEQ ID NO: 13771 - DNA, 47 bp, synthetic construct
  misc_feature 1..47: note = Description of Artificial Sequence: Synthetic oligonucleotide
  source 1..47: mol_type = other DNA
gttgtgatttgcttttaaatttgtatctttgaactatcaaacacaat

SEQ ID NO: 13772 - DNA, 36 bp, synthetic construct
  misc_feature 1..36: note = Description of Artificial Sequence: Synthetic oligonucleotide
  source 1..36: mol_type = other DNA
gttgtgatttggcggtagaccttagtcggttacact

SEQ ID NO: 13773 - DNA, 46 bp, synthetic construct
  misc_feature 1..46: note = Description of Artificial Sequence: Synthetic oligonucleotide
  source 1..46: mol_type = other DNA
gttgtgatttggtttcattctttgaactactgatatttagcacaac

SEQ ID NO: 13774 - DNA, 36 bp, synthetic construct
  misc_feature 1..36: note = Description of Artificial Sequence: Synthetic oligonucleotide
  source 1..36: mol_type = other DNA
gttgtgatttgtggcgattctcttatctgctaaact

SEQ ID NO: 13775 - DNA, 47 bp, synthetic construct
  misc_feature 1..47: note = Description of Artificial Sequence: Synthetic oligonucleotide
  source 1..47: mol_type = other DNA
gttgtgcaagaactaagttacttaagaatttgaaagcaattcacaac

SEQ ID NO: 13776 - DNA, 47 bp, synthetic construct
  misc_feature 1..47: note = Description of Artificial Sequence: Synthetic oligonucleotide
  source 1..47: mol_type = other DNA
gttgtgcgatatcccaaagataccaaagtttgaaagcaattcacaac

SEQ ID NO: 13777 - DNA, 46 bp, synthetic construct
  misc_feature 1..46: note = Description of Artificial Sequence: Synthetic oligonucleotide
  source 1..46: mol_type = other DNA
gttgtgctcaatatatcaaagatacaatctgtaagcaattcacaac

SEQ ID NO: 13778 - DNA, 46 bp, synthetic construct
  misc_feature 1..46: note = Description of Artificial Sequence: Synthetic oligonucleotide
  source 1..46: mol_type = other DNA
gttgtgctcaatatttcaaagatacaatctaaaagcaattcacaac

SEQ ID NO: 13779 - DNA, 46 bp, synthetic construct
  misc_feature 1..46: note = Description of Artificial Sequence: Synthetic oligonucleotide
  source 1..46: mol_type = other DNA
gttgtgctcaatatttcaaagatacaattcaaaagcaattcacaac

SEQ ID NO: 13780 - DNA, 46 bp, synthetic construct
  misc_feature 1..46: note = Description of Artificial Sequence: Synthetic oligonucleotide
  source 1..46: mol_type = other DNA
gttgtgctcaatctctcaaagatacaattcaaaagcaattcacaac

SEQ ID NO: 13781 - DNA, 46 bp, synthetic construct
  misc_feature 1..46: note = Description of Artificial Sequence: Synthetic oligonucleotide
  source 1..46: mol_type = other DNA
gttgtgctcagtatttcaaagatacaaaatgacagcaattcacaac

SEQ ID NO: 13782 - DNA, 46 bp, synthetic construct
  misc_feature 1..46: note = Description of Artificial Sequence: Synthetic oligonucleotide
  source 1..46: mol_type = other DNA
gttgtgctcagtatttcaaagatacaattcaaaagcaattcacaac

SEQ ID NO: 13783 - DNA, 47 bp, synthetic construct
  misc_feature 1..47: note = Description of Artificial Sequence: Synthetic oligonucleotide
  source 1..47: mol_type = other DNA
gttgtgcttactggcaccaaagatacaaattgaaagcaaatcacaac

SEQ ID NO: 13784 - DNA, 46 bp, synthetic construct
  misc_feature 1..46: note = Description of Artificial Sequence: Synthetic oligonucleotide
  source 1..46: mol_type = other DNA
gttgtgcttagtcaatcaaagatacaatctaaaagcaattcacaac

SEQ ID NO: 13785 - DNA, 47 bp, synthetic construct
  misc_feature 1..47: note = Description of Artificial Sequence: Synthetic oligonucleotide
  source 1..47: mol_type = other DNA
gttgtgcttgacaagaacgaagatacaatctgaaagcaattcacaac

SEQ ID NO: 13786 - DNA, 47 bp, synthetic construct
  misc_feature 1..47: note = Description of Artificial Sequence: Synthetic oligonucleotide
  source 1..47: mol_type = other DNA
gttgtgcttggctttcagttttagtactttcgtctagtcaagacaac

SEQ ID NO: 13787 - DNA, 47 bp, synthetic construct
  misc_feature 1..47: note = Description of Artificial Sequence: Synthetic oligonucleotide
  source 1..47: mol_type = other DNA
gttgtgctttgctaaaaaattagtatctttgcagaggcataaacatc

SEQ ID NO: 13788 - DNA, 36 bp, synthetic construct
  misc_feature 1..36: note = Description of Artificial Sequence: Synthetic oligonucleotide
  source 1..36: mol_type = other DNA
gttgtggaaagcgggcaggcatcagtcagatacaat

SEQ ID NO: 13789 - DNA, 36 bp, synthetic construct
  misc_feature 1..36: note = Description of Artificial Sequence: Synthetic oligonucleotide
  source 1..36: mol_type = other DNA
gttgtggactgatttgaaaaagggattaacgatatt

SEQ ID NO: 13790 - DNA, 36 bp, synthetic construct
  misc_feature 1..36: note = Description of Artificial Sequence: Synthetic oligonucleotide
  source 1..36: mol_type = other DNA
gttgtggattccgcgcaggctcttatctgatatact

SEQ ID NO: 13791 - DNA, 36 bp, synthetic construct
  misc_feature 1..36: note = Description of Artificial Sequence: Synthetic oligonucleotide
  source 1..36: mol_type = other DNA
gttgtggattccgggcaggcatcgatcaactacact

SEQ ID NO: 13792 - DNA, 37 bp, synthetic construct
  misc_feature 1..37: note = Description of Artificial Sequence: Synthetic oligonucleotide
  source 1..37: mol_type = other DNA
gttgtggattgacatcaggtcgggattagttacactt

SEQ ID NO: 13793 - DNA, 36 bp, synthetic construct
  misc_feature 1..36: note = Description of Artificial Sequence: Synthetic oligonucleotide
  source 1..36: mol_type = other DNA
gttgtggattgaccgcgggccaggattggttacact

SEQ ID NO: 13794 - DNA, 36 bp, synthetic construct
  misc_feature 1..36: note = Description of Artificial Sequence: Synthetic oligonucleotide
  source 1..36: mol_type = other DNA
gttgtggattgaccgcgggctggggttggttacact

SEQ ID NO: 13795 - DNA, 36 bp, synthetic construct
  misc_feature 1..36: note = Description of Artificial Sequence: Synthetic oligonucleotide
  source 1..36: mol_type = other DNA
gttgtggattgaccgcgggtcaggatcggttacact

SEQ ID NO: 13796 - DNA, 36 bp, synthetic construct
  misc_feature 1..36: note = Description of Artificial Sequence: Synthetic oligonucleotide
  source 1..36: mol_type = other DNA
gttgtggattgactgcaaatctgagtttgttacatt

SEQ ID NO: 13797 - DNA, 36 bp, synthetic construct
  misc_feature 1..36: note = Description of Artificial Sequence: Synthetic oligonucleotide
  source 1..36: mol_type = other DNA
gttgtggattgataacagaacagacctttttacaac

SEQ ID NO: 13798 - DNA, 36 bp, synthetic construct
  misc_feature 1..36: note = Description of Artificial Sequence: Synthetic oligonucleotide
  source 1..36: mol_type = other DNA
gttgtggattgattaaaaaaatggattaacgatact

SEQ ID NO: 13799 - DNA, 36 bp, synthetic construct
  misc_feature 1..36: note = Description of Artificial Sequence: Synthetic oligonucleotide
  source 1..36: mol_type = other DNA
gttgtggattgattccgtgccaggatcgggtacact

SEQ ID NO: 13800 - DNA, 47 bp, synthetic construct
  misc_feature 1..47: note = Description of Artificial Sequence: Synthetic oligonucleotide
  source 1..47: mol_type = other DNA
gttgtggattgcacgcaaattgtatctttgacatcctgataaacaac

SEQ ID NO: 13801 - DNA, 36 bp, synthetic construct
  misc_feature 1..36: note = Description of Artificial Sequence: Synthetic oligonucleotide
  source 1..36: mol_type = other DNA
gttgtggattgcgcgcaggtatcagtcagctacact

SEQ ID NO: 13802 - DNA, 36 bp, synthetic construct
  misc_feature 1..36: note = Description of Artificial Sequence: Synthetic oligonucleotide
  source 1..36: mol_type = other DNA
gttgtggattgcggacagtccttggtgagttacact

SEQ ID NO: 13803 - DNA, 36 bp, synthetic construct
  misc_feature 1..36: note = Description of Artificial Sequence: Synthetic oligonucleotide
  source 1..36: mol_type = other DNA
gttgtggattgctccccggcacggatcggttacact

SEQ ID NO: 13804 - DNA, 36 bp, synthetic construct
  misc_feature 1..36: note = Description of Artificial Sequence: Synthetic oligonucleotide
  source 1..36: mol_type = other DNA
gttgtggattgctcccggatcgggatcggttacact

SEQ ID NO: 13805 - DNA, 46 bp, synthetic construct
  misc_feature 1..46: note = Description of Artificial Sequence: Synthetic oligonucleotide
  source 1..46: mol_type = other DNA
gttgtggattgctttcaaattttgatttactgatattagattcatg

SEQ ID NO: 13806 - DNA, 36 bp, synthetic construct
  misc_feature 1..36: note = Description of Artificial Sequence: Synthetic oligonucleotide
  source 1..36: mol_type = other DNA
gttgtggctagcacccagacgcggatcagttacaat

SEQ ID NO: 13807 - DNA, 47 bp, synthetic construct
  misc_feature 1..47: note = Description of Artificial Sequence: Synthetic oligonucleotide
  source 1..47: mol_type = other DNA
gttgtggctcaataaccaaaggtacaattttgaaagcgattcacaac

SEQ ID NO: 13808 - DNA, 36 bp, synthetic construct
  misc_feature 1..36: note = Description of Artificial Sequence: Synthetic oligonucleotide
  source 1..36: mol_type = other DNA
gttgtggcttgatgcaattttaacataattaacaac

SEQ ID NO: 13809 - DNA, 36 bp, synthetic construct
  misc_feature 1..36: note = Description of Artificial Sequence: Synthetic oligonucleotide
  source 1..36: mol_type = other DNA
gttgtggcttgcacacaggcacgggtcagttacaat

SEQ ID NO: 13810 - DNA, 36 bp, synthetic construct
  misc_feature 1..36: note = Description of Artificial Sequence: Synthetic oligonucleotide
  source 1..36: mol_type = other DNA
gttgtggcttgcactcaaacacagatcagttataat

SEQ ID NO: 13811 - DNA, 36 bp, synthetic construct
  misc_feature 1..36: note = Description of Artificial Sequence: Synthetic oligonucleotide
  source 1..36: mol_type = other DNA
gttgtggcttgcactcaaatacggatctgatacaat

SEQ ID NO: 13812 - DNA, 36 bp, synthetic construct
  misc_feature 1..36: note = Description of Artificial Sequence: Synthetic oligonucleotide
  source 1..36: mol_type = other DNA
gttgtggcttgcactcagacgcagatcagttacaat

SEQ ID NO: 13813 - DNA, 36 bp, synthetic construct
  misc_feature 1..36: note = Description of Artificial Sequence: Synthetic oligonucleotide
  source 1..36: mol_type = other DNA
gttgtggcttgcactcagacgcatatcagttataat

SEQ ID NO: 13814 - DNA, 36 bp, synthetic construct
  misc_feature 1..36: note = Description of Artificial Sequence: Synthetic oligonucleotide
  source 1..36: mol_type = other DNA
gttgtggcttgcactcagacgcggatcagttacaat

SEQ ID NO: 13815 - DNA, 36 bp, synthetic construct
  misc_feature 1..36: note = Description of Artificial Sequence: Synthetic oligonucleotide
  source 1..36: mol_type = other DNA
gttgtggcttgcactcaggcacaggtcagttacaat

SEQ ID NO: 13816 - DNA, 36 bp, synthetic construct
  misc_feature 1..36: note = Description of Artificial Sequence: Synthetic oligonucleotide
  source 1..36: mol_type = other DNA
gttgtggcttgcactcaggcacaggtcagttataat

SEQ ID NO: 13817 - DNA, 36 bp, synthetic construct
  misc_feature 1..36: note = Description of Artificial Sequence: Synthetic oligonucleotide
  source 1..36: mol_type = other DNA
gttgtggcttgcactcaggcacggatcagttacaat

SEQ ID NO: 13818 - DNA, 36 bp, synthetic construct
  misc_feature 1..36: note = Description of Artificial Sequence: Synthetic oligonucleotide
  source 1..36: mol_type = other DNA
gttgtggcttgcactcaggcacggatcagttataat

SEQ ID NO: 13819 - DNA, 36 bp, synthetic construct
  misc_feature 1..36: note = Description of Artificial Sequence: Synthetic oligonucleotide
  source 1..36: mol_type = other DNA
gttgtggcttgcactcaggcacggattagttacaat

SEQ ID NO: 13820 - DNA, 36 bp, synthetic construct
  misc_feature 1..36: note = Description of Artificial Sequence: Synthetic oligonucleotide
  source 1..36: mol_type = other DNA
gttgtggcttgcactcaggcacgggttagttacaat

SEQ ID NO: 13821 - DNA, 36 bp, synthetic construct
  misc_feature 1..36: note = Description of Artificial Sequence: Synthetic oligonucleotide
  source 1..36: mol_type = other DNA
gttgtggcttgcactcaggctcggatcagttacaat

SEQ ID NO: 13822 - DNA, 36 bp, synthetic construct
  misc_feature 1..36: note = Description of Artificial Sequence: Synthetic oligonucleotide
  source 1..36: mol_type = other DNA
gttgtggcttgcactcaggggcggatcagttacaat

SEQ ID NO: 13823 - DNA, 36 bp, synthetic construct
  misc_feature 1..36: note = Description of Artificial Sequence: Synthetic oligonucleotide
  source 1..36: mol_type = other DNA
gttgtggcttgctctcaaacacaggtctgttacaat

SEQ ID NO: 13824 - DNA, 36 bp, synthetic construct
  misc_feature 1..36: note = Description of Artificial Sequence: Synthetic oligonucleotide
  source 1..36: mol_type = other DNA
gttgtggcttgctctcaggcaccggtcagttacaat

SEQ ID NO: 13825 - DNA, 36 bp, synthetic construct
  misc_feature 1..36: note = Description of Artificial Sequence: Synthetic oligonucleotide
  source 1..36: mol_type = other DNA
gttgtggcttgctctcaggcacggatcagttacaat

SEQ ID NO: 13826 - DNA, 36 bp, synthetic construct
  misc_feature 1..36: note = Description of Artificial Sequence: Synthetic oligonucleotide
  source 1..36: mol_type = other DNA
gttgtggcttgctctcaggcatggatcagttacaat

SEQ ID NO: 13827 - DNA, 36 bp, synthetic construct
  misc_feature 1..36: note = Description of Artificial Sequence: Synthetic oligonucleotide
  source 1..36: mol_type = other DNA
gttgtggcttgctctcaggcatggattagttacaat

SEQ ID NO: 13828 - DNA, 36 bp, synthetic construct
  misc_feature 1..36: note = Description of Artificial Sequence: Synthetic oligonucleotide
  source 1..36: mol_type = other DNA
gttgtggcttgctgacgaagagaaaaaagatacaac

SEQ ID NO: 13829 - DNA, 36 bp, synthetic construct
  misc_feature 1..36: note = Description of Artificial Sequence: Synthetic oligonucleotide
  source 1..36: mol_type = other DNA
gttgtggcttggcttcaggcatccgttagatacaat

SEQ ID NO: 13830 - DNA, 36 bp, synthetic construct
  misc_feature 1..36: note = Description of Artificial Sequence: Synthetic oligonucleotide
  source 1..36: mol_type = other DNA
gttgtggcttgttgaagaagagaaaagatatacaac

SEQ ID NO: 13831 - DNA, 36 bp, synthetic construct
  misc_feature 1..36: note = Description of Artificial Sequence: Synthetic oligonucleotide
  source 1..36: mol_type = other DNA
gttgtggcttgttgaagaagagaagagatatacaac

SEQ ID NO: 13832 - DNA, 36 bp, synthetic construct
  misc_feature 1..36: note = Description of Artificial Sequence: Synthetic oligonucleotide
  source 1..36: mol_type = other DNA
gttgtgggttgattgcggtcccccccctgctacact

SEQ ID NO: 13833 - DNA, 36 bp, synthetic construct
  misc_feature 1..36: note = Description of Artificial Sequence: Synthetic oligonucleotide
  source 1..36: mol_type = other DNA
gttgtgggttgcaagcaggcatcggtcagctacaat

SEQ ID NO: 13834 - DNA, 36 bp, synthetic construct
  misc_feature 1..36: note = Description of Artificial Sequence: Synthetic oligonucleotide
  source 1..36: mol_type = other DNA
gttgtgggttggcatcaggctctgatcggttacact

SEQ ID NO: 13835 - DNA, 46 bp, synthetic construct
  misc_feature 1..46: note = Description of Artificial Sequence: Synthetic oligonucleotide
  source 1..46: mol_type = other DNA
gttgtggtaaatatcagtaattcaaagaatgaaagcaaatcacaac

SEQ ID NO: 13836 - DNA, 46 bp, synthetic construct
  misc_feature 1..46: note = Description of Artificial Sequence: Synthetic oligonucleotide
  source 1..46: mol_type = other DNA
gttgtggtaaatatcagtatttcaaagaatgaaagcaaatcacaac

SEQ ID NO: 13837 - DNA, 36 bp, synthetic construct
  misc_feature 1..36: note = Description of Artificial Sequence: Synthetic oligonucleotide
  source 1..36: mol_type = other DNA
gttgtggtaggttttcaaggaaaagtttcttacatt

SEQ ID NO: 13838 - DNA, 36 bp, synthetic construct
  misc_feature 1..36: note = Description of Artificial Sequence: Synthetic oligonucleotide
  source 1..36: mol_type = other DNA
gttgtggtcggagcgcatttccctatctgctaaact

SEQ ID NO: 13839 - DNA, 36 bp, synthetic construct
  misc_feature 1..36: note = Description of Artificial Sequence: Synthetic oligonucleotide
  source 1..36: mol_type = other DNA
gttgtggtctgatgtagaacctctataagatacaac

SEQ ID NO: 13840 - DNA, 36 bp, synthetic construct
  misc_feature 1..36: note = Description of Artificial Sequence: Synthetic oligonucleotide
  source 1..36: mol_type = other DNA
gttgtggttccctgttctttctcgtagtggtataat

SEQ ID NO: 13841 - DNA, 36 bp, synthetic construct
  misc_feature 1..36: note = Description of Artificial Sequence: Synthetic oligonucleotide
  source 1..36: mol_type = other DNA
gttgtggttggttagcaagatcaggttgaaaaaagt

SEQ ID NO: 13842 - DNA, 36 bp, synthetic construct
  misc_feature 1..36: note = Description of Artificial Sequence: Synthetic oligonucleotide
  source 1..36: mol_type = other DNA
gttgtggttggttttcaaagtcaggtttagtacatt

SEQ ID NO: 13843 - DNA, 37 bp, synthetic construct
  misc_feature 1..37: note = Description of Artificial Sequence: Synthetic oligonucleotide
  source 1..37: mol_type = other DNA
gttgtggtttaattaaagattagaaaagacgatatta

SEQ ID NO: 13844 - DNA, 47 bp, synthetic construct
  misc_feature 1..47: note = Description of Artificial Sequence: Synthetic oligonucleotide
  source 1..47: mol_type = other DNA
gttgtggtttacgaagcaaagataaacatttgaaagctaatcacaac

SEQ ID NO: 13845 - DNA, 47 bp, synthetic construct
  misc_feature 1..47: note = Description of Artificial Sequence: Synthetic oligonucleotide
  source 1..47: mol_type = other DNA
gttgtggtttcctatgtcaaagatacaatctgaaagcaattcacaac

SEQ ID NO: 13846 - DNA, 46 bp, synthetic construct
  misc_feature 1..46: note = Description of Artificial Sequence: Synthetic oligonucleotide
  source 1..46: mol_type = other DNA
gttgtggtttctatgtcaaagatacaatctgaaagcaattcacaac

SEQ ID NO: 13847 - DNA, 46 bp, synthetic construct
  misc_feature 1..46: note = Description of Artificial Sequence: Synthetic oligonucleotide
  source 1..46: mol_type = other DNA
gttgtggtttctatttcaaagatacaatctaaaagcaattcacaac

SEQ ID NO: 13848 - DNA, 36 bp, synthetic construct
  misc_feature 1..36: note = Description of Artificial Sequence: Synthetic oligonucleotide
  source 1..36: mol_type = other DNA
gttgtggtttgaaagaaaaatggaataataaataat

SEQ ID NO: 13849 - DNA, 36 bp, synthetic construct
  misc_feature 1..36: note = Description of Artificial Sequence: Synthetic oligonucleotide
  source 1..36: mol_type = other DNA
gttgtggtttgataaaaaaatggaataaatgatatt

SEQ ID NO: 13850 - DNA, 36 bp, synthetic construct
  misc_feature 1..36: note = Description of Artificial Sequence: Synthetic oligonucleotide
  source 1..36: mol_type = other DNA
gttgtggtttgataacaaaaggaaaagggatatatt

SEQ ID NO: 13851 - DNA, 36 bp, synthetic construct
  misc_feature 1..36: note = Description of Artificial Sequence: Synthetic oligonucleotide
  source 1..36: mol_type = other DNA
gttgtggtttgataacaaaaggaaattaaatatatt

SEQ ID NO: 13852 - DNA, 36 bp, synthetic construct
  misc_feature 1..36: note = Description of Artificial Sequence: Synthetic oligonucleotide
  source 1..36: mol_type = other DNA
gttgtggtttgataagaaaatggaataagatatatt

SEQ ID NO: 13853 - DNA, 36 bp, synthetic construct
  misc_feature 1..36: note = Description of Artificial Sequence: Synthetic oligonucleotide
  source 1..36: mol_type = other DNA
gttgtggtttgataagagattaggaaatacgatatt

SEQ ID NO: 13854 - DNA, 36 bp, synthetic construct
  misc_feature 1..36: note = Description of Artificial Sequence: Synthetic oligonucleotide
  source 1..36: mol_type = other DNA
gttgtggtttgatataggaaagagataagaaacaac

SEQ ID NO: 13855 - DNA, 36 bp, synthetic construct
  misc_feature 1..36: note = Description of Artificial Sequence: Synthetic oligonucleotide
  source 1..36: mol_type = other DNA
gttgtggtttgatgaagaattgggatctaagacaac

SEQ ID NO: 13856 - DNA, 36 bp, synthetic construct
  misc_feature 1..36: note = Description of Artificial Sequence: Synthetic oligonucleotide
  source 1..36: mol_type = other DNA
gttgtggtttgatgacgaaaaccgatatttaacaac

SEQ ID NO: 13857 - DNA, 36 bp, synthetic construct
  misc_feature 1..36: note = Description of Artificial Sequence: Synthetic oligonucleotide
  source 1..36: mol_type = other DNA
gttgtggtttgatgatgaagatagataagatacaac

SEQ ID NO: 13858 - DNA, 36 bp, synthetic construct
  misc_feature 1..36: note = Description of Artificial Sequence: Synthetic oligonucleotide
  source 1..36: mol_type = other DNA
gttgtggtttgatgatgatttaggataagatacaac

SEQ ID NO: 13859 - DNA, 36 bp, synthetic construct
  misc_feature 1..36: note = Description of Artificial Sequence: Synthetic oligonucleotide
  source 1..36: mol_type = other DNA
gttgtggtttgatgtaaaaatggaatgatattcaac

SEQ ID NO: 13860 - DNA, 36 bp, synthetic construct
  misc_feature 1..36: note = Description of Artificial Sequence: Synthetic oligonucleotide
  source 1..36: mol_type = other DNA
gttgtggtttgatgtaaatttgagataaggtattac

SEQ ID NO: 13861 - DNA, 37 bp, synthetic construct
  misc_feature 1..37: note = Description of Artificial Sequence: Synthetic oligonucleotide
  source 1..37: mol_type = other DNA
gttgtggtttgatgtaagaatagaaagatatacaact

SEQ ID NO: 13862 - DNA, 36 bp, synthetic construct
  misc_feature 1..36: note = Description of Artificial Sequence: Synthetic oligonucleotide
  source 1..36: mol_type = other DNA
gttgtggtttgatgtaatttcaacgtcttataaaac

SEQ ID NO: 13863 - DNA, 36 bp, synthetic construct
  misc_feature 1..36: note = Description of Artificial Sequence: Synthetic oligonucleotide
  source 1..36: mol_type = other DNA
gttgtggtttgatgtaatttcaagatgataaaaaac

SEQ ID NO: 13864 - DNA, 36 bp, synthetic construct
  misc_feature 1..36: note = Description of Artificial Sequence: Synthetic oligonucleotide
  source 1..36: mol_type = other DNA
gttgtggtttgatgtaatttccaaaggataaacaac

SEQ ID NO: 13865 - DNA, 36 bp, synthetic construct
  misc_feature 1..36: note = Description of Artificial Sequence: Synthetic oligonucleotide
  source 1..36: mol_type = other DNA
gttgtggtttgatgtaattttaaagagatagacaac

SEQ ID NO: 13866 - DNA, 36 bp, synthetic construct
  misc_feature 1..36: note = Description of Artificial Sequence: Synthetic oligonucleotide
  source 1..36: mol_type = other DNA
gttgtggtttgatgtaattttctaaggataaacaac

SEQ ID NO: 13867 - DNA, 36 bp, synthetic construct
  misc_feature 1..36: note = Description of Artificial Sequence: Synthetic oligonucleotide
  source 1..36: mol_type = other DNA
gttgtggtttgatgtaattttggaataagatacaac

SEQ ID NO: 13868 - DNA, 36 bp, synthetic construct
  misc_feature 1..36: note = Description of Artificial Sequence: Synthetic oligonucleotide
  source 1..36: mol_type = other DNA
gttgtggtttgatgtagaaaaaaaaacaataacaac

SEQ ID NO: 13869 - DNA, 36 bp, synthetic construct
  misc_feature 1..36: note = Description of Artificial Sequence: Synthetic oligonucleotide
  source 1..36: mol_type = other DNA
gttgtggtttgatgtagaaaaaaggtataagacaac

SEQ ID NO: 13870 - DNA, 36 bp, synthetic construct
  misc_feature 1..36: note = Description of Artificial Sequence: Synthetic oligonucleotide
  source 1..36: mol_type = other DNA
gttgtggtttgatgtagaaaaagactgataaacaac

SEQ ID NO: 13871 - DNA, 36 bp, synthetic construct
  misc_feature 1..36: note = Description of Artificial Sequence: Synthetic oligonucleotide
  source 1..36: mol_type = other DNA
gttgtggtttgatgtagaaaaaggatgatagacaac

SEQ ID NO: 13872 - DNA, 36 bp, synthetic construct
  misc_feature 1..36: note = Description of Artificial Sequence: Synthetic oligonucleotide
  source 1..36: mol_type = other DNA
gttgtggtttgatgtagaaaacgcaagatatacaac

SEQ ID NO: 13873 - DNA, 36 bp, synthetic construct
  misc_feature 1..36: note = Description of Artificial Sequence: Synthetic oligonucleotide
  source 1..36: mol_type = other DNA
gttgtggtttgatgtagaaaagagaagaaatacaac

SEQ ID NO: 13874 - DNA, 36 bp, synthetic construct
  misc_feature 1..36: note = Description of Artificial Sequence: Synthetic oligonucleotide
  source 1..36: mol_type = other DNA
gttgtggtttgatgtagaaaagtgataaggtacaac

SEQ ID NO: 13875 - DNA, 36 bp, synthetic construct
  misc_feature 1..36: note = Description of Artificial Sequence: Synthetic oligonucleotide
  source 1..36: mol_type = other DNA
gttgtggtttgatgtagaaacaaaataataagcaac

SEQ ID NO: 13876 - DNA, 36 bp, synthetic construct
  misc_feature 1..36: note = Description of Artificial Sequence: Synthetic oligonucleotide
  source 1..36: mol_type = other DNA
gttgtggtttgatgtagaaacaagatataagacaac

SEQ ID NO: 13877 - DNA, 36 bp, synthetic construct
  misc_feature 1..36: note = Description of Artificial Sequence: Synthetic oligonucleotide
  source 1..36: mol_type = other DNA
gttgtggtttgatgtagaaagaagatataactcaac

SEQ ID NO: 13878 - DNA, 36 bp, synthetic construct
  misc_feature 1..36: note = Description of Artificial Sequence: Synthetic oligonucleotide
  source 1..36: mol_type = other DNA
gttgtggtttgatgtagaaataggataaggaacaac

SEQ ID NO: 13879 - DNA, 36 bp, synthetic construct
  misc_feature 1..36: note = Description of Artificial Sequence: Synthetic oligonucleotide
  source 1..36: mol_type = other DNA
gttgtggtttgatgtagaaatgagataagaagcaat

SEQ ID NO: 13880 - DNA, 36 bp, synthetic construct
  misc_feature 1..36: note = Description of Artificial Sequence: Synthetic oligonucleotide
  source 1..36: mol_type = other DNA
gttgtggtttgatgtagaaatggaataagatacaac

SEQ ID NO: 13881 - DNA, 36 bp, synthetic construct
  misc_feature 1..36: note = Description of Artificial Sequence: Synthetic oligonucleotide
  source 1..36: mol_type = other DNA
gttgtggtttgatgtagaaattcaataagatacaac

SEQ ID NO: 13882 - DNA, 36 bp, synthetic construct
  misc_feature 1..36: note = Description of Artificial Sequence: Synthetic oligonucleotide
  source 1..36: mol_type = other DNA
gttgtggtttgatgtagaacaaaggtataagacaac

SEQ ID NO: 13883 - DNA, 36 bp, synthetic construct
  misc_feature 1..36: note = Description of Artificial Sequence: Synthetic oligonucleotide
  source 1..36: mol_type = other DNA
gttgtggtttgatgtagaacaaaggtataagacaat

SEQ ID NO: 13884 - DNA, 36 bp, synthetic construct
  misc_feature 1..36: note = Description of Artificial Sequence: Synthetic oligonucleotide
  source 1..36: mol_type = other DNA
gttgtggtttgatgtagaagagatgtaaatgacaac

SEQ ID NO: 13885 - DNA, 36 bp, synthetic construct
  misc_feature 1..36: note = Description of Artificial Sequence: Synthetic oligonucleotide
  source 1..36: mol_type = other DNA
gttgtggtttgatgtagaataatgataaaagacaac

SEQ ID NO: 13886 - DNA, 36 bp, synthetic construct
  misc_feature 1..36: note = Description of Artificial Sequence: Synthetic oligonucleotide
  source 1..36: mol_type = other DNA
gttgtggtttgatgtagaatagaaatataacacaac

SEQ ID NO: 13887 - DNA, 37 bp, synthetic construct
  misc_feature 1..37: note = Description of Artificial Sequence: Synthetic oligonucleotide
  source 1..37: mol_type = other DNA
gttgtggtttgatgtagaatagagataaaagacaatc

SEQ ID NO: 13888 - DNA, 36 bp, synthetic construct
  misc_feature 1..36: note = Description of Artificial Sequence: Synthetic oligonucleotide
  source 1..36: mol_type = other DNA
gttgtggtttgatgtagaatgaagaagacatacgac

SEQ ID NO: 13889 - DNA, 36 bp, synthetic construct
  misc_feature 1..36: note = Description of Artificial Sequence: Synthetic oligonucleotide
  source 1..36: mol_type = other DNA
gttgtggtttgatgtagaatgaagatataatacaac

SEQ ID NO: 13890 - DNA, 36 bp, synthetic construct
  misc_feature 1..36: note = Description of Artificial Sequence: Synthetic oligonucleotide
  source 1..36: mol_type = other DNA
gttgtggtttgatgtagaattaattaaatagacaac

SEQ ID NO: 13891 - DNA, 36 bp, synthetic construct
  misc_feature 1..36: note = Description of Artificial Sequence: Synthetic oligonucleotide
  source 1..36: mol_type = other DNA
gttgtggtttgatgtagaattagaacgataaacaac

SEQ ID NO: 13892 - DNA, 36 bp, synthetic construct
  misc_feature 1..36: note = Description of Artificial Sequence: Synthetic oligonucleotide
  source 1..36: mol_type = other DNA
gttgtggtttgatgtagaattggaatgaggaacaac

SEQ ID NO: 13893 - DNA, 36 bp, synthetic construct
  misc_feature 1..36: note = Description of Artificial Sequence: Synthetic oligonucleotide
  source 1..36: mol_type = other DNA
gttgtggtttgatgtagaatttcaataagatacaac

SEQ ID NO: 13894 - DNA, 36 bp, synthetic construct
  misc_feature 1..36: note = Description of Artificial Sequence: Synthetic oligonucleotide
  source 1..36: mol_type = other DNA
gttgtggtttgatgtagaatttcaatgataaacaac

SEQ ID NO: 13895 - DNA, 36 bp, synthetic construct
  misc_feature 1..36: note = Description of Artificial Sequence: Synthetic oligonucleotide
  source 1..36: mol_type = other DNA
gttgtggtttgatgtagaatttcgataagatacaac

SEQ ID NO: 13896 - DNA, 36 bp, synthetic construct
  misc_feature 1..36: note = Description of Artificial Sequence: Synthetic oligonucleotide
  source 1..36: mol_type = other DNA
gttgtggtttgatgtagaattttaataagatacaac

SEQ ID NO: 13897 - DNA, 36 bp, synthetic construct
  misc_feature 1..36: note = Description of Artificial Sequence: Synthetic oligonucleotide
  source 1..36: mol_type = other DNA
gttgtggtttgatgtagagaaacgatataatacaac

SEQ ID NO: 13898 - DNA, 36 bp, synthetic construct
  misc_feature 1..36: note = Description of Artificial Sequence: Synthetic oligonucleotide
  source 1..36: mol_type = other DNA
gttgtggtttgatgtagcgagcgtataaggaacaac

SEQ ID NO: 13899 - DNA, 36 bp, synthetic construct
  misc_feature 1..36: note = Description of Artificial Sequence: Synthetic oligonucleotide
  source 1..36: mol_type = other DNA
gttgtggtttgatgtaggaaaagagtgatatacaac

SEQ ID NO: 13900 - DNA, 37 bp, synthetic construct
  misc_feature 1..37: note = Description of Artificial Sequence: Synthetic oligonucleotide
  source 1..37: mol_type = other DNA
gttgtggtttgatgtaggaaaaggatgatatacaaca

SEQ ID NO: 13901 - DNA, 36 bp, synthetic construct
  misc_feature 1..36: note = Description of Artificial Sequence: Synthetic oligonucleotide
  source 1..36: mol_type = other DNA
gttgtggtttgatgtaggaaacgaaagatatacaac

SEQ ID NO: 13902 - DNA, 36 bp, synthetic construct
  misc_feature 1..36: note = Description of Artificial Sequence: Synthetic oligonucleotide
  source 1..36: mol_type = other DNA
gttgtggtttgatgtaggaaacggacgataaacaac

SEQ ID NO: 13903 - DNA, 36 bp, synthetic construct
  misc_feature 1..36: note = Description of Artificial Sequence: Synthetic oligonucleotide
  source 1..36: mol_type = other DNA
gttgtggtttgatgtaggaaacggatgatatacact

SEQ ID NO: 13904 - DNA, 36 bp, synthetic construct
  misc_feature 1..36: note = Description of Artificial Sequence: Synthetic oligonucleotide
  source 1..36: mol_type = other DNA
gttgtggtttgatgtaggaatagaatgatatacaac

SEQ ID NO: 13905 - DNA, 36 bp, synthetic construct
  misc_feature 1..36: note = Description of Artificial Sequence: Synthetic oligonucleotide
  source 1..36: mol_type = other DNA
gttgtggtttgatgtaggaatagagacataaacaac

SEQ ID NO: 13906 - DNA, 36 bp, synthetic construct
  misc_feature 1..36: note = Description of Artificial Sequence: Synthetic oligonucleotide
  source 1..36: mol_type = other DNA
gttgtggtttgatgtaggaatagatagataaacaac

SEQ ID NO: 13907 - DNA, 36 bp, synthetic construct
  misc_feature 1..36: note = Description of Artificial Sequence: Synthetic oligonucleotide
  source 1..36: mol_type = other DNA
gttgtggtttgatgtaggaataggatgatatacaac

SEQ ID NO: 13908 - DNA, 36 bp, synthetic construct
  misc_feature 1..36: note = Description of Artificial Sequence: Synthetic oligonucleotide
  source 1..36: mol_type = other DNA
gttgtggtttgatgtaggaatagtacgatatacaac

SEQ ID NO: 13909 - DNA, 36 bp, synthetic construct
  misc_feature 1..36: note = Description of Artificial Sequence: Synthetic oligonucleotide
  source 1..36: mol_type = other DNA
gttgtggtttgatgtaggaatcaaaagatatacaac

SEQ ID NO: 13910 - DNA, 36 bp, synthetic construct
  misc_feature 1..36: note = Description of Artificial Sequence: Synthetic oligonucleotide
  source 1..36: mol_type = other DNA
gttgtggtttgatgtaggacagatataaggaacaac

SEQ ID NO: 13911 - DNA, 36 bp, synthetic construct
  misc_feature 1..36: note = Description of Artificial Sequence: Synthetic oligonucleotide
  source 1..36: mol_type = other DNA
gttgtggtttgatgtaggataaaaacgaattacaac

SEQ ID NO: 13912 - DNA, 36 bp, synthetic construct
  misc_feature 1..36: note = Description of Artificial Sequence: Synthetic oligonucleotide
  source 1..36: mol_type = other DNA
gttgtggtttgatgtaggatacagacgataaacaac

SEQ ID NO: 13913 - DNA, 36 bp, synthetic construct
  misc_feature 1..36: note = Description of Artificial Sequence: Synthetic oligonucleotide
  source 1..36: mol_type = other DNA
gttgtggtttgatgtaggatataagagatatacaac

SEQ ID NO: 13914 - DNA, 36 bp, synthetic construct
  misc_feature 1..36: note = Description of Artificial Sequence: Synthetic oligonucleotide
  source 1..36: mol_type = other DNA
gttgtggtttgatgtagtttttcaatattatacaac

SEQ ID NO: 13915 - DNA, 36 bp, synthetic construct
  misc_feature 1..36: note = Description of Artificial Sequence: Synthetic oligonucleotide
  source 1..36: mol_type = other DNA
gttgtggtttgatgtataaccgccaatagaaacact

SEQ ID NO: 13916 - DNA, 36 bp, synthetic construct
  misc_feature 1..36: note = Description of Artificial Sequence: Synthetic oligonucleotide
  source 1..36: mol_type = other DNA
gttgtggtttgatgtggaaaaggagtgatataagac

SEQ ID NO: 13917 - DNA, 36 bp, synthetic construct
  misc_feature 1..36: note = Description of Artificial Sequence: Synthetic oligonucleotide
  source 1..36: mol_type = other DNA
gttgtggtttgattaaaatcgttctttgacaatatt

SEQ ID NO: 13918 - DNA, 27 bp, synthetic construct
  misc_feature 1..27: note = Description of Artificial Sequence: Synthetic oligonucleotide
  source 1..27: mol_type = other DNA
gttgtggtttgattaaagattagaaaa

SEQ ID NO: 13919 - DNA, 36 bp, synthetic construct
  misc_feature 1..36: note = Description of Artificial Sequence: Synthetic oligonucleotide
  source 1..36: mol_type = other DNA
gttgtggtttgattaaagattagaaaaaacgatatt

SEQ ID NO: 13920 - DNA, 35 bp, synthetic construct
  misc_feature 1..35: note = Description of Artificial Sequence: Synthetic oligonucleotide
  source 1..35: mol_type = other DNA
gttgtggtttgattaaagattagaaaacacgatat

SEQ ID NO: 13921 - DNA, 36 bp, synthetic construct
  misc_feature 1..36: note = Description of Artificial Sequence: Synthetic oligonucleotide
  source 1..36: mol_type = other DNA
gttgtggtttgattaaagattagaaaacacgatatt

SEQ ID NO: 13922 - DNA, 36 bp, synthetic construct
  misc_feature 1..36: note = Description of Artificial Sequence: Synthetic oligonucleotide
  source 1..36: mol_type = other DNA
gttgtggtttgattaaagattagaaaagacgatatt

SEQ ID NO: 13923 - DNA, 36 bp, synthetic construct
  misc_feature 1..36: note = Description of Artificial Sequence: Synthetic oligonucleotide
  source 1..36: mol_type = other DNA
gttgtggtttgattaaagattagaaataacgatatt

SEQ ID NO: 13924 - DNA, 36 bp, synthetic construct
  misc_feature 1..36: note = Description of Artificial Sequence: Synthetic oligonucleotide
  source 1..36: mol_type = other DNA
gttgtggtttgattaaagattagaaatgacgatatt

SEQ ID NO: 13925 - DNA, 36 bp, synthetic construct
  misc_feature 1..36: note = Description of Artificial Sequence: Synthetic oligonucleotide
  source 1..36: mol_type = other DNA
gttgtggtttgattaaagattagaagacacgatatt

SEQ ID NO: 13926 - DNA, 38 bp, synthetic construct
  misc_feature 1..38: note = Description of Artificial Sequence: Synthetic oligonucleotide
  source 1..38: mol_type = other DNA
gttgtggtttgattaaagattagaagacacgatatttt

SEQ ID NO: 13927 - DNA, 36 bp, synthetic construct
  misc_feature 1..36: note = Description of Artificial Sequence: Synthetic oligonucleotide
  source 1..36: mol_type = other DNA
gttgtggtttgattaaagattagagaaaacgatatt

SEQ ID NO: 13928 - DNA, 36 bp, synthetic construct
  misc_feature 1..36: note = Description of Artificial Sequence: Synthetic oligonucleotide
  source 1..36: mol_type = other DNA
gttgtggtttgattaaagattagagaacacgatatc

SEQ ID NO: 13929 - DNA, 36 bp, synthetic construct
  misc_feature 1..36: note = Description of Artificial Sequence: Synthetic oligonucleotide
  source 1..36: mol_type = other DNA
gttgtggtttgattaaagattagagaacacgatatt

SEQ ID NO: 13930 - DNA, 36 bp, synthetic construct
  misc_feature 1..36: note = Description of Artificial Sequence: Synthetic oligonucleotide
  source 1..36: mol_type = other DNA
gttgtggtttgattaaagattagagaatacgatatt

SEQ ID NO: 13931 - DNA, 36 bp, synthetic construct
  misc_feature 1..36: note = Description of Artificial Sequence: Synthetic oligonucleotide
  source 1..36: mol_type = other DNA
gttgtggtttgattaaagattagagataacgatatt

SEQ ID NO: 13932 - DNA, 36 bp, synthetic construct
  misc_feature 1..36: note = Description of Artificial Sequence: Synthetic oligonucleotide
  source 1..36: mol_type = other DNA
gttgtggtttgattaaagattagagattacgatatt

SEQ ID NO: 13933 - DNA, 36 bp, synthetic construct
  misc_feature 1..36: note = Description of Artificial Sequence: Synthetic oligonucleotide
  source 1..36: mol_type = other DNA
gttgtggtttgattaaagattaggaattacgatatt

SEQ ID NO: 13934 - DNA, 36 bp, synthetic construct
  misc_feature 1..36: note = Description of Artificial Sequence: Synthetic oligonucleotide
  source 1..36: mol_type = other DNA
gttgtggtttgattaaagatttgaaaacacgatatt

SEQ ID NO: 13935 - DNA, 36 bp, synthetic construct
  misc_feature 1..36: note = Description of Artificial Sequence: Synthetic oligonucleotide
  misc_difference 34..36: note = n is a, c, g, or t
  source 1..36: mol_type = other DNA
gttgtggtttgattaaagatttgaaaacacgatnnn

SEQ ID NO: 13936 - DNA, 36 bp, synthetic construct
  misc_feature 1..36: note = Description of Artificial Sequence: Synthetic oligonucleotide
  source 1..36: mol_type = other DNA
gttgtggtttgattaaagatttgaaaacactatatt

SEQ ID NO: 13937 - DNA, 44 bp, synthetic construct
  misc_feature 1..44: note = Description of Artificial Sequence: Synthetic oligonucleotide
  source 1..44: mol_type = other DNA
gttgtggtttgattccaactgattttgtagagattttattcagt

SEQ ID NO: 13938 - DNA, 36 bp, synthetic construct
  misc_feature 1..36: note = Description of Artificial Sequence: Synthetic oligonucleotide
  source 1..36: mol_type = other DNA
gttgtggtttgattcctcacaaagatttaagacatt

SEQ ID NO: 13939 - DNA, 36 bp, synthetic construct
  misc_feature 1..36: note = Description of Artificial Sequence: Synthetic oligonucleotide
  source 1..36: mol_type = other DNA
gttgtggtttgattctaataagcgataagatatacc

SEQ ID NO: 13940 - DNA, 36 bp, synthetic construct
  misc_feature 1..36: note = Description of Artificial Sequence: Synthetic oligonucleotide
  source 1..36: mol_type = other DNA
gttgtggtttgattctataattcaatatgatatacc

SEQ ID NO: 13941 - DNA, 36 bp, synthetic construct
  misc_feature 1..36: note = Description of Artificial Sequence: Synthetic oligonucleotide
  source 1..36: mol_type = other DNA
gttgtggtttgattgaaaaagggaattgacgatatt

SEQ ID NO: 13942 - DNA, 36 bp, synthetic construct
  misc_feature 1..36: note = Description of Artificial Sequence: Synthetic oligonucleotide
  source 1..36: mol_type = other DNA
gttgtggtttgattgaagatttgaaaacacgatatt

SEQ ID NO: 13943 - DNA, 36 bp, synthetic construct
  misc_feature 1..36: note = Description of Artificial Sequence: Synthetic oligonucleotide
  source 1..36: mol_type = other DNA
gttgtggtttgattgagaaaagctctttaacatact

SEQ ID NO: 13944 - DNA, 36 bp, synthetic construct
  misc_feature 1..36: note = Description of Artificial Sequence: Synthetic oligonucleotide
  source 1..36: mol_type = other DNA
gttgtggtttgattggaaaaaagaattgacgatatt

SEQ ID NO: 13945 - DNA, 36 bp, synthetic construct
  misc_feature 1..36: note = Description of Artificial Sequence: Synthetic oligonucleotide
  source 1..36: mol_type = other DNA
gttgtggtttgattggaaaaaggaattaacgatatt

SEQ ID NO: 13946 - DNA, 36 bp, synthetic construct
  misc_feature 1..36: note = Description of Artificial Sequence: Synthetic oligonucleotide
  source 1..36: mol_type = other DNA
gttgtggtttgatttcaaaaaaggattcacgacatt

SEQ ID NO: 13947 - DNA, 36 bp, synthetic construct
  misc_feature 1..36: note = Description of Artificial Sequence: Synthetic oligonucleotide
  source 1..36: mol_type = other DNA
gttgtggtttgatttcgagatgggatgaccgatatt

SEQ ID NO: 13948 - DNA, 36 bp, synthetic construct
  misc_feature 1..36: note = Description of Artificial Sequence: Synthetic oligonucleotide
  source 1..36: mol_type = other DNA
gttgtggtttgatttcgatttctgatgtaaaataat

SEQ ID NO: 13949 - DNA, 36 bp, synthetic construct
  misc_feature 1..36: note = Description of Artificial Sequence: Synthetic oligonucleotide
  source 1..36: mol_type = other DNA
gttgtggtttgatttctatttttgatgtaaaataat

SEQ ID NO: 13950 - DNA, 36 bp, synthetic construct
  misc_feature 1..36: note = Description of Artificial Sequence: Synthetic oligonucleotide
  source 1..36: mol_type = other DNA
gttgtggtttgatttctttttttgatgtataataat

SEQ ID NO: 13951 - DNA, 36 bp, synthetic construct
  misc_feature 1..36: note = Description of Artificial Sequence: Synthetic oligonucleotide
  source 1..36: mol_type = other DNA
gttgtggtttgccgtgaggcagggatcggatacaat

SEQ ID NO: 13952 - DNA, 36 bp, synthetic construct
  misc_feature 1..36: note = Description of Artificial Sequence: Synthetic oligonucleotide
  source 1..36: mol_type = other DNA
gttgtggtttgctccctgattcggatcggttataat

SEQ ID NO: 13953 - DNA, 36 bp, synthetic construct
  misc_feature 1..36: note = Description of Artificial Sequence: Synthetic oligonucleotide
  source 1..36: mol_type = other DNA
gttgtggtttgctgacaaaaataggtttcatagaat

SEQ ID NO: 13954 - DNA, 47 bp, synthetic construct
  misc_feature 1..47: note = Description of Artificial Sequence: Synthetic oligonucleotide
  source 1..47: mol_type = other DNA
gttgtggtttgctttcaaaattatgtttgacgatttttatgtaaaat

SEQ ID NO: 13955 - DNA, 43 bp, synthetic construct
  misc_feature 1..43: note = Description of Artificial Sequence: Synthetic oligonucleotide
  source 1..43: mol_type = other DNA
gttgtggtttgctttcaagtttttgagtagtgatttttgtaca

SEQ ID NO: 13956 - DNA, 46 bp, synthetic construct
  misc_feature 1..46: note = Description of Artificial Sequence: Synthetic oligonucleotide
  source 1..46: mol_type = other DNA
gttgtggtttgctttcaatttgttctttgaagatatttaaaacaac

SEQ ID NO: 13957 - DNA, 46 bp, synthetic construct
  misc_feature 1..46: note = Description of Artificial Sequence: Synthetic oligonucleotide
  source 1..46: mol_type = other DNA
gttgtgtaaatcaaagatacgatactttttgaaagctactcacaac

SEQ ID NO: 13958 - DNA, 47 bp, synthetic construct
  misc_feature 1..47: note = Description of Artificial Sequence: Synthetic oligonucleotide
  source 1..47: mol_type = other DNA
gttgtgtaagaacgaatctacagaataatttgaaagcaaatcacaac

SEQ ID NO: 13959 - DNA, 47 bp, synthetic construct
  misc_feature 1..47: note = Description of Artificial Sequence: Synthetic oligonucleotide
  source 1..47: mol_type = other DNA
gttgtgtaagaactaaggtactcaaaagtttgaaagcaattcacaac

SEQ ID NO: 13960 - DNA, 47 bp, synthetic construct
  misc_feature 1..47: note = Description of Artificial Sequence: Synthetic oligonucleotide
  source 1..47: mol_type = other DNA
gttgtgtaagaactaagttagtaaaaaatttgaaagcaaatcacaac

SEQ ID NO: 13961 - DNA, 47 bp, synthetic construct
  misc_feature 1..47: note = Description of Artificial Sequence: Synthetic oligonucleotide
  source 1..47: mol_type = other DNA
gttgtgtaagaactaagttagtaaaagttttgaaagcaaatcacaac

SEQ ID NO: 13962 - DNA, 47 bp, synthetic construct
  misc_feature 1..47: note = Description of Artificial Sequence: Synthetic oligonucleotide
  source 1..47: mol_type = other DNA
gttgtgtaagacctaaggtaccgaataatttgaaagcaaatcacaac

SEQ ID NO: 13963 - DNA, 47 bp, synthetic construct
  misc_feature 1..47: note = Description of Artificial Sequence: Synthetic oligonucleotide
  source 1..47: mol_type = other DNA
gttgtgtaagatctaagctacataaaaatttgaaagcaaatcacaac

SEQ ID NO: 13964 - DNA, 47 bp, synthetic construct
  misc_feature 1..47: note = Description of Artificial Sequence: Synthetic oligonucleotide
  source 1..47: mol_type = other DNA
gttgtgtaatatctcaaagatactcaaaaatgaaagcaattcacaac

SEQ ID NO: 13965 - DNA, 36 bp, synthetic construct
  misc_feature 1..36: note = Description of Artificial Sequence: Synthetic oligonucleotide
  source 1..36: mol_type = other DNA
gttgtgtaattcaaaaatacgaaagcaattcacaac

SEQ ID NO: 13966 - DNA, 46 bp, synthetic construct
  misc_feature 1..46: note = Description of Artificial Sequence: Synthetic oligonucleotide
  source 1..46: mol_type = other DNA
gttgtgtatatcattcaagatttgtaactttgcaccataaaacagc

SEQ ID NO: 13967 - DNA, 47 bp, synthetic construct
  misc_feature 1..47: note = Description of Artificial Sequence: Synthetic oligonucleotide
  source 1..47: mol_type = other DNA
gttgtgtatatccttcaaattttgcaattgatacattcctatacaac

SEQ ID NO: 13968 - DNA, 46 bp, synthetic construct
  misc_feature 1..46: note = Description of Artificial Sequence: Synthetic oligonucleotide
  source 1..46: mol_type = other DNA
gttgtgtatcgtaaatgtaagaacgaatttgaaagcaattcacaac

SEQ ID NO: 13969 - DNA, 47 bp, synthetic construct
  misc_feature 1..47: note = Description of Artificial Sequence: Synthetic oligonucleotide
  source 1..47: mol_type = other DNA
gttgtgtatgtcattcaaaaaaagtaaacatatagtccataaacaat

SEQ ID NO: 13970 - DNA, 47 bp, synthetic construct
  misc_feature 1..47: note = Description of Artificial Sequence: Synthetic oligonucleotide
  source 1..47: mol_type = other DNA
gttgtgtatgtcattcaaaaaaagtaaacatatagtcctaaaacaat

SEQ ID NO: 13971 - DNA, 46 bp, synthetic construct
  misc_feature 1..46: note = Description of Artificial Sequence: Synthetic oligonucleotide
  source 1..46: mol_type = other DNA
gttgtgtatgtcattcaaaaaagtaacaaatacggactaaaacaag

SEQ ID NO: 13972 - DNA, 47 bp, synthetic construct
  misc_feature 1..47: note = Description of Artificial Sequence: Synthetic oligonucleotide
  source 1..47: mol_type = other DNA
gttgtgtatgtcattcaaaagagtaaacaaatacggactaaaacaat

SEQ ID NO: 13973 - DNA, 46 bp, synthetic construct
  misc_feature 1..46: note = Description of Artificial Sequence: Synthetic oligonucleotide
  source 1..46: mol_type = other DNA
gttgtgtatgtcattcaaatttagtaactttgcattgtaaaacaac

SEQ ID NO: 13974 - DNA, 46 bp, synthetic construct
  misc_feature 1..46: note = Description of Artificial Sequence: Synthetic oligonucleotide
  source 1..46: mol_type = other DNA
gttgtgtatgtctttcaaattttgtaactttgcagtcgtaaacaac

SEQ ID NO: 13975 - DNA, 47 bp, synthetic construct
  misc_feature 1..47: note = Description of Artificial Sequence: Synthetic oligonucleotide
  source 1..47: mol_type = other DNA
gttgtgtattgcatacaaaaatgttctttagactgatataaaacaac

SEQ ID NO: 13976 - DNA, 46 bp, synthetic construct
  misc_feature 1..46: note = Description of Artificial Sequence: Synthetic oligonucleotide
  source 1..46: mol_type = other DNA
gttgtgtcaaatatcagtagttcaaagaatgaaagcaaatcacaac

SEQ ID NO: 13977 - DNA, 46 bp, synthetic construct
  misc_feature 1..46: note = Description of Artificial Sequence: Synthetic oligonucleotide
  source 1..46: mol_type = other DNA
gttgtgtcaaatatcgttaaagcactttttgaaagcaaaccacaac

SEQ ID NO: 13978 - DNA, 47 bp, synthetic construct
  misc_feature 1..47: note = Description of Artificial Sequence: Synthetic oligonucleotide
  source 1..47: mol_type = other DNA
gttgtgtcagcactaagctactgaataaattgaaagcaaatcacaac

SEQ ID NO: 13979 - DNA, 46 bp, synthetic construct
  misc_feature 1..46: note = Description of Artificial Sequence: Synthetic oligonucleotide
  source 1..46: mol_type = other DNA
gttgtgtccggtatttcaaagatacattctgaaagcaattcacaac

SEQ ID NO: 13980 - DNA, 47 bp, synthetic construct
  misc_feature 1..47: note = Description of Artificial Sequence: Synthetic oligonucleotide
  source 1..47: mol_type = other DNA
gttgtgtcgtgtctcgaagataaacaattttgaaagcaattcacaac

SEQ ID NO: 13981 - DNA, 47 bp, synthetic construct
  misc_feature 1..47: note = Description of Artificial Sequence: Synthetic oligonucleotide
  source 1..47: mol_type = other DNA
gttgtgtctgacgacacaaagatattaatttgaaagcaattcacaac

SEQ ID NO: 13982 - DNA, 47 bp, synthetic construct
  misc_feature 1..47: note = Description of Artificial Sequence: Synthetic oligonucleotide
  source 1..47: mol_type = other DNA
gttgtgtctgataatgcaaagatactaattttaaagcaaatcacaac

SEQ ID NO: 13983 - DNA, 47 bp, synthetic construct
  misc_feature 1..47: note = Description of Artificial Sequence: Synthetic oligonucleotide
  source 1..47: mol_type = other DNA
gttgtgtgagatatgtcaaagatacaatttcgaaagctattcacaac

SEQ ID NO: 13984 - DNA, 47 bp, synthetic construct
  misc_feature 1..47: note = Description of Artificial Sequence: Synthetic oligonucleotide
  source 1..47: mol_type = other DNA
gttgtgtgagatatgtcaaagatacaatttcgagagctattcacaac

SEQ ID NO: 13985 - DNA, 47 bp, synthetic construct
  misc_feature 1..47: note = Description of Artificial Sequence: Synthetic oligonucleotide
  source 1..47: mol_type = other DNA
gttgtgtgttatcacgaagataacaaaatttgaaagcaattcacaac

SEQ ID NO: 13986 - DNA, 47 bp, synthetic construct
  misc_feature 1..47: note = Description of Artificial Sequence: Synthetic oligonucleotide
  source 1..47: mol_type = other DNA
gttgtgttacctaaaacaaagatacaaatttgaaagcaattcacaac

SEQ ID NO: 13987 - DNA, 36 bp, synthetic construct
  misc_feature 1..36: note = Description of Artificial Sequence: Synthetic oligonucleotide
  source 1..36: mol_type = other DNA
gttgtgttatatccatattctacatcaaaccacaac

SEQ ID NO: 13988 - DNA, 36 bp, synthetic construct
  misc_feature 1..36: note = Description of Artificial Sequence: Synthetic oligonucleotide
  source 1..36: mol_type = other DNA
gttgtgttatatcgtttctctacatcaaaccacaac

SEQ ID NO: 13989 - DNA, 47 bp, synthetic construct
  misc_feature 1..47: note = Description of Artificial Sequence: Synthetic oligonucleotide
  source 1..47: mol_type = other DNA
gttgtgttatatctcaaagatactcaaaaatgaaagcaattcacaac

SEQ ID NO: 13990 - DNA, 47 bp, synthetic construct
  misc_feature 1..47: note = Description of Artificial Sequence: Synthetic oligonucleotide
  source 1..47: mol_type = other DNA
gttgtgttatatctcaaagatactcaaaattgaaagcaattcacaac

SEQ ID NO: 13991 - DNA, 36 bp, synthetic construct
  misc_feature 1..36: note = Description of Artificial Sequence: Synthetic oligonucleotide
  source 1..36: mol_type = other DNA
gttgtgttatatctttcttctacatcaaaccacaac

SEQ ID NO: 13992 - DNA, 46 bp, synthetic construct
  misc_feature 1..46: note = Description of Artificial Sequence: Synthetic oligonucleotide
  source 1..46: mol_type = other DNA
gttgtgttcaagagttcaaagatacaattagaaagcaaatcacaac

SEQ ID NO: 13993 - DNA, 46 bp, synthetic construct
  misc_feature 1..46: note = Description of Artificial Sequence: Synthetic oligonucleotide
  source 1..46: mol_type = other DNA
gttgtgttcaataagtcaaagatacaatctgaaagcaattcacaac

SEQ ID NO: 13994 - DNA, 46 bp, synthetic construct
  misc_feature 1..46: note = Description of Artificial Sequence: Synthetic oligonucleotide
  source 1..46: mol_type = other DNA
gttgtgttcaatatttcaaagatacaaatcgaaagcaattcacaac

SEQ ID NO: 13995 - DNA, 47 bp, synthetic construct
  misc_feature 1..47: note = Description of Artificial Sequence: Synthetic oligonucleotide
  source 1..47: mol_type = other DNA
gttgtgttcgatcgaagatacactttaatttgaaagcaaatcacaac

SEQ ID NO: 13996 - DNA, 47 bp, synthetic construct
  misc_feature 1..47: note = Description of Artificial Sequence: Synthetic oligonucleotide
  source 1..47: mol_type = other DNA
gttgtgttgtaagtgcaaagatacaaaatttgaaagcaattcacaac

SEQ ID NO: 13997 - DNA, 47 bp, synthetic construct
  misc_feature 1..47: note = Description of Artificial Sequence: Synthetic oligonucleotide
  source 1..47: mol_type = other DNA
gttgtgttgtatcccaaagatacggataaatgaaagcaattcacaac

SEQ ID NO: 13998 - DNA, 47 bp, synthetic construct
  misc_feature 1..47: note = Description of Artificial Sequence: Synthetic oligonucleotide
  source 1..47: mol_type = other DNA
gttgtgttgtatcccaaagatacttaaaaatgaaagcaattcacaac

SEQ ID NO: 13999 - DNA, 47 bp, synthetic construct
  misc_feature 1..47: note = Description of Artificial Sequence: Synthetic oligonucleotide
  source 1..47: mol_type = other DNA
gttgtgttgtatctcaaagatactcaaaaatgaaagcaattcacaac

SEQ ID NO: 14000 - DNA, 47 bp, synthetic construct
  misc_feature 1..47: note = Description of Artificial Sequence: Synthetic oligonucleotide
  source 1..47: mol_type = other DNA
gttgtgttgtatctcaaagatactgaaaaatgaaagcaattcacaac

SEQ ID NO: 14001 - DNA, 47 bp, synthetic construct
  misc_feature 1..47: note = Description of Artificial Sequence: Synthetic oligonucleotide
  source 1..47: mol_type = other DNA
gttgtgtttgatagtacaaagatactaattttaaagcaattcacaac

SEQ ID NO: 14002 - DNA, 47 bp, synthetic construct
  misc_feature 1..47: note = Description of Artificial Sequence: Synthetic oligonucleotide
  source 1..47: mol_type = other DNA
gttgtgtttgctaatgcaaagatactaattttaaagctaatcacaac

SEQ ID NO: 14003 - DNA, 36 bp, synthetic construct
  misc_feature 1..36: note = Description of Artificial Sequence: Synthetic oligonucleotide
  source 1..36: mol_type = other DNA
gttgtgttttgatgtattttgaatgtgtctttcaat

SEQ ID NO: 14004 - DNA, 46 bp, synthetic construct
  misc_feature 1..46: note = Description of Artificial Sequence: Synthetic oligonucleotide
  source 1..46: mol_type = other DNA
gttgtgttttggtttcaattatttctttgacaatatttaaaacaac

SEQ ID NO: 14005 - DNA, 47 bp, synthetic construct
  misc_feature 1..47: note = Description of Artificial Sequence: Synthetic oligonucleotide
  source 1..47: mol_type = other DNA
gttgttaaagaactaagctacttaataatttgaaagcaaatcacaac

SEQ ID NO: 14006 - DNA, 46 bp, synthetic construct
  misc_feature 1..46: note = Description of Artificial Sequence: Synthetic oligonucleotide
  source 1..46: mol_type = other DNA
gttgttaatcctccataaaaatagaactttgaaagcaattcacaac

SEQ ID NO: 14007 - DNA, 46 bp, synthetic construct
  misc_feature 1..46: note = Description of Artificial Sequence: Synthetic oligonucleotide
  source 1..46: mol_type = other DNA
gttgttaatcgtctgtaaaaatagaactttgaaagcaattcacaac

SEQ ID NO: 14008 - DNA, 36 bp, synthetic construct
  misc_feature 1..36: note = Description of Artificial Sequence: Synthetic oligonucleotide
  source 1..36: mol_type = other DNA
gttgttaattattccatttttaaatcaaaccacaac

SEQ ID NO: 14009 - DNA, 47 bp, synthetic construct
  misc_feature 1..47: note = Description of Artificial Sequence: Synthetic oligonucleotide
  source 1..47: mol_type = other DNA
gttgttaattgcttcaaaagttgtatctttgcaatacaatcaacatc

SEQ ID NO: 14010 - DNA, 46 bp, synthetic construct
  misc_feature 1..46: note = Description of Artificial Sequence: Synthetic oligonucleotide
  source 1..46: mol_type = other DNA
gttgttaccaatatacaaagaacacaatttaagttcaattcacaac

SEQ ID NO: 14011 - DNA, 36 bp, synthetic construct
  misc_feature 1..36: note = Description of Artificial Sequence: Synthetic oligonucleotide
  source 1..36: mol_type = other DNA
gttgttagatagcaaaaatcacgagggtaacacaac

SEQ ID NO: 14012 - DNA, 36 bp, synthetic construct
  misc_feature 1..36: note = Description of Artificial Sequence: Synthetic oligonucleotide
  source 1..36: mol_type = other DNA
gttgttagatagcaaaatttacgagggtaacaaaac

SEQ ID NO: 14013 - DNA, 46 bp, synthetic construct
  misc_feature 1..46: note = Description of Artificial Sequence: Synthetic oligonucleotide
  source 1..46: mol_type = other DNA
gttgttagtgaccgctaaaatagaaaatttgaaagcaattcacaac

SEQ ID NO: 14014 - DNA, 36 bp, synthetic construct
  misc_feature 1..36: note = Description of Artificial Sequence: Synthetic oligonucleotide
  source 1..36: mol_type = other DNA
gttgttatatccttcaaaattacatcaaaccacaac

SEQ ID NO: 14015 - DNA, 47 bp, synthetic construct
  misc_feature 1..47: note = Description of Artificial Sequence: Synthetic oligonucleotide
  source 1..47: mol_type = other DNA
gttgttatcaaaaatagaaagaactgaaattgaaagcaaatcacaac

SEQ ID NO: 14016 - DNA, 47 bp, synthetic construct
  misc_feature 1..47: note = Description of Artificial Sequence: Synthetic oligonucleotide
  source 1..47: mol_type = other DNA
gttgttatcaaagaacgtaaatcaaaagtttgaaagcaaatcacaac

SEQ ID NO: 14017 - DNA, 47 bp, synthetic construct
  misc_feature 1..47: note = Description of Artificial Sequence: Synthetic oligonucleotide
  source 1..47: mol_type = other DNA
gttgttatcaaagaacgtaaatctaaagtttgaaagcaaatcacaac

SEQ ID NO: 14018 - DNA, 47 bp, synthetic construct
  misc_feature 1..47: note = Description of Artificial Sequence: Synthetic oligonucleotide
  source 1..47: mol_type = other DNA
gttgttatcaaagatagaaagaactcaaattgaaagcaaatcacaac

SEQ ID NO: 14019 - DNA, 47 bp, synthetic construct
  misc_feature 1..47: note = Description of Artificial Sequence: Synthetic oligonucleotide
  source 1..47: mol_type = other DNA
gttgttatcaaagatcgtatgataagagattgaaagcaaatcacaac

SEQ ID NO: 14020 - DNA, 47 bp, synthetic construct
  misc_feature 1..47: note = Description of Artificial Sequence: Synthetic oligonucleotide
  source 1..47: mol_type = other DNA
gttgttatcaaagatcgtcagaactgaaattgaaagcaaatcacaac

SEQ ID NO: 14021 - DNA, 47 bp, synthetic construct
  misc_feature 1..47: note = Description of Artificial Sequence: Synthetic oligonucleotide
  source 1..47: mol_type = other DNA
gttgttatcaaagatcgttgttcctgaaattgaaagcaaatcacaac

SEQ ID NO: 14022 - DNA, 47 bp, synthetic construct
  misc_feature 1..47: note = Description of Artificial Sequence: Synthetic oligonucleotide
  source 1..47: mol_type = other DNA
gttgttatcaaagatcgttgttccttagaatgaaagcaaatcacaac

SEQ ID NO: 14023 - DNA, 47 bp, synthetic construct
  misc_feature 1..47: note = Description of Artificial Sequence: Synthetic oligonucleotide
  source 1..47: mol_type = other DNA
gttgttatcaaagatctgataaaaagaatttgaaagcaaatcacaac

SEQ ID NO: 14024 - DNA, 46 bp, synthetic construct
  misc_feature 1..46: note = Description of Artificial Sequence: Synthetic oligonucleotide
  source 1..46: mol_type = other DNA
gttgttatcaataaatcaaagatacattctgaaagccatttacaac

SEQ ID NO: 14025 - DNA, 46 bp, synthetic construct
  misc_feature 1..46: note = Description of Artificial Sequence: Synthetic oligonucleotide
  source 1..46: mol_type = other DNA
gttgttatcaatcacaaaactacaaaatttgaaagcaattcacaac

SEQ ID NO: 14026 - DNA, 46 bp, synthetic construct
  misc_feature 1..46: note = Description of Artificial Sequence: Synthetic oligonucleotide
  source 1..46: mol_type = other DNA
gttgttatcaatcacaaaactataaaatttgaaagcaattcacaac

SEQ ID NO: 14027 - DNA, 46 bp, synthetic construct
  misc_feature 1..46: note = Description of Artificial Sequence: Synthetic oligonucleotide
  source 1..46: mol_type = other DNA
gttgttatcaatcgcaaaactacaaaatttgaaagcaattcacaac

SEQ ID NO: 14028 - DNA, 47 bp, synthetic construct
  misc_feature 1..47: note = Description of Artificial Sequence: Synthetic oligonucleotide
  source 1..47: mol_type = other DNA
gttgttatcaatcttgcaaagataaaaattttaaagcaattcacaac

SEQ ID NO: 14029 - DNA, 36 bp, synthetic construct
  misc_feature 1..36: note = Description of Artificial Sequence: Synthetic oligonucleotide
  source 1..36: mol_type = other DNA
gttgttattcattataattttgcatcaagccacaac

SEQ ID NO: 14030 - DNA, 47 bp, synthetic construct
  misc_feature 1..47: note = Description of Artificial Sequence: Synthetic oligonucleotide
  source 1..47: mol_type = other DNA
gttgttattgataccacaaaggtaagacttttcaagcaaatcacaac

SEQ ID NO: 14031 - DNA, 47 bp, synthetic construct
  misc_feature 1..47: note = Description of Artificial Sequence: Synthetic oligonucleotide
  source 1..47: mol_type = other DNA
gttgttattgatactgcgaagcagaaactttttaagcaattcacaac

SEQ ID NO: 14032 - DNA, 47 bp, synthetic construct
  misc_feature 1..47: note = Description of Artificial Sequence: Synthetic oligonucleotide
  source 1..47: mol_type = other DNA
gttgttattgcacctacaaaggtactgaatttctagcaaatcacaac

SEQ ID NO: 14033 - DNA, 47 bp, synthetic construct
  misc_feature 1..47: note = Description of Artificial Sequence: Synthetic oligonucleotide
  source 1..47: mol_type = other DNA
gttgttattgcagatgcaaagatactaattttaaagcaaatcacaac

SEQ ID NO: 14034 - DNA, 47 bp, synthetic construct
  misc_feature 1..47: note = Description of Artificial Sequence: Synthetic oligonucleotide
  source 1..47: mol_type = other DNA
gttgttattgctggagcaaagatactaaattctaagcaagtcacaac

SEQ ID NO: 14035 - DNA, 36 bp, synthetic construct
  misc_feature 1..36: note = Description of Artificial Sequence: Synthetic oligonucleotide
  source 1..36: mol_type = other DNA
gttgttatttgcttgaaaaaatgtatctttgacaac

SEQ ID NO: 14036 - DNA, 47 bp, synthetic construct
  misc_feature 1..47: note = Description of Artificial Sequence: Synthetic oligonucleotide
  source 1..47: mol_type = other DNA
gttgttcagaatatcaaagatacaattttttgaaagcaattcacaac

SEQ ID NO: 14037 - DNA, 46 bp, synthetic construct
  misc_feature 1..46: note = Description of Artificial Sequence: Synthetic oligonucleotide
  source 1..46: mol_type = other DNA
gttgttccaaatatcagttgttcaaagaatgaaagcaaatcacaac

SEQ ID NO: 14038 - DNA, 46 bp, synthetic construct
  misc_feature 1..46: note = Description of Artificial Sequence: Synthetic oligonucleotide
  source 1..46: mol_type = other DNA
gttgttccaaatatcagttgtttaaagattgaaagcaaatcacaac

SEQ ID NO: 14039 - DNA, 47 bp, synthetic construct
  misc_feature 1..47: note = Description of Artificial Sequence: Synthetic oligonucleotide
  source 1..47: mol_type = other DNA
gttgttccagataccaaaggtacaaacttttgagagcaagtcacaac

SEQ ID NO: 14040 - DNA, 47 bp, synthetic construct
  misc_feature 1..47: note = Description of Artificial Sequence: Synthetic oligonucleotide
  source 1..47: mol_type = other DNA
gttgttcccaatacttcaaagatactaaaaaggaagcaattcacaac

SEQ ID NO: 14041 - DNA, 47 bp, synthetic construct
  misc_feature 1..47: note = Description of Artificial Sequence: Synthetic oligonucleotide
  source 1..47: mol_type = other DNA
gttgttcccggtagttcaaatatactaaattgaaagcaaatcacaac

SEQ ID NO: 14042 - DNA, 27 bp, synthetic construct
  misc_feature 1..27: note = Description of Artificial Sequence: Synthetic oligonucleotide
  source 1..27: mol_type = other DNA
gttgttcctaccctccatttgaggtgc

SEQ ID NO: 14043 - DNA, 36 bp, synthetic construct
  misc_feature 1..36: note = Description of Artificial Sequence: Synthetic oligonucleotide
  source 1..36: mol_type = other DNA
gttgttccttattctacttctacatcaaaccacaac

SEQ ID NO: 14044 - DNA, 47 bp, synthetic construct
  misc_feature 1..47: note = Description of Artificial Sequence: Synthetic oligonucleotide
  source 1..47: mol_type = other DNA
gttgttcgaggtatttcaaagatcacatttaatcagcaattcacaac

SEQ ID NO: 14045 - DNA, 36 bp, synthetic construct
  misc_feature 1..36: note = Description of Artificial Sequence: Synthetic oligonucleotide
  source 1..36: mol_type = other DNA
gttgttctttattctccttctacatcgaaccacaac

SEQ ID NO: 14046 - DNA, 47 bp, synthetic construct
  misc_feature 1..47: note = Description of Artificial Sequence: Synthetic oligonucleotide
  source 1..47: mol_type = other DNA
gttgttgaagacctaaggtacttaataatttgaaagcaaatcacaac

SEQ ID NO: 14047 - DNA, 47 bp, synthetic construct
  misc_feature 1..47: note = Description of Artificial Sequence: Synthetic oligonucleotide
  source 1..47: mol_type = other DNA
gttgttgcaaatatatcaaagttccttttttgaaagcgaatcacaac

SEQ ID NO: 14048 - DNA, 46 bp, synthetic construct
  misc_feature 1..46: note = Description of Artificial Sequence: Synthetic oligonucleotide
  source 1..46: mol_type = other DNA
gttgttgcaaatatcaatatttcaaagttcttaagcaaatcacaac

SEQ ID NO: 14049 - DNA, 46 bp, synthetic construct
  misc_feature 1..46: note = Description of Artificial Sequence: Synthetic oligonucleotide
  source 1..46: mol_type = other DNA
gttgttgcaaatatcagttgttcaaagaatgaaagcaaatcacaac

SEQ ID NO: 14050 - DNA, 46 bp, synthetic construct
  misc_feature 1..46: note = Description of Artificial Sequence: Synthetic oligonucleotide
  source 1..46: mol_type = other DNA
gttgttgcaaatttatcaaagttcctttttgaatcctattcacaac

SEQ ID NO: 14051 - DNA, 47 bp, synthetic construct
  misc_feature 1..47: note = Description of Artificial Sequence: Synthetic oligonucleotide
  source 1..47: mol_type = other DNA
gttgttgcacattgttcaaatatacgacttaaaaagcaattcatacc

SEQ ID NO: 14052 - DNA, 47 bp, synthetic construct
  misc_feature 1..47: note = Description of Artificial Sequence: Synthetic oligonucleotide
  source 1..47: mol_type = other DNA
gttgttgcgaactatgtcaaagatacaaaataaatgcaaatcacaac

SEQ ID NO: 14053 - DNA, 47 bp, synthetic construct
  misc_feature 1..47: note = Description of Artificial Sequence: Synthetic oligonucleotide
  source 1..47: mol_type = other DNA
gttgttgctgataccaaaggtactaaattctgaaagcaattcacaac

SEQ ID NO: 14054 - DNA, 47 bp, synthetic construct
  misc_feature 1..47: note = Description of Artificial Sequence: Synthetic oligonucleotide
  source 1..47: mol_type = other DNA
gttgttgctggtatctaagatactaagttttgaaagcaattcacaac

SEQ ID NO: 14055 - DNA, 47 bp, synthetic construct
  misc_feature 1..47: note = Description of Artificial Sequence: Synthetic oligonucleotide
  source 1..47: mol_type = other DNA
gttgttgcttatagtacaaaggtattaaaattcaagcaaatcacaac

SEQ ID NO: 14056 - DNA, 47 bp, synthetic construct
  misc_feature 1..47: note = Description of Artificial Sequence: Synthetic oligonucleotide
  source 1..47: mol_type = other DNA
gttgttgcttatatagcaaaggtacaattttgaaagcaattcacaac

SEQ ID NO: 14057 - DNA, 46 bp, synthetic construct
  misc_feature 1..46: note = Description of Artificial Sequence: Synthetic oligonucleotide
  source 1..46: mol_type = other DNA
gttgttggaaatcacaaagatacaaattttgaaagtaattcacaac

SEQ ID NO: 14058 - DNA, 46 bp, synthetic construct
  misc_feature 1..46: note = Description of Artificial Sequence: Synthetic oligonucleotide
  source 1..46: mol_type = other DNA
gttgttgggagtcacaaagatacaaattttgaaagtaattcacaac

SEQ ID NO: 14059 - DNA, 41 bp, synthetic construct
  misc_feature 1..41: note = Description of Artificial Sequence: Synthetic oligonucleotide
  source 1..41: mol_type = other DNA
gttgttgtaaatatcagtaaatcaaagaaagaaagcaattc

SEQ ID NO: 14060 - DNA, 46 bp, synthetic construct
  misc_feature 1..46: note = Description of Artificial Sequence: Synthetic oligonucleotide
  source 1..46: mol_type = other DNA
gttgttgtaaatatcagtagttcaaagaatgaaagcaaatcacaac

SEQ ID NO: 14061 - DNA, 46 bp, synthetic construct
  misc_feature 1..46: note = Description of Artificial Sequence: Synthetic oligonucleotide
  source 1..46: mol_type = other DNA
gttgttgtaaatatcagtatttcaaagaatgaaagcaaatcacaac

SEQ ID NO: 14062 - DNA, 47 bp, synthetic construct
  misc_feature 1..47: note = Description of Artificial Sequence: Synthetic oligonucleotide
  source 1..47: mol_type = other DNA
gttgttgtagacctctaagctacggataattgaaagcaaatcacaac

SEQ ID NO: 14063 - DNA, 47 bp, synthetic construct
  misc_feature 1..47: note = Description of Artificial Sequence: Synthetic oligonucleotide
  source 1..47: mol_type = other DNA
gttgttgtcaataggtcaaagatcagaaattgaaagcaaatcacaac

SEQ ID NO: 14064 - DNA, 47 bp, synthetic construct
  misc_feature 1..47: note = Description of Artificial Sequence: Synthetic oligonucleotide
  source 1..47: mol_type = other DNA
gttgttgtcaatctatcaaagatagcattctgaaagcaaatcacaac

SEQ ID NO: 14065 - DNA, 47 bp, synthetic construct
  misc_feature 1..47: note = Description of Artificial Sequence: Synthetic oligonucleotide
  source 1..47: mol_type = other DNA
gttgttgtgtatctcaaagatactgaaaaatgaaagcaattcacaac

SEQ ID NO: 14066 - DNA, 47 bp, synthetic construct
  misc_feature 1..47: note = Description of Artificial Sequence: Synthetic oligonucleotide
  source 1..47: mol_type = other DNA
gttgttgttaaatatagcaaagaacaaatctgaaagcaaatcacaac

SEQ ID NO: 14067 - DNA, 47 bp, synthetic construct
  misc_feature 1..47: note = Description of Artificial Sequence: Synthetic oligonucleotide
  source 1..47: mol_type = other DNA
gttgttgttcaaagaacggaaaatacattttgaaagcaaatcacaac

SEQ ID NO: 14068 - DNA, 47 bp, synthetic construct
  misc_feature 1..47: note = Description of Artificial Sequence: Synthetic oligonucleotide
  source 1..47: mol_type = other DNA
gttgttgttcaatatgccaaagtacaaatctgaaagcaaatcacaac

SEQ ID NO: 14069 - DNA, 36 bp, synthetic construct
  misc_feature 1..36: note = Description of Artificial Sequence: Synthetic oligonucleotide
  source 1..36: mol_type = other DNA
gttgttgttcccagttatcgcttggtatgatataat

SEQ ID NO: 14070 - DNA, 36 bp, synthetic construct
  misc_feature 1..36: note = Description of Artificial Sequence: Synthetic oligonucleotide
  source 1..36: mol_type = other DNA
gttgttgttcccggttatcgcttggtatgatataat

SEQ ID NO: 14071 - DNA, 47 bp, synthetic construct
  misc_feature 1..47: note = Description of Artificial Sequence: Synthetic oligonucleotide
  source 1..47: mol_type = other DNA
gttgttgttgctaccacaaaggtacaaattttcaagcaaatcacaac

SEQ ID NO: 14072 - DNA, 47 bp, synthetic construct
  misc_feature 1..47: note = Description of Artificial Sequence: Synthetic oligonucleotide
  source 1..47: mol_type = other DNA
gttgttgttgctaccacaaaggtacatattttcaagcaaatcacaac

SEQ ID NO: 14073 - DNA, 47 bp, synthetic construct
  misc_feature 1..47: note = Description of Artificial Sequence: Synthetic oligonucleotide
  source 1..47: mol_type = other DNA
gttgttgtttcaagggcaaagatacaaaattaaaagcaattcacaac

SEQ ID NO: 14074 - DNA, 47 bp, synthetic construct
  misc_feature 1..47: note = Description of Artificial Sequence: Synthetic oligonucleotide
  source 1..47: mol_type = other DNA
gttgtttaaaagctaagctacattaaaaattgaaagcaaatcacaac

SEQ ID NO: 14075 - DNA, 47 bp, synthetic construct
  misc_feature 1..47: note = Description of Artificial Sequence: Synthetic oligonucleotide
  source 1..47: mol_type = other DNA
gttgtttaagaactaagttacttgaaattttgaaagcaattcacaac

SEQ ID NO: 14076 - DNA, 47 bp, synthetic construct
  misc_feature 1..47: note = Description of Artificial Sequence: Synthetic oligonucleotide
  source 1..47: mol_type = other DNA
gttgtttaagaccctattggggtgaagcaaattcagctaatcacaac

SEQ ID NO: 14077 - DNA, 36 bp, synthetic construct
  misc_feature 1..36: note = Description of Artificial Sequence: Synthetic oligonucleotide
  source 1..36: mol_type = other DNA
gttgtttaagttatcaattcgtcagcaaatcacaac

SEQ ID NO: 14078 - DNA, 46 bp, synthetic construct
  misc_feature 1..46: note = Description of Artificial Sequence: Synthetic oligonucleotide
  source 1..46: mol_type = other DNA
gttgtttagaaactaagttagtttaaaattgaaagcaattcacaac

SEQ ID NO: 14079 - DNA, 47 bp, synthetic construct
  misc_feature 1..47: note = Description of Artificial Sequence: Synthetic oligonucleotide
  source 1..47: mol_type = other DNA
gttgtttataatcaatgtcaatgttctctttttaagcaattcacaac

SEQ ID NO: 14080 - DNA, 47 bp, synthetic construct
  misc_feature 1..47: note = Description of Artificial Sequence: Synthetic oligonucleotide
  source 1..47: mol_type = other DNA
gttgtttataatgtcaaagatacaattttttgaaagctaatcacaac

SEQ ID NO: 14081 - DNA, 47 bp, synthetic construct
  misc_feature 1..47: note = Description of Artificial Sequence: Synthetic oligonucleotide
  source 1..47: mol_type = other DNA
gttgtttataccagtgcaaagatacgaaatttttagcaattcacaac

SEQ ID NO: 14082 - DNA, 47 bp, synthetic construct
  misc_feature 1..47: note = Description of Artificial Sequence: Synthetic oligonucleotide
  source 1..47: mol_type = other DNA
gttgtttatactggtgcaaagatacgaaatttttagctaatcacaac

SEQ ID NO: 14083 - DNA, 47 bp, synthetic construct
  misc_feature 1..47: note = Description of Artificial Sequence: Synthetic oligonucleotide
  source 1..47: mol_type = other DNA
gttgtttatcaagtcaaagatacaattttttgaaagcaaatcacaac

SEQ ID NO: 14084 - DNA, 47 bp, synthetic construct
  misc_feature 1..47: note = Description of Artificial Sequence: Synthetic oligonucleotide
  source 1..47: mol_type = other DNA
gttgtttatcaatgtcaaagatacaatttttgaaagcaaatcacaac

SEQ ID NO: 14085 - DNA, 47 bp, synthetic construct
  misc_feature 1..47: note = Description of Artificial Sequence: Synthetic oligonucleotide
  source 1..47: mol_type = other DNA
gttgtttatcagaatgtcaaagttcgtttttgaaagcaaatcacaac

SEQ ID NO: 14086 - DNA, 47 bp, synthetic construct
  misc_feature 1..47: note = Description of Artificial Sequence: Synthetic oligonucleotide
  source 1..47: mol_type = other DNA
gttgtttatcaggaaatcaaagatacaatttgaaagcaaatcacaac

SEQ ID NO: 14087 - DNA, 47 bp, synthetic construct
  misc_feature 1..47: note = Description of Artificial Sequence: Synthetic oligonucleotide
  source 1..47: mol_type = other DNA
gttgtttatcagtaagtcaaagatacaatttgaaagcaaatcacaac

SEQ ID NO: 14088 - DNA, 44 bp, synthetic construct
  misc_feature 1..44: note = Description of Artificial Sequence: Synthetic oligonucleotide
  source 1..44: mol_type = other DNA
gttgtttatcagtaagtcaaagatacattttgaaagcaaatcac

SEQ ID NO: 14089 - DNA, 47 bp, synthetic construct
  misc_feature 1..47: note = Description of Artificial Sequence: Synthetic oligonucleotide
  source 1..47: mol_type = other DNA
gttgtttatcagtaagtcaaagatacattttgaaagcaaatcacaac

SEQ ID NO: 14090 - DNA, 47 bp, synthetic construct
  misc_feature 1..47: note = Description of Artificial Sequence: Synthetic oligonucleotide
  source 1..47: mol_type = other DNA
gttgtttatcagtagctcaaagatacattttgaaagcaaatcacaac

SEQ ID NO: 14091 - DNA, 32 bp, synthetic construct
  misc_feature 1..32: note = Description of Artificial Sequence: Synthetic oligonucleotide
  source 1..32: mol_type = other DNA
gttgtttatcatcttgttcctacatcaaacca

SEQ ID NO: 14092 - DNA, 36 bp, synthetic construct
  misc_feature 1..36: note = Description of Artificial Sequence: Synthetic oligonucleotide
  source 1..36: mol_type = other DNA
gttgtttatcctttgaaaattacatcaaaccacaac

SEQ ID NO: 14093 - DNA, 36 bp, synthetic construct
  misc_feature 1..36: note = Description of Artificial Sequence: Synthetic oligonucleotide
  source 1..36: mol_type = other DNA
gttgtttatctgtctattcctacatcaaaccacaac

SEQ ID NO: 14094 - DNA, 47 bp, synthetic construct
  misc_feature 1..47: note = Description of Artificial Sequence: Synthetic oligonucleotide
  source 1..47: mol_type = other DNA
gttgtttatgacattacaaaggtactaatttgtcagcaaatcacaac

SEQ ID NO: 14095 - DNA, 47 bp, synthetic construct
  misc_feature 1..47: note = Description of Artificial Sequence: Synthetic oligonucleotide
  source 1..47: mol_type = other DNA
gttgtttatgataatgtaaagataccattttggagcctattcacaac

SEQ ID NO: 14096 - DNA, 46 bp, synthetic construct
  misc_feature 1..46: note = Description of Artificial Sequence: Synthetic oligonucleotide
  source 1..46: mol_type = other DNA
gttgtttatgatatgcaaagatactaattcgaaagcaattcacaac

SEQ ID NO: 14097 - DNA, 47 bp, synthetic construct
  misc_feature 1..47: note = Description of Artificial Sequence: Synthetic oligonucleotide
  source 1..47: mol_type = other DNA
gttgtttatgatattgcaaagatatacatttggaagcaaatcacaac

SEQ ID NO: 14098 - DNA, 47 bp, synthetic construct
  misc_feature 1..47: note = Description of Artificial Sequence: Synthetic oligonucleotide
  source 1..47: mol_type = other DNA
gttgtttatgattagtatgcgatacgattttgtcagctattcacaac

SEQ ID NO: 14099 - DNA, 47 bp, synthetic construct
  misc_feature 1..47: note = Description of Artificial Sequence: Synthetic oligonucleotide
  source 1..47: mol_type = other DNA
gttgtttatgcatctacaaaggtaagaaattttaagcaaatcacaac

SEQ ID NO: 14100 - DNA, 47 bp, synthetic construct
  misc_feature 1..47: note = Description of Artificial Sequence: Synthetic oligonucleotide
  source 1..47: mol_type = other DNA
gttgtttatgcctctgcaaagatactaattttttagcaaatcacaac

SEQ ID NO: 14101 - DNA, 47 bp, synthetic construct
  misc_feature 1..47: note = Description of Artificial Sequence: Synthetic oligonucleotide
  source 1..47: mol_type = other DNA
gttgtttatgctgatgcaaaggtactaattttttagcaaatcacaac

SEQ ID NO: 14102 - DNA, 41 bp, synthetic construct
  misc_feature 1..41: note = Description of Artificial Sequence: Synthetic oligonucleotide
  source 1..41: mol_type = other DNA
gttgtttatgctggatgcaaaggtactaaatttttagcaaa

SEQ ID NO: 14103 - DNA, 36 bp, synthetic construct
  misc_feature 1..36: note = Description of Artificial Sequence: Synthetic oligonucleotide
  source 1..36: mol_type = other DNA
gttgtttattatttcatttcatcatcaaaccacaac

SEQ ID NO: 14104 - DNA, 41 bp, synthetic construct
  misc_feature 1..41: note = Description of Artificial Sequence: Synthetic oligonucleotide
  source 1..41: mol_type = other DNA
gttgtttcaaagagcaaagatacaagataaatgcaagcaat

SEQ ID NO: 14105 - DNA, 47 bp, synthetic construct
  misc_feature 1..47: note = Description of Artificial Sequence: Synthetic oligonucleotide
  source 1..47: mol_type = other DNA
gttgtttcaaaggccaaagatacaagattttgaaagctattcacaac

SEQ ID NO: 14106 - DNA, 47 bp, synthetic construct
  misc_feature 1..47: note = Description of Artificial Sequence: Synthetic oligonucleotide
  source 1..47: mol_type = other DNA
gttgtttcacgaagtcaaagatactaattttgaaagcaaatcacaac

SEQ ID NO: 14107 - DNA, 47 bp, synthetic construct
  misc_feature 1..47: note = Description of Artificial Sequence: Synthetic oligonucleotide
  source 1..47: mol_type = other DNA
gttgtttcagactacaaagatacaaatttttgaaagcaattcacaac

SEQ ID NO: 14108 - DNA, 47 bp, synthetic construct
  misc_feature 1..47: note = Description of Artificial Sequence: Synthetic oligonucleotide
  source 1..47: mol_type = other DNA
gttgtttccaatgggtcaaagatactaatttgaaagcaaatcacaac

SEQ ID NO: 14109 - DNA, 47 bp, synthetic construct
  misc_feature 1..47: note = Description of Artificial Sequence: Synthetic oligonucleotide
  source 1..47: mol_type = other DNA
gttgtttccaatggttcaaagatacaaatttgaaagtaaatcacaac

SEQ ID NO: 14110 - DNA, 47 bp, synthetic construct
  misc_feature 1..47: note = Description of Artificial Sequence: Synthetic oligonucleotide
  source 1..47: mol_type = other DNA
gttgtttccaatggttcaaagatactaaaatgaaagcaaatcacaac

SEQ ID NO: 14111 - DNA, 47 bp, synthetic construct
  misc_feature 1..47: note = Description of Artificial Sequence: Synthetic oligonucleotide
  source 1..47: mol_type = other DNA
gttgtttccaatggttcaaagatactaatttgaaagcaaatcacaac

SEQ ID NO: 14112 - DNA, 47 bp, synthetic construct
  misc_feature 1..47: note = Description of Artificial Sequence: Synthetic oligonucleotide
  source 1..47: mol_type = other DNA
gttgtttccaatgtttcaaagatactaaaatgagagcaaatcacaac

SEQ ID NO: 14113 - DNA, 47 bp, synthetic construct
  misc_feature 1..47: note = Description of Artificial Sequence: Synthetic oligonucleotide
  source 1..47: mol_type = other DNA
gttgtttccgatgcaaatatacacaaattttgaaagcaattcacaac

SEQ ID NO: 14114 - DNA, 47 bp, synthetic construct
  misc_feature 1..47: note = Description of Artificial Sequence: Synthetic oligonucleotide
  source 1..47: mol_type = other DNA
gttgtttcggatgtcaaagatacaaagatttgaaagctattcacaac

SEQ ID NO: 14115 - DNA, 36 bp, synthetic construct
  misc_feature 1..36: note = Description of Artificial Sequence: Synthetic oligonucleotide
  source 1..36: mol_type = other DNA
gttgtttctcattccaattctacatcaaaccacaac

SEQ ID NO: 14116 - DNA, 47 bp, synthetic construct
  misc_feature 1..47: note = Description of Artificial Sequence: Synthetic oligonucleotide
  source 1..47: mol_type = other DNA
gttgtttctcctcttgcaaagatactcatttgaaagcaattcacaac

SEQ ID NO: 14117 - DNA, 47 bp, synthetic construct
  misc_feature 1..47: note = Description of Artificial Sequence: Synthetic oligonucleotide
  source 1..47: mol_type = other DNA
gttgtttctgacgcaaatatacacaaattttgaaagcaattcacaac

SEQ ID NO: 14118 - DNA, 46 bp, synthetic construct
  misc_feature 1..46: note = Description of Artificial Sequence: Synthetic oligonucleotide
  source 1..46: mol_type = other DNA
gttgtttctgataattaaagataccattttgaagcctattcacaac

SEQ ID NO: 14119 - DNA, 47 bp, synthetic construct
  misc_feature 1..47: note = Description of Artificial Sequence: Synthetic oligonucleotide
  source 1..47: mol_type = other DNA
gttgtttgacgaagtcaaagatacaatttttgaaagcaaatcacaac

SEQ ID NO: 14120 - DNA, 35 bp, synthetic construct
  misc_feature 1..35: note = Description of Artificial Sequence: Synthetic oligonucleotide
  source 1..35: mol_type = other DNA
gttgtttgagatcacaaagttacgaatttgaaagc

SEQ ID NO: 14121 - DNA, 45 bp, synthetic construct
  misc_feature 1..45: note = Description of Artificial Sequence: Synthetic oligonucleotide
  source 1..45: mol_type = other DNA
gttgtttgaggtcacaaagttacgaatttgaaagcaactcacaaa

SEQ ID NO: 14122 - DNA, 45 bp, synthetic construct
  misc_feature 1..45: note = Description of Artificial Sequence: Synthetic oligonucleotide
  source 1..45: mol_type = other DNA
gttgtttgaggtcacaaagttacgaatttgaaagcaactcacaac

SEQ ID NO: 14123 - DNA, 45 bp, synthetic construct
  misc_feature 1..45: note = Description of Artificial Sequence: Synthetic oligonucleotide
  source 1..45: mol_type = other DNA
gttgtttgaggtcacaaagttacgaatttgaaagcaactcacaat

SEQ ID NO: 14124 - DNA, 45 bp, synthetic construct
  misc_feature 1..45: note = Description of Artificial Sequence: Synthetic oligonucleotide
  source 1..45: mol_type = other DNA
gttgtttgaggtcacaaagttacgaatttgaaagcaattcacaac

SEQ ID NO: 14125 - DNA, 45 bp, synthetic construct
  misc_feature 1..45: note = Description of Artificial Sequence: Synthetic oligonucleotide
  source 1..45: mol_type = other DNA
gttgtttgaggtcacaaagttacgattttgaaagcaactcacaac

SEQ ID NO: 14126 - DNA, 47 bp, synthetic construct
  misc_feature 1..47: note = Description of Artificial Sequence: Synthetic oligonucleotide
  source 1..47: mol_type = other DNA
gttgtttgccaagtgcaaagatagtaaaactgaaagcaaatcacaac

SEQ ID NO: 14127 - DNA, 46 bp, synthetic construct
  misc_feature 1..46: note = Description of Artificial Sequence: Synthetic oligonucleotide
  source 1..46: mol_type = other DNA
gttgtttgcgactacaaagatacaaattttttaagcaattcacaac

SEQ ID NO: 14128 - DNA, 47 bp, synthetic construct
  misc_feature 1..47: note = Description of Artificial Sequence: Synthetic oligonucleotide
  source 1..47: mol_type = other DNA
gttgtttgcgatactgcaaaagtacgatttttcaagcaaatcacaac

SEQ ID NO: 14129 - DNA, 39 bp, synthetic construct
  misc_feature 1..39: note = Description of Artificial Sequence: Synthetic oligonucleotide
  source 1..39: mol_type = other DNA
gttgtttgtgaatacaaagatacaaatttttgaaagcaa

SEQ ID NO: 14130 - DNA, 47 bp, synthetic construct
  misc_feature 1..47: note = Description of Artificial Sequence: Synthetic oligonucleotide
  source 1..47: mol_type = other DNA
gttgtttgtgcaggtgcaaaggtactaattttttagcaaatcacaac

SEQ ID NO: 14131 - DNA, 46 bp, synthetic construct
  misc_feature 1..46: note = Description of Artificial Sequence: Synthetic oligonucleotide
  source 1..46: mol_type = other DNA
gttgttttaaatattgtcaaagaaaaatttgaaagcaaatcacaac

SEQ ID NO: 14132 - DNA, 46 bp, synthetic construct
  misc_feature 1..46: note = Description of Artificial Sequence: Synthetic oligonucleotide
  source 1..46: mol_type = other DNA
gttgttttagagtgcaaagatacaaaatttgaaagcaattcacaac

SEQ ID NO: 14133 - DNA, 47 bp, synthetic construct
  misc_feature 1..47: note = Description of Artificial Sequence: Synthetic oligonucleotide
  source 1..47: mol_type = other DNA
gttgttttagataccacaaaggtacagattttcaagcaaatcacaac

SEQ ID NO: 14134 - DNA, 46 bp, synthetic construct
  misc_feature 1..46: note = Description of Artificial Sequence: Synthetic oligonucleotide
  source 1..46: mol_type = other DNA
gttgttttagattacaaagttacaaaatttgagtgatatacacaac

SEQ ID NO: 14135 - DNA, 46 bp, synthetic construct
  misc_feature 1..46: note = Description of Artificial Sequence: Synthetic oligonucleotide
  source 1..46: mol_type = other DNA
gttgttttagattgcaaagttacaaaatttgagtgatatacacaac

SEQ ID NO: 14136 - DNA, 36 bp, synthetic construct
  misc_feature 1..36: note = Description of Artificial Sequence: Synthetic oligonucleotide
  source 1..36: mol_type = other DNA
gttgttttatatcttgtttctacatcaaaccacaac

SEQ ID NO: 14137 - DNA, 47 bp, synthetic construct
  misc_feature 1..47: note = Description of Artificial Sequence: Synthetic oligonucleotide
  source 1..47: mol_type = other DNA
gttgttttcaatggttcaaagatactaaaatgaaagcaaatcacaac

SEQ ID NO: 14138 - DNA, 47 bp, synthetic construct
  misc_feature 1..47: note = Description of Artificial Sequence: Synthetic oligonucleotide
  source 1..47: mol_type = other DNA
gttgttttcaatggttcaaagatactaatttgaaagcaaatcacaac

SEQ ID NO: 14139 - DNA, 47 bp, synthetic construct
  misc_feature 1..47: note = Description of Artificial Sequence: Synthetic oligonucleotide
  source 1..47: mol_type = other DNA
gttgttttcaatgtgtcaaagatactaatttgaaaggaattcacaac

SEQ ID NO: 14140 - DNA, 47 bp, synthetic construct
  misc_feature 1..47: note = Description of Artificial Sequence: Synthetic oligonucleotide
  source 1..47: mol_type = other DNA
gttgttttcgaatgacaaagatacaaattttgaaagcaattcacaac

SEQ ID NO: 14141 - DNA, 46 bp, synthetic construct
  misc_feature 1..46: note = Description of Artificial Sequence: Synthetic oligonucleotide
  source 1..46: mol_type = other DNA
gttgtttttaatatcctcaaagaacaatttgaaagcaaatcacaac

SEQ ID NO: 14142 - DNA, 46 bp, synthetic construct
  misc_feature 1..46: note = Description of Artificial Sequence: Synthetic oligonucleotide
  source 1..46: mol_type = other DNA
gttgtttttaatatcctcaaagaactaattgaaagcaaatcacaac

SEQ ID NO: 14143 - DNA, 36 bp, synthetic construct
  misc_feature 1..36: note = Description of Artificial Sequence: Synthetic oligonucleotide
  source 1..36: mol_type = other DNA
gttgtttttagtcagttttttgcatcaagtcacaac

SEQ ID NO: 14144 - DNA, 46 bp, synthetic construct
  misc_feature 1..46: note = Description of Artificial Sequence: Synthetic oligonucleotide
  source 1..46: mol_type = other DNA
gttgtttttatcatatcaaagatacaaaatgaaaccaattcacaac

SEQ ID NO: 14145 - DNA, 36 bp, synthetic construct
  misc_feature 1..36: note = Description of Artificial Sequence: Synthetic oligonucleotide
  source 1..36: mol_type = other DNA
gtttaaaagtaattaaagatagcactactcccaaac

SEQ ID NO: 14146 - DNA, 36 bp, synthetic construct
  misc_feature 1..36: note = Description of Artificial Sequence: Synthetic oligonucleotide
  source 1..36: mol_type = other DNA
gtttaaataataccaattaattcaatccttaagaac

SEQ ID NO: 14147 - DNA, 36 bp, synthetic construct
  misc_feature 1..36: note = Description of Artificial Sequence: Synthetic oligonucleotide
  source 1..36: mol_type = other DNA
gtttaaataccatatgtttttacatcattctcaaac

SEQ ID NO: 14148 - DNA, 36 bp, synthetic construct
  misc_feature 1..36: note = Description of Artificial Sequence: Synthetic oligonucleotide
  source 1..36: mol_type = other DNA
gtttaaccatattcgtgaattacatcactctcaaac

SEQ ID NO: 14149 - DNA, 36 bp, synthetic construct
  misc_feature 1..36: note = Description of Artificial Sequence: Synthetic oligonucleotide
  source 1..36: mol_type = other DNA
gtttaagaatattacaaaataacaaagctctcaaac

SEQ ID NO: 14150 - DNA, 36 bp, synthetic construct
  misc_feature 1..36: note = Description of Artificial Sequence: Synthetic oligonucleotide
  source 1..36: mol_type = other DNA
gtttaagacagttacaaaacaacaaggctctcaaac

SEQ ID NO: 14151 - DNA, 27 bp, synthetic construct
  misc_feature 1..27: note = Description of Artificial Sequence: Synthetic oligonucleotide
  source 1..27: mol_type = other DNA
gtttaagtttatcaatatccatcatag

SEQ ID NO: 14152 - DNA, 36 bp, synthetic construct
  misc_feature 1..36: note = Description of Artificial Sequence: Synthetic oligonucleotide
  source 1..36: mol_type = other DNA
gtttaatacctatatgaaattacatcattctcaaac

SEQ ID NO: 14153 - DNA, 36 bp, synthetic construct
  misc_feature 1..36: note = Description of Artificial Sequence: Synthetic oligonucleotide
  source 1..36: mol_type = other DNA
gtttaatagcacttatagataacactgctctcaaac

SEQ ID NO: 14154 - DNA, 36 bp, synthetic construct
  misc_feature 1..36: note = Description of Artificial Sequence: Synthetic oligonucleotide
  source 1..36: mol_type = other DNA
gtttaatcaccatctgaaattacactactctcaaac

SEQ ID NO: 14155 - DNA, 36 bp, synthetic construct
  misc_feature 1..36: note = Description of Artificial Sequence: Synthetic oligonucleotide
  source 1..36: mol_type = other DNA
gtttaattaccctttaaatttacactactctcaaac

SEQ ID NO: 14156 - DNA, 36 bp, synthetic construct
  misc_feature 1..36: note = Description of Artificial Sequence: Synthetic oligonucleotide
  source 1..36: mol_type = other DNA
gtttagcctgatttaaatgttacacagctaccaaac

SEQ ID NO: 14157 - DNA, 36 bp, synthetic construct
  misc_feature 1..36: note = Description of Artificial Sequence: Synthetic oligonucleotide
  source 1..36: mol_type = other DNA
gtttaggagtggtgctgtcttatattactcttgaac

SEQ ID NO: 14158 - DNA, 36 bp, synthetic construct
  misc_feature 1..36: note = Description of Artificial Sequence: Synthetic oligonucleotide
  source 1..36: mol_type = other DNA
gtttagtagaattcaaaatttacatatctctcaaac

SEQ ID NO: 14159 - DNA, 36 bp, synthetic construct
  misc_feature 1..36: note = Description of Artificial Sequence: Synthetic oligonucleotide
  source 1..36: mol_type = other DNA
gtttagtcaccagtcagaatgtcactgcgccaaaac

SEQ ID NO: 14160 - DNA, 36 bp, synthetic construct
  misc_feature 1..36: note = Description of Artificial Sequence: Synthetic oligonucleotide
  source 1..36: mol_type = other DNA
gtttagtcactatataaaattacatcactctcaaac

SEQ ID NO: 14161 - DNA, 36 bp, synthetic construct
  misc_feature 1..36: note = Description of Artificial Sequence: Synthetic oligonucleotide
  source 1..36: mol_type = other DNA
gtttagttaccagtcagaatgtcactgcgccaaaac

SEQ ID NO: 14162 - DNA, 36 bp, synthetic construct
  misc_feature 1..36: note = Description of Artificial Sequence: Synthetic oligonucleotide
  source 1..36: mol_type = other DNA
gtttagttaccagttagaatgtcactgcgccaaaac

SEQ ID NO: 14163 - DNA, 36 bp, synthetic construct
  misc_feature 1..36: note = Description of Artificial Sequence: Synthetic oligonucleotide
  source 1..36: mol_type = other DNA
gtttagttaccatctaaaacaacacaactctcaaac

SEQ ID NO: 14164 - DNA, 47 bp, synthetic construct
  misc_feature 1..47: note = Description of Artificial Sequence: Synthetic oligonucleotide
  source 1..47: mol_type = other DNA
gtttatagagattgcaaaggtacaaaaaattgaaagcgattcacaac

SEQ ID NO: 14165 - DNA, 37 bp, synthetic construct
  misc_feature 1..37: note = Description of Artificial Sequence: Synthetic oligonucleotide
  source 1..37: mol_type = other DNA
gtttcaaaccacgtagttttgtgatataatttgcaac

SEQ ID NO: 14166 - DNA, 37 bp, synthetic construct
  misc_feature 1..37: note = Description of Artificial Sequence: Synthetic oligonucleotide
  source 1..37: mol_type = other DNA
gtttcaaactaagtactgatttggtatgatttgttag

SEQ ID NO: 14167 - DNA, 37 bp, synthetic construct
  misc_feature 1..37: note = Description of Artificial Sequence: Synthetic oligonucleotide
  source 1..37: mol_type = other DNA
gtttcaaactaagttgagtctagttataatttgttag

SEQ ID NO: 14168 - DNA, 37 bp, synthetic construct
  misc_feature 1..37: note = Description of Artificial Sequence: Synthetic oligonucleotide
  source 1..37: mol_type = other DNA
gtttcaaactaagttgtgtctagttataatttgttag

SEQ ID NO: 14169 - DNA, 36 bp, synthetic construct
  misc_feature 1..36: note = Description of Artificial Sequence: Synthetic oligonucleotide
  source 1..36: mol_type = other DNA
gtttcaataccctctgaatttacactgctctcaaac

SEQ ID NO: 14170 - DNA, 36 bp, synthetic construct
  misc_feature 1..36: note = Description of Artificial Sequence: Synthetic oligonucleotide
  source 1..36: mol_type = other DNA
gtttcaataccctctgaatttacattgctctcaaac

SEQ ID NO: 14171 - DNA, 32 bp, synthetic construct
  misc_feature 1..32: note = Description of Artificial Sequence: Synthetic oligonucleotide
  source 1..32: mol_type = other DNA
gtttcaatccacgcctccacgtgggaggcgac

SEQ ID NO: 14172 - DNA, 36 bp, synthetic construct
  misc_feature 1..36: note = Description of Artificial Sequence: Synthetic oligonucleotide
  source 1..36: mol_type = other DNA
gtttcaatcccctatggattaacactgctctcaaac

SEQ ID NO: 14173 - DNA, 37 bp, synthetic construct
  misc_feature 1..37: note = Description of Artificial Sequence: Synthetic oligonucleotide
  source 1..37: mol_type = other DNA
gtttcaatgatagcactgggtgggcctaaactgaaac

SEQ ID NO: 14174 - DNA, 36 bp, synthetic construct
  misc_feature 1..36: note = Description of Artificial Sequence: Synthetic oligonucleotide
  source 1..36: mol_type = other DNA
gtttcaatggtcttctaattaacacggctctaaaac

SEQ ID NO: 14175 - DNA, 32 bp, synthetic construct
  misc_feature 1..32: note = Description of Artificial Sequence: Synthetic oligonucleotide
  source 1..32: mol_type = other DNA
gtttcaattcacgcacccacgcggggtgcgac

SEQ ID NO: 14176 - DNA, 30 bp, synthetic construct
  misc_feature 1..30: note = Description of Artificial Sequence: Synthetic oligonucleotide
  source 1..30: mol_type = other DNA
gtttcaattcctcaaaggtacgattaaagc

SEQ ID NO: 14177 - DNA, 31 bp, synthetic construct
  misc_feature 1..31: note = Description of Artificial Sequence: Synthetic oligonucleotide
  source 1..31: mol_type = other DNA
gtttcaattcctttcaggttcagatgatatt

SEQ ID NO: 14178 - DNA, 37 bp, synthetic construct
  misc_feature 1..37: note = Description of Artificial Sequence: Synthetic oligonucleotide
  source 1..37: mol_type = other DNA
gtttcacagcctatctcaacaagtcagccactgaaac

SEQ ID NO: 14179 - DNA, 36 bp, synthetic construct
  misc_feature 1..36: note = Description of Artificial Sequence: Synthetic oligonucleotide
  source 1..36: mol_type = other DNA
gtttcactaccttatagatttacactattctcaaac

SEQ ID NO: 14180 - DNA, 36 bp, synthetic construct
  misc_feature 1..36: note = Description of Artificial Sequence: Synthetic oligonucleotide
  source 1..36: mol_type = other DNA
gtttcactcaactatgattttacactactctcaaac

SEQ ID NO: 14181 - DNA, 36 bp, synthetic construct
  misc_feature 1..36: note = Description of Artificial Sequence: Synthetic oligonucleotide
  source 1..36: mol_type = other DNA
gtttcagaagagtgttaaatcaataagttcaagtac

SEQ ID NO: 14182 - DNA, 36 bp, synthetic construct
  misc_feature 1..36: note = Description of Artificial Sequence: Synthetic oligonucleotide
  source 1..36: mol_type = other DNA
gtttcagaagcctgtcagatcaatgacctagaccac

SEQ ID NO: 14183 - DNA, 36 bp, synthetic construct
  misc_feature 1..36: note = Description of Artificial Sequence: Synthetic oligonucleotide
  source 1..36: mol_type = other DNA
gtttcagaaggatgttaaatcaattaggttaagacc

SEQ ID NO: 14184 - DNA, 36 bp, synthetic construct
  misc_feature 1..36: note = Description of Artificial Sequence: Synthetic oligonucleotide
  source 1..36: mol_type = other DNA
gtttcagagccctctggattcacactactctcaaac

SEQ ID NO: 14185 - DNA, 23 bp, synthetic construct
  misc_feature 1..23: note = Description of Artificial Sequence: Synthetic oligonucleotide
  source 1..23: mol_type = other DNA
gtttcagagccgtgtaatttcaa

SEQ ID NO: 14186 - DNA, 36 bp, synthetic construct
  misc_feature 1..36: note = Description of Artificial Sequence: Synthetic oligonucleotide
  source 1..36: mol_type = other DNA
gtttcagatgcctgtcagatcaaagacttagaccac

SEQ ID NO: 14187 - DNA, 36 bp, synthetic construct
  misc_feature 1..36: note = Description of Artificial Sequence: Synthetic oligonucleotide
  source 1..36: mol_type = other DNA
gtttcagatgcctgtcagatcaatgacctagaccac

SEQ ID NO: 14188 - DNA, 36 bp, synthetic construct
  misc_feature 1..36: note = Description of Artificial Sequence: Synthetic oligonucleotide
  source 1..36: mol_type = other DNA
gtttcagatgcctgtcagatcaatgactttgaccac

SEQ ID NO: 14189 - DNA, 36 bp, synthetic construct
  misc_feature 1..36: note = Description of Artificial Sequence: Synthetic oligonucleotide
  source 1..36: mol_type = other DNA
gtttcagcttgacaccaaaaagctttaaattttcgt

SEQ ID NO: 14190 - DNA, 36 bp, synthetic construct
  misc_feature 1..36: note = Description of Artificial Sequence: Synthetic oligonucleotide
  source 1..36: mol_type = other DNA
gtttcagcttgacaccaaacatctatagagtgatat

SEQ ID NO: 14191 - DNA, 36 bp, synthetic construct
  misc_feature 1..36: note = Description of Artificial Sequence: Synthetic oligonucleotide
  source 1..36: mol_type = other DNA
gtttcagtaccattcaatataacactactgtaaaac

SEQ ID NO: 14192 - DNA, 36 bp, synthetic construct
  misc_feature 1..36: note = Description of Artificial Sequence: Synthetic oligonucleotide
  source 1..36: mol_type = other DNA
gtttcagtaccttatagaattacactactctcaaac

SEQ ID NO: 14193 - DNA, 36 bp, synthetic construct
  misc_feature 1..36: note = Description of Artificial Sequence: Synthetic oligonucleotide
  source 1..36: mol_type = other DNA
gtttcagtactattcaatataacactactgtaaaac

SEQ ID NO: 14194 - DNA, 36 bp, synthetic construct
  misc_feature 1..36: note = Description of Artificial Sequence: Synthetic oligonucleotide
  source 1..36: mol_type = other DNA
gtttcagtagttgttagaagaatgtagtattggaac

SEQ ID NO: 14195 - DNA, 36 bp, synthetic construct
  misc_feature 1..36: note = Description of Artificial Sequence: Synthetic oligonucleotide
  source 1..36: mol_type = other DNA
gtttcagtatagcaaaaattatgagggtactaaaac

SEQ ID NO: 14196 - DNA, 37 bp, synthetic construct
  misc_feature 1..37: note = Description of Artificial Sequence: Synthetic oligonucleotide
  source 1..37: mol_type = other DNA
gtttcagtatcgagccttatgggataggctttgaaac

SEQ ID NO: 14197 - DNA, 37 bp, synthetic construct
  misc_feature 1..37: note = Description of Artificial Sequence: Synthetic oligonucleotide
  source 1..37: mol_type = other DNA
gtttcagtcgaagacctgcatgttataatactgatac

SEQ ID NO: 14198 - DNA, 37 bp, synthetic construct
  misc_feature 1..37: note = Description of Artificial Sequence: Synthetic oligonucleotide
  source 1..37: mol_type = other DNA
gtttcagtcgctgcttttgtgggataagctgtgacag

SEQ ID NO: 14199 - DNA, 37 bp, synthetic construct
  misc_feature 1..37: note = Description of Artificial Sequence: Synthetic oligonucleotide
  source 1..37: mol_type = other DNA
gtttcagtcgtagggctattgggatacgctctttaac

SEQ ID NO: 14200 - DNA, 36 bp, synthetic construct
  misc_feature 1..36: note = Description of Artificial Sequence: Synthetic oligonucleotide
  source 1..36: mol_type = other DNA
gtttcagtgctatagctcgtagcgtcctgatctctc

SEQ ID NO: 14201 - DNA, 37 bp, synthetic construct
  misc_feature 1..37: note = Description of Artificial Sequence: Synthetic oligonucleotide
  source 1..37: mol_type = other DNA
gtttcagtgctatagctcgtagcgttatgatctctgc

SEQ ID NO: 14202 - DNA, 36 bp, synthetic construct
  misc_feature 1..36: note = Description of Artificial Sequence: Synthetic oligonucleotide
  source 1..36: mol_type = other DNA
gtttcagtgcttcgctaagtagtatgcttttgaagt

SEQ ID NO: 14203 - DNA, 37 bp, synthetic construct
  misc_feature 1..37: note = Description of Artificial Sequence: Synthetic oligonucleotide
  source 1..37: mol_type = other DNA
gtttcagtggctaggagtaatttgatgctattgtaat

SEQ ID NO: 14204 - DNA, 37 bp, synthetic construct
  misc_feature 1..37: note = Description of Artificial Sequence: Synthetic oligonucleotide
  source 1..37: mol_type = other DNA
gtttcagtggttggctctttggcatttgaactggtac

SEQ ID NO: 14205 - DNA, 37 bp, synthetic construct
  misc_feature 1..37: note = Description of Artificial Sequence: Synthetic oligonucleotide
  source 1..37: mol_type = other DNA
gtttcagttaataaggcttacaacgtataattgagac

SEQ ID NO: 14206 - DNA, 37 bp, synthetic construct
  misc_feature 1..37: note = Description of Artificial Sequence: Synthetic oligonucleotide
  source 1..37: mol_type = other DNA
gtttcagttaccgggtgatcgtctatactagtgatac

SEQ ID NO: 14207 - DNA, 37 bp, synthetic construct
  misc_feature 1..37: note = Description of Artificial Sequence: Synthetic oligonucleotide
  source 1..37: mol_type = other DNA
gtttcagttacggctcttttaggataaggtctgtaag

SEQ ID NO: 14208 - DNA, 36 bp, synthetic construct
  misc_feature 1..36: note = Description of Artificial Sequence: Synthetic oligonucleotide
  source 1..36: mol_type = other DNA
gtttcagttagcgctcatatcctagtctgataaaat

SEQ ID NO: 14209 - DNA, 37 bp, synthetic construct
  misc_feature 1..37: note = Description of Artificial Sequence: Synthetic oligonucleotide
  source 1..37: mol_type = other DNA
gtttcagttgcaggtcttttaggataaggtttgcagg

SEQ ID NO: 14210 - DNA, 37 bp, synthetic construct
  misc_feature 1..37: note = Description of Artificial Sequence: Synthetic oligonucleotide
  source 1..37: mol_type = other DNA
gtttcagttgcaggtttcttgggataggatctgtatt

SEQ ID NO: 14211 - DNA, 37 bp, synthetic construct
  misc_feature 1..37: note = Description of Artificial Sequence: Synthetic oligonucleotide
  source 1..37: mol_type = other DNA
gtttcagttgctaagcgatggtgttgtaaagtgtcgt

SEQ ID NO: 14212 - DNA, 37 bp, synthetic construct
  misc_feature 1..37: note = Description of Artificial Sequence: Synthetic oligonucleotide
  source 1..37: mol_type = other DNA
gtttcagttgctggcttactaggttatgatgtgccgg

SEQ ID NO: 14213 - DNA, 37 bp, synthetic construct
  misc_feature 1..37: note = Description of Artificial Sequence: Synthetic oligonucleotide
  source 1..37: mol_type = other DNA
gtttcagttggagggcttttagggtaagatttgcaac

SEQ ID NO: 14214 - DNA, 37 bp, synthetic construct
  misc_feature 1..37: note = Description of Artificial Sequence: Synthetic oligonucleotide
  source 1..37: mol_type = other DNA
gtttcagttggcaagtgattggttatactggtgtcgc

SEQ ID NO: 14215 - DNA, 36 bp, synthetic construct
  misc_feature 1..36: note = Description of Artificial Sequence: Synthetic oligonucleotide
  source 1..36: mol_type = other DNA
gtttcagttgttgttgaaaggatgtacgattgaagc

SEQ ID NO: 14216 - DNA, 36 bp, synthetic construct
  misc_feature 1..36: note = Description of Artificial Sequence: Synthetic oligonucleotide
  source 1..36: mol_type = other DNA
gtttcagtttaccaatgaatgtccgagaactaaaac

SEQ ID NO: 14217 - DNA, 36 bp, synthetic construct
  misc_feature 1..36: note = Description of Artificial Sequence: Synthetic oligonucleotide
  source 1..36: mol_type = other DNA
gtttcattaccagtcagggtgacactgctccaaaac

SEQ ID NO: 14218 - DNA, 36 bp, synthetic construct
  misc_feature 1..36: note = Description of Artificial Sequence: Synthetic oligonucleotide
  source 1..36: mol_type = other DNA
gtttcattaccagtcagggtggcactgctccaaaac

SEQ ID NO: 14219 - DNA, 36 bp, synthetic construct
  misc_feature 1..36: note = Description of Artificial Sequence: Synthetic oligonucleotide
  source 1..36: mol_type = other DNA
gtttcattaccctataaatttacactactctcaaac

SEQ ID NO: 14220 - DNA, 36 bp, synthetic construct
  misc_feature 1..36: note = Description of Artificial Sequence: Synthetic oligonucleotide
  source 1..36: mol_type = other DNA
gtttcattaccctatagatttacactactctcaaac

SEQ ID NO: 14221 - DNA, 36 bp, synthetic construct
  misc_feature 1..36: note = Description of Artificial Sequence: Synthetic oligonucleotide
  source 1..36: mol_type = other DNA
gtttcattactatctaaaattacactgagctaaaac

SEQ ID NO: 14222 - DNA, 36 bp, synthetic construct
  misc_feature 1..36: note = Description of Artificial Sequence: Synthetic oligonucleotide
  source 1..36: mol_type = other DNA
gtttcattcccctataaatttacactactctcaaac

SEQ ID NO: 14223 - DNA, 37 bp, synthetic construct
  misc_feature 1..37: note = Description of Artificial Sequence: Synthetic oligonucleotide
  source 1..37: mol_type = other DNA
gtttcattggttatcttggtataatgattagtgaacc

SEQ ID NO: 14224 - DNA, 36 bp, synthetic construct
  misc_feature 1..36: note = Description of Artificial Sequence: Synthetic oligonucleotide
  source 1..36: mol_type = other DNA
gtttccctataccgaaaactgggagagtaccaaaac

SEQ ID NO: 14225 - DNA, 36 bp, synthetic construct
  misc_feature 1..36: note = Description of Artificial Sequence: Synthetic oligonucleotide
  source 1..36: mol_type = other DNA
gtttccgtcccctatcggggttctatattttcaaat

SEQ ID NO: 14226 - DNA, 36 bp, synthetic construct
  misc_feature 1..36: note = Description of Artificial Sequence: Synthetic oligonucleotide
  source 1..36: mol_type = other DNA
gtttcgacttcacccccctgaggagtcggtcacgct

SEQ ID NO: 14227 - DNA, 36 bp, synthetic construct
  misc_feature 1..36: note = Description of Artificial Sequence: Synthetic oligonucleotide
  source 1..36: mol_type = other DNA
gtttcggcttgcggtcgcctcttaacttgctaaact

SEQ ID NO: 14228 - DNA, 36 bp, synthetic construct
  misc_feature 1..36: note = Description of Artificial Sequence: Synthetic oligonucleotide
  source 1..36: mol_type = other DNA
gtttcgtacctattttaaactacactactctcaaac

SEQ ID NO: 14229 - DNA, 36 bp, synthetic construct
  misc_feature 1..36: note = Description of Artificial Sequence: Synthetic oligonucleotide
  source 1..36: mol_type = other DNA
gtttcgtacctgttttaaactacactactctcaaac

SEQ ID NO: 14230 - DNA, 36 bp, synthetic construct
  misc_feature 1..36: note = Description of Artificial Sequence: Synthetic oligonucleotide
  source 1..36: mol_type = other DNA
gtttcttaaagtccttaaattacatcaaaccacaac

SEQ ID NO: 14231 - DNA, 36 bp, synthetic construct
  misc_feature 1..36: note = Description of Artificial Sequence: Synthetic oligonucleotide
  source 1..36: mol_type = other DNA
gtttcttatagaactcaattcgtaatttgctaaaat

SEQ ID NO: 14232 - DNA, 36 bp, synthetic construct
  misc_feature 1..36: note = Description of Artificial Sequence: Synthetic oligonucleotide
  source 1..36: mol_type = other DNA
gtttcttatccatcataatttacaaggttctcaaac

SEQ ID NO: 14233 - DNA, 36 bp, synthetic construct
  misc_feature 1..36: note = Description of Artificial Sequence: Synthetic oligonucleotide
  source 1..36: mol_type = other DNA
gtttcttatccttttgaatttacatcaaaccacaac

SEQ ID NO: 14234 - DNA, 28 bp, synthetic construct
  misc_feature 1..28: note = Description of Artificial Sequence: Synthetic oligonucleotide
  source 1..28: mol_type = other DNA
gtttcttccacacgcacacagaacaatc

SEQ ID NO: 14235 - DNA, 36 bp, synthetic construct
  misc_feature 1..36: note = Description of Artificial Sequence: Synthetic oligonucleotide
  source 1..36: mol_type = other DNA
gtttgaaagtaataatagataacactactctcaaac

SEQ ID NO: 14236 - DNA, 36 bp, synthetic construct
  misc_feature 1..36: note = Description of Artificial Sequence: Synthetic oligonucleotide
  source 1..36: mol_type = other DNA
gtttgaaagtaatcatagataacactactcccaaac

SEQ ID NO: 14237 - DNA, 36 bp, synthetic construct
  misc_feature 1..36: note = Description of Artificial Sequence: Synthetic oligonucleotide
  source 1..36: mol_type = other DNA
gtttgaaattcttccgtattaacaagactctcaaac

SEQ ID NO: 14238 - DNA, 36 bp, synthetic construct
  misc_feature 1..36: note = Description of Artificial Sequence: Synthetic oligonucleotide
  source 1..36: mol_type = other DNA
gtttgaatactatattcttttacatcattctcaaac

SEQ ID NO: 14239 - DNA, 36 bp, synthetic construct
  misc_feature 1..36: note = Description of Artificial Sequence: Synthetic oligonucleotide
  source 1..36: mol_type = other DNA
gtttgaatactatctgaatttacactactctcaaac

SEQ ID NO: 14240 - DNA, 36 bp, synthetic construct
  misc_feature 1..36: note = Description of Artificial Sequence: Synthetic oligonucleotide
  source 1..36: mol_type = other DNA
gtttgaatattatctgaatttacactactctcaaac

SEQ ID NO: 14241 - DNA, 36 bp, synthetic construct
  misc_feature 1..36: note = Description of Artificial Sequence: Synthetic oligonucleotide
  source 1..36: mol_type = other DNA
gtttgacaacccttattttctacactgctctcaaac

SEQ ID NO: 14242 - DNA, 36 bp, synthetic construct
  misc_feature 1..36: note = Description of Artificial Sequence: Synthetic oligonucleotide
  source 1..36: mol_type = other DNA
gtttgacacctatctgaattagcaaggctctcaaac

SEQ ID NO: 14243 - DNA, 36 bp, synthetic construct
  misc_feature 1..36: note = Description of Artificial Sequence: Synthetic oligonucleotide
  source 1..36: mol_type = other DNA
gtttgacaccttattaaaattacacggcactcaaac

SEQ ID NO: 14244 - DNA, 36 bp, synthetic construct
  misc_feature 1..36: note = Description of Artificial Sequence: Synthetic oligonucleotide
  source 1..36: mol_type = other DNA
gtttgactaccagtcaatttgtcactgctccaaaac

SEQ ID NO: 14245 - DNA, 36 bp, synthetic construct
  misc_feature 1..36: note = Description of Artificial Sequence: Synthetic oligonucleotide
  source 1..36: mol_type = other DNA
gtttgactaccagtcaggatgtcactgctccaaaac

SEQ ID NO: 14246 - DNA, 36 bp, synthetic construct
  misc_feature 1..36: note = Description of Artificial Sequence: Synthetic oligonucleotide
  source 1..36: mol_type = other DNA
gtttgactaccagtcagtttgtcactgctccaaaac

SEQ ID NO: 14247 - DNA, 36 bp, synthetic construct
  misc_feature 1..36: note = Description of Artificial Sequence: Synthetic oligonucleotide
  source 1..36: mol_type = other DNA
gtttgactaccatatgaaattacaccattctcaaac

SEQ ID NO: 14248 - DNA, 36 bp, synthetic construct
  misc_feature 1..36: note = Description of Artificial Sequence: Synthetic oligonucleotide
  source 1..36: mol_type = other DNA
gtttgactaccatatgaaattacactactctcaaac

SEQ ID NO: 14249 - DNA, 37 bp, synthetic construct
  misc_feature 1..37: note = Description of Artificial Sequence: Synthetic oligonucleotide
  source 1..37: mol_type = other DNA
gtttgactaccatatgaaattacactactctcaaact

SEQ ID NO: 14250 - DNA, 36 bp, synthetic construct
  misc_feature 1..36: note = Description of Artificial Sequence: Synthetic oligonucleotide
  source 1..36: mol_type = other DNA
gtttgactaccatcagatattacacgactctcaaac

SEQ ID NO: 14251 - DNA, 36 bp, synthetic construct
  misc_feature 1..36: note = Description of Artificial Sequence: Synthetic oligonucleotide
  source 1..36: mol_type = other DNA
gtttgactaccatctaaaataacacgactctcaaac

SEQ ID NO: 14252 - DNA, 36 bp, synthetic construct
  misc_feature 1..36: note = Description of Artificial Sequence: Synthetic oligonucleotide
  source 1..36: mol_type = other DNA
gtttgactaccatctaaagcaacacagctctcaaac

SEQ ID NO: 14253 - DNA, 36 bp, synthetic construct
  misc_feature 1..36: note = Description of Artificial Sequence: Synthetic oligonucleotide
  source 1..36: mol_type = other DNA
gtttgactaccatctaagattacactactctcaaac

SEQ ID NO: 14254 - DNA, 36 bp, synthetic construct
  misc_feature 1..36: note = Description of Artificial Sequence: Synthetic oligonucleotide
  source 1..36: mol_type = other DNA
gtttgactaccatttaaaattacaccatactcaaac

SEQ ID NO: 14255 - DNA, 36 bp, synthetic construct
  misc_feature 1..36: note = Description of Artificial Sequence: Synthetic oligonucleotide
  source 1..36: mol_type = other DNA
gtttgactaccatttagaattacaccattctcaaac

SEQ ID NO: 14256 - DNA, 36 bp, synthetic construct
  misc_feature 1..36: note = Description of Artificial Sequence: Synthetic oligonucleotide
  source 1..36: mol_type = other DNA
gtttgactaccatttgaaatagcaccatactcaaac

SEQ ID NO: 14257 - DNA, 36 bp, synthetic construct
  misc_feature 1..36: note = Description of Artificial Sequence: Synthetic oligonucleotide
  source 1..36: mol_type = other DNA
gtttgactaccctttaaaattgcaccatactcaaac

SEQ ID NO: 14258 - DNA, 36 bp, synthetic construct
  misc_feature 1..36: note = Description of Artificial Sequence: Synthetic oligonucleotide
  source 1..36: mol_type = other DNA
gtttgactcctatctgaattaacaaggctctcaaac

SEQ ID NO: 14259 - DNA, 36 bp, synthetic construct
  misc_feature 1..36: note = Description of Artificial Sequence: Synthetic oligonucleotide
  source 1..36: mol_type = other DNA
gtttgagaaccatgtaagtttgtaaggatctaaaac

SEQ ID NO: 14260 - DNA, 36 bp, synthetic construct
  misc_feature 1..36: note = Description of Artificial Sequence: Synthetic oligonucleotide
  source 1..36: mol_type = other DNA
gtttgagaaccatgtaatttttgttggtactaaagc

SEQ ID NO: 14261 - DNA, 36 bp, synthetic construct
  misc_feature 1..36: note = Description of Artificial Sequence: Synthetic oligonucleotide
  source 1..36: mol_type = other DNA
gtttgagaaccctctgaattagcactcctctcaaac

SEQ ID NO: 14262 - DNA, 36 bp, synthetic construct
  misc_feature 1..36: note = Description of Artificial Sequence: Synthetic oligonucleotide
  source 1..36: mol_type = other DNA
gtttgagaaccttgtaaatcaagaatgtagagaaac

SEQ ID NO: 14263 - DNA, 36 bp, synthetic construct
  misc_feature 1..36: note = Description of Artificial Sequence: Synthetic oligonucleotide
  source 1..36: mol_type = other DNA
gtttgagaaccttgtaaatcaataagtatgtaaaac

SEQ ID NO: 14264 - DNA, 36 bp, synthetic construct
  misc_feature 1..36: note = Description of Artificial Sequence: Synthetic oligonucleotide
  source 1..36: mol_type = other DNA
gtttgagaaccttgtaaatcagtaaagtaactaaac

SEQ ID NO: 14265 - DNA, 36 bp, synthetic construct
  misc_feature 1..36: note = Description of Artificial Sequence: Synthetic oligonucleotide
  source 1..36: mol_type = other DNA
gtttgagaaccttgtaaatcagtaaagtaactaagc

SEQ ID NO: 14266 - DNA, 36 bp, synthetic construct
  misc_feature 1..36: note = Description of Artificial Sequence: Synthetic oligonucleotide
  source 1..36: mol_type = other DNA
gtttgagaaccttgtaaatcgataaacctacaaaac

SEQ ID NO: 14267 - DNA, 36 bp, synthetic construct
  misc_feature 1..36: note = Description of Artificial Sequence: Synthetic oligonucleotide
  source 1..36: mol_type = other DNA
gtttgagaaccttgtaaattcatagaggtgttaaac

SEQ ID NO: 14268 - DNA, 36 bp, synthetic construct
  misc_feature 1..36: note = Description of Artificial Sequence: Synthetic oligonucleotide
  source 1..36: mol_type = other DNA
gtttgagaaccttgtaaattcgtaaaggtgtcaagc

SEQ ID NO: 14269 - DNA, 36 bp, synthetic construct
  misc_feature 1..36: note = Description of Artificial Sequence: Synthetic oligonucleotide
  source 1..36: mol_type = other DNA
gtttgagaaccttgtaagtaaataaaggtgtaaagc

SEQ ID NO: 14270 - DNA, 36 bp, synthetic construct
  misc_feature 1..36: note = Description of Artificial Sequence: Synthetic oligonucleotide
  source 1..36: mol_type = other DNA
gtttgagaaccttgtaagtgaataaaggtgtaaaac

SEQ ID NO: 14271 - DNA, 36 bp, synthetic construct
  misc_feature 1..36: note = Description of Artificial Sequence: Synthetic oligonucleotide
  source 1..36: mol_type = other DNA
gtttgagaaccttgtaagtttgtaagagtgtaaaac

SEQ ID NO: 14272 - DNA, 36 bp, synthetic construct
  misc_feature 1..36: note = Description of Artificial Sequence: Synthetic oligonucleotide
  source 1..36: mol_type = other DNA
gtttgagaaccttgtaagtttgtaatggtgtaaaac

SEQ ID NO: 14273 - DNA, 36 bp, synthetic construct
  misc_feature 1..36: note = Description of Artificial Sequence: Synthetic oligonucleotide
  source 1..36: mol_type = other DNA
gtttgagaaccttgtaatttcttataagtgtaaaac

SEQ ID NO: 14274 - DNA, 36 bp, synthetic construct
  misc_feature 1..36: note = Description of Artificial Sequence: Synthetic oligonucleotide
  source 1..36: mol_type = other DNA
gtttgagaagtatgtagttttatatggtaaccaagc

SEQ ID NO: 14275 - DNA, 36 bp, synthetic construct
  misc_feature 1..36: note = Description of Artificial Sequence: Synthetic oligonucleotide
  source 1..36: mol_type = other DNA
gtttgagaataatgtaaattcagatagtatttaaac

SEQ ID NO: 14276 - DNA, 36 bp, synthetic construct
  misc_feature 1..36: note = Description of Artificial Sequence: Synthetic oligonucleotide
  source 1..36: mol_type = other DNA
gtttgagaatagtgtaaatccataaggtagtgaaac

SEQ ID NO: 14277 - DNA, 36 bp, synthetic construct
  misc_feature 1..36: note = Description of Artificial Sequence: Synthetic oligonucleotide
  source 1..36: mol_type = other DNA
gtttgagaatagtgtaaatctataaggtagtaaaac

SEQ ID NO: 14278 - DNA, 36 bp, synthetic construct
  misc_feature 1..36: note = Description of Artificial Sequence: Synthetic oligonucleotide
  source 1..36: mol_type = other DNA
gtttgagaatagtgtaaatctgtatagtgcttaaac

SEQ ID NO: 14279 - DNA, 36 bp, synthetic construct
  misc_feature 1..36: note = Description of Artificial Sequence: Synthetic oligonucleotide
  source 1..36: mol_type = other DNA
gtttgagaatagtgtaaattcataaggtagaaaaac

SEQ ID NO: 14280 - DNA, 36 bp, synthetic construct
  misc_feature 1..36: note = Description of Artificial Sequence: Synthetic oligonucleotide
  source 1..36: mol_type = other DNA
gtttgagaatagtgtaaattcataaggtagtaaaac

SEQ ID NO: 14281 - DNA, 36 bp, synthetic construct
  misc_feature 1..36: note = Description of Artificial Sequence: Synthetic oligonucleotide
  source 1..36: mol_type = other DNA
gtttgagaatagtgtaatttcataaggtagtaaaac

SEQ ID NO: 14282 - DNA, 36 bp, synthetic construct
  misc_feature 1..36: note = Description of Artificial Sequence: Synthetic oligonucleotide
  source 1..36: mol_type = other DNA
gtttgagaatagtgtgatttcataaggtagtaaaac

SEQ ID NO: 14283 - DNA, 36 bp, synthetic construct
  misc_feature 1..36: note = Description of Artificial Sequence: Synthetic oligonucleotide
  source 1..36: mol_type = other DNA
gtttgagaatgatgtaaaaacgtatagtattcaaac

SEQ ID NO: 14284 - DNA, 36 bp, synthetic construct
  misc_feature 1..36: note = Description of Artificial Sequence: Synthetic oligonucleotide
  source 1..36: mol_type = other DNA
gtttgagaatgatgtaaaaacgtatggtactgaaac

SEQ ID NO: 14285 - DNA, 36 bp, synthetic construct
  misc_feature 1..36: note = Description of Artificial Sequence: Synthetic oligonucleotide
  source 1..36: mol_type = other DNA
gtttgagaatgatgtaaaaatgtatggtacacaagc

SEQ ID NO: 14286 - DNA, 34 bp, synthetic construct
  misc_feature 1..34: note = Description of Artificial Sequence: Synthetic oligonucleotide
  source 1..34: mol_type = other DNA
gtttgagaatgatgtaaaaatgtatggtactcaa

SEQ ID NO: 14287 - DNA, 36 bp, synthetic construct
  misc_feature 1..36: note = Description of Artificial Sequence: Synthetic oligonucleotide
  source 1..36: mol_type = other DNA
gtttgagaatgatgtaaaaatgtatggtactcaaac

SEQ ID NO: 14288 - DNA, 36 bp, synthetic construct
  misc_feature 1..36: note = Description of Artificial Sequence: Synthetic oligonucleotide
  source 1..36: mol_type = other DNA
gtttgagaatgatgtaaaaatgtatggtactcaagc

SEQ ID NO: 14289 - DNA, 36 bp, synthetic construct
  misc_feature 1..36: note = Description of Artificial Sequence: Synthetic oligonucleotide
  source 1..36: mol_type = other DNA
gtttgagaatgatgtaaaaatgtatggtattcaaac

SEQ ID NO: 14290 - DNA, 36 bp, synthetic construct
  misc_feature 1..36: note = Description of Artificial Sequence: Synthetic oligonucleotide
  source 1..36: mol_type = other DNA
gtttgagaatgatgtaaaagaatatggtattcaaac

SEQ ID NO: 14291 - DNA, 36 bp, synthetic construct
  misc_feature 1..36: note = Description of Artificial Sequence: Synthetic oligonucleotide
  source 1..36: mol_type = other DNA
gtttgagaatgatgtaaagatatatggtattcaaac

SEQ ID NO: 14292 - DNA, 37 bp, synthetic construct
  misc_feature 1..37: note = Description of Artificial Sequence: Synthetic oligonucleotide
  source 1..37: mol_type = other DNA
gtttgagaatgatgtaaatatgtatgggactcaaaca

SEQ ID NO: 14293 - DNA, 36 bp, synthetic construct
  misc_feature 1..36: note = Description of Artificial Sequence: Synthetic oligonucleotide
  source 1..36: mol_type = other DNA
gtttgagaatgatgtaaatatgtatggtactcaaac

SEQ ID NO: 14294 - DNA, 36 bp, synthetic construct
  misc_feature 1..36: note = Description of Artificial Sequence: Synthetic oligonucleotide
  source 1..36: mol_type = other DNA
gtttgagaatgatgtaaatatgtatggtactcaagc

SEQ ID NO: 14295 - DNA, 36 bp, synthetic construct
  misc_feature 1..36: note = Description of Artificial Sequence: Synthetic oligonucleotide
  source 1..36: mol_type = other DNA
gtttgagaatgatgtaatttcatatgggtacaaagc

SEQ ID NO: 14296 - DNA, 36 bp, synthetic construct
  misc_feature 1..36: note = Description of Artificial Sequence: Synthetic oligonucleotide
  source 1..36: mol_type = other DNA
gtttgagaatgatgtagaaatgtatggtgctcaaac

SEQ ID NO: 14297 - DNA, 36 bp, synthetic construct
  misc_feature 1..36: note = Description of Artificial Sequence: Synthetic oligonucleotide
  source 1..36: mol_type = other DNA
gtttgagaatgatgtagtttctaatggtagtcaaac

SEQ ID NO: 14298 - DNA, 36 bp, synthetic construct
  misc_feature 1..36: note = Description of Artificial Sequence: Synthetic oligonucleotide
  source 1..36: mol_type = other DNA
gtttgagaatggtgcaatcctgtatggtggtaaaac

SEQ ID NO: 14299 - DNA, 36 bp, synthetic construct
  misc_feature 1..36: note = Description of Artificial Sequence: Synthetic oligonucleotide
  source 1..36: mol_type = other DNA
gtttgagaatggtgtaaatctaaacggctcttaaac

SEQ ID NO: 14300 - DNA, 36 bp, synthetic construct
  misc_feature 1..36: note = Description of Artificial Sequence: Synthetic oligonucleotide
  source 1..36: mol_type = other DNA
gtttgagaatggtgtaatcctgtatggtggtaaagc

SEQ ID NO: 14301 - DNA, 30 bp, synthetic construct
  misc_feature 1..30: note = Description of Artificial Sequence: Synthetic oligonucleotide
  source 1..30: mol_type = other DNA
gtttgagaatggtgtaatctctgatggtaa

SEQ ID NO: 14302 - DNA, 36 bp, synthetic construct
  misc_feature 1..36: note = Description of Artificial Sequence: Synthetic oligonucleotide
  source 1..36: mol_type = other DNA
gtttgagaatggtgtaatcttgaatggaaatcaaac

SEQ ID NO: 14303 - DNA, 36 bp, synthetic construct
  misc_feature 1..36: note = Description of Artificial Sequence: Synthetic oligonucleotide
  source 1..36: mol_type = other DNA
gtttgagaatggtgtaattctgtatggtagtcaagc

SEQ ID NO: 14304 - DNA, 36 bp, synthetic construct
  misc_feature 1..36: note = Description of Artificial Sequence: Synthetic oligonucleotide
  source 1..36: mol_type = other DNA
gtttgagaatggtgtaatttatgatggtactcaagc

SEQ ID NO: 14305 - DNA, 36 bp, synthetic construct
  misc_feature 1..36: note = Description of Artificial Sequence: Synthetic oligonucleotide
  source 1..36: mol_type = other DNA
gtttgagaatggtgtaatttcatatggtggtcaaac

SEQ ID NO: 14306 - DNA, 36 bp, synthetic construct
  misc_feature 1..36: note = Description of Artificial Sequence: Synthetic oligonucleotide
  source 1..36: mol_type = other DNA
gtttgagaatggtgtagttttcgatggtagtgaacc

SEQ ID NO: 14307 - DNA, 36 bp, synthetic construct
  misc_feature 1..36: note = Description of Artificial Sequence: Synthetic oligonucleotide
  source 1..36: mol_type = other DNA
gtttgagacatatcatattctatagggttctcaaac

SEQ ID NO: 14308 - DNA, 36 bp, synthetic construct
  misc_feature 1..36: note = Description of Artificial Sequence: Synthetic oligonucleotide
  source 1..36: mol_type = other DNA
gtttgagacatttacagaattacactactctcaaac

SEQ ID NO: 14309 - DNA, 36 bp, synthetic construct
  misc_feature 1..36: note = Description of Artificial Sequence: Synthetic oligonucleotide
  source 1..36: mol_type = other DNA
gtttgagacccctatgaaattacaccgctctcaaac

SEQ ID NO: 14310 - DNA, 36 bp, synthetic construct
  misc_feature 1..36: note = Description of Artificial Sequence: Synthetic oligonucleotide
  source 1..36: mol_type = other DNA
gtttgagagagatgtaaattcggatggaggtcaaac

SEQ ID NO: 14311 - DNA, 36 bp, synthetic construct
  misc_feature 1..36: note = Description of Artificial Sequence: Synthetic oligonucleotide
  source 1..36: mol_type = other DNA
gtttgagagagatgttaaaaaaggctaatctaagac

SEQ ID NO: 14312 - DNA, 24 bp, synthetic construct
  misc_feature 1..24: note = Description of Artificial Sequence: Synthetic oligonucleotide
  source 1..24: mol_type = other DNA
gtttgagagatatgtaaattttga

SEQ ID NO: 14313 - DNA, 36 bp, synthetic construct
  misc_feature 1..36: note = Description of Artificial Sequence: Synthetic oligonucleotide
  source 1..36: mol_type = other DNA
gtttgagagatatgtaaattttgaattctacaaaac

SEQ ID NO: 14314 - DNA, 37 bp, synthetic construct
  misc_feature 1..37: note = Description of Artificial Sequence: Synthetic oligonucleotide
  source 1..37: mol_type = other DNA
gtttgagagatatgtaaattttgaattctacaaaact

SEQ ID NO: 14315 - DNA, 35 bp, synthetic construct
  misc_feature 1..35: note = Description of Artificial Sequence: Synthetic oligonucleotide
  source 1..35: mol_type = other DNA
gtttgagagatatgtaaattttgaattctacaaac

SEQ ID NO: 14316 - DNA, 36 bp, synthetic construct
  misc_feature 1..36: note = Description of Artificial Sequence: Synthetic oligonucleotide
  source 1..36: mol_type = other DNA
gtttgagagatatgtaaattttgaattctactaaac

SEQ ID NO: 14317 - DNA, 36 bp, synthetic construct
  misc_feature 1..36: note = Description of Artificial Sequence: Synthetic oligonucleotide
  source 1..36: mol_type = other DNA
gtttgagagatatgtaaattttgaattctattaaac

SEQ ID NO: 14318 - DNA, 35 bp, synthetic construct
  misc_feature 1..35: note = Description of Artificial Sequence: Synthetic oligonucleotide
  source 1..35: mol_type = other DNA
gtttgagagatatgtaaattttgatttctacaaaa

SEQ ID NO: 14319 - DNA, 36 bp, synthetic construct
  misc_feature 1..36: note = Description of Artificial Sequence: Synthetic oligonucleotide
  source 1..36: mol_type = other DNA
gtttgagagatatgtaaattttgatttctacaaaac

SEQ ID NO: 14320 - DNA, 36 bp, synthetic construct
  misc_feature 1..36: note = Description of Artificial Sequence: Synthetic oligonucleotide
  source 1..36: mol_type = other DNA
gtttgagagatatgtgaattttgaattctacaaaac

SEQ ID NO: 14321 - DNA, 36 bp, synthetic construct
  misc_feature 1..36: note = Description of Artificial Sequence: Synthetic oligonucleotide
  source 1..36: mol_type = other DNA
gtttgagagcagtgcagatttataggggtctcaagc

SEQ ID NO: 14322 - DNA, 36 bp, synthetic construct
  misc_feature 1..36: note = Description of Artificial Sequence: Synthetic oligonucleotide
  source 1..36: mol_type = other DNA
gtttgagagcagtgcgatttcataggggtctcaaac

SEQ ID NO: 14323 - DNA, 36 bp, synthetic construct
  misc_feature 1..36: note = Description of Artificial Sequence: Synthetic oligonucleotide
  source 1..36: mol_type = other DNA
gtttgagagcagtgtaaaaatgtaggataatgaagc

SEQ ID NO: 14324 - DNA, 36 bp, synthetic construct
  misc_feature 1..36: note = Description of Artificial Sequence: Synthetic oligonucleotide
  source 1..36: mol_type = other DNA
gtttgagagcagtgtaaatctatagggtaatcaaac

SEQ ID NO: 14325 - DNA, 27 bp, synthetic construct
  misc_feature 1..27: note = Description of Artificial Sequence: Synthetic oligonucleotide
  source 1..27: mol_type = other DNA
gtttgagagcagtgtaaattcataggg

SEQ ID NO: 14326 - DNA, 36 bp, synthetic construct
  misc_feature 1..36: note = Description of Artificial Sequence: Synthetic oligonucleotide
  source 1..36: mol_type = other DNA
gtttgagagcagtgtaaattcgtaggggaaacaaac

SEQ ID NO: 14327 - DNA, 37 bp, synthetic construct
  misc_feature 1..37: note = Description of Artificial Sequence: Synthetic oligonucleotide
  source 1..37: mol_type = other DNA
gtttgagagcagtgtaaattcgtaggggaaacaaact

SEQ ID NO: 14328 - DNA, 36 bp, synthetic construct
  misc_feature 1..36: note = Description of Artificial Sequence: Synthetic oligonucleotide
  source 1..36: mol_type = other DNA
gtttgagagcagtgtaattccataggggtctcaaac

SEQ ID NO: 14329 - DNA, 35 bp, synthetic construct
  misc_feature 1..35: note = Description of Artificial Sequence: Synthetic oligonucleotide
  source 1..35: mol_type = other DNA
gtttgagagcagtgtgattctgtaggggtctcaaa

SEQ ID NO: 14330 - DNA, 36 bp, synthetic construct
  misc_feature 1..36: note = Description of Artificial Sequence: Synthetic oligonucleotide
  source 1..36: mol_type = other DNA
gtttgagagcagtgttgtcttatatagctcgaaaac

SEQ ID NO: 14331 - DNA, 36 bp, synthetic construct
  misc_feature 1..36: note = Description of Artificial Sequence: Synthetic oligonucleotide
  source 1..36: mol_type = other DNA
gtttgagagccttgttaattcaagaaggtgtaaaac

SEQ ID NO: 14332 - DNA, 36 bp, synthetic construct
  misc_feature 1..36: note = Description of Artificial Sequence: Synthetic oligonucleotide
  source 1..36: mol_type = other DNA
gtttgagagccttgttaattcagataggtgtagaac

SEQ ID NO: 14333 - DNA, 36 bp, synthetic construct
  misc_feature 1..36: note = Description of Artificial Sequence: Synthetic oligonucleotide
  source 1..36: mol_type = other DNA
gtttgagagccttgttaattcagatgggtatcagac

SEQ ID NO: 14334 - DNA, 36 bp, synthetic construct
  misc_feature 1..36: note = Description of Artificial Sequence: Synthetic oligonucleotide
  source 1..36: mol_type = other DNA
gtttgagagccttgttaattcagtaaggtgcaaaac

SEQ ID NO: 14335 - DNA, 36 bp, synthetic construct
  misc_feature 1..36: note = Description of Artificial Sequence: Synthetic oligonucleotide
  source 1..36: mol_type = other DNA
gtttgagagccttgttaattcattagggtgttaaac

SEQ ID NO: 14336 - DNA, 36 bp, synthetic construct
  misc_feature 1..36: note = Description of Artificial Sequence: Synthetic oligonucleotide
  source 1..36: mol_type = other DNA
gtttgagagccttgttaattcgtataggtatcagac

SEQ ID NO: 14337 - DNA, 36 bp, synthetic construct
  misc_feature 1..36: note = Description of Artificial Sequence: Synthetic oligonucleotide
  source 1..36: mol_type = other DNA
gtttgagagccttgttaattcgtatgggtttcagac

SEQ ID NO: 14338 - DNA, 36 bp, synthetic construct
  misc_feature 1..36: note = Description of Artificial Sequence: Synthetic oligonucleotide
  source 1..36: mol_type = other DNA
gtttgagagccttgttattttgtaatactcttaaac

SEQ ID NO: 14339 - DNA, 36 bp, synthetic construct
  misc_feature 1..36: note = Description of Artificial Sequence: Synthetic oligonucleotide
  source 1..36: mol_type = other DNA
gtttgagagcgttgttaattcagaaggatatcaagc

SEQ ID NO: 14340 - DNA, 37 bp, synthetic construct
  misc_feature 1..37: note = Description of Artificial Sequence: Synthetic oligonucleotide
  source 1..37: mol_type = other DNA
gtttgagagctatgtaatttttgctggtaataaaact

SEQ ID NO: 14341 - DNA, 36 bp, synthetic construct
  misc_feature 1..36: note = Description of Artificial Sequence: Synthetic oligonucleotide
  source 1..36: mol_type = other DNA
gtttgagagctatgtgaatcttgttggtaacaaagc

SEQ ID NO: 14342 - DNA, 36 bp, synthetic construct
  misc_feature 1..36: note = Description of Artificial Sequence: Synthetic oligonucleotide
  source 1..36: mol_type = other DNA
gtttgagagctatgttaattcagatggatgtcaaac

SEQ ID NO: 14343 - DNA, 36 bp, synthetic construct
  misc_feature 1..36: note = Description of Artificial Sequence: Synthetic oligonucleotide
  source 1..36: mol_type = other DNA
gtttgagagctgtgcaataatggttatcactcaaac

SEQ ID NO: 14344 - DNA, 36 bp, synthetic construct
  misc_feature 1..36: note = Description of Artificial Sequence: Synthetic oligonucleotide
  source 1..36: mol_type = other DNA
gtttgagagctgtgtaaattctagggtaactaaaac

SEQ ID NO: 14345 - DNA, 36 bp, synthetic construct
  misc_feature 1..36: note = Description of Artificial Sequence: Synthetic oligonucleotide
  source 1..36: mol_type = other DNA
gtttgagagctgtgtaacttctaaggtaactcaagc

SEQ ID NO: 14346 - DNA, 36 bp, synthetic construct
  misc_feature 1..36: note = Description of Artificial Sequence: Synthetic oligonucleotide
  source 1..36: mol_type = other DNA
gtttgagagctgtgtaatttcagaggggtctcaaac

SEQ ID NO: 14347 - DNA, 36 bp, synthetic construct
  misc_feature 1..36: note = Description of Artificial Sequence: Synthetic oligonucleotide
  source 1..36: mol_type = other DNA
gtttgagagctgtgtaatttcagagggtacttaaac

SEQ ID NO: 14348 - DNA, 36 bp, synthetic construct
  misc_feature 1..36: note = Description of Artificial Sequence: Synthetic oligonucleotide
  source 1..36: mol_type = other DNA
gtttgagagctttgttaaatcaataagttacaaaac

SEQ ID NO: 14349 - DNA, 36 bp, synthetic construct
  misc_feature 1..36: note = Description of Artificial Sequence: Synthetic oligonucleotide
  source 1..36: mol_type = other DNA
gtttgagagctttgttaattcagaagagtgtaaaac

SEQ ID NO: 14350 - DNA, 36 bp, synthetic construct
  misc_feature 1..36: note = Description of Artificial Sequence: Synthetic oligonucleotide
  source 1..36: mol_type = other DNA
gtttgagagctttgttaattcagataggtataaagc

SEQ ID NO: 14351 - DNA, 36 bp, synthetic construct
  misc_feature 1..36: note = Description of Artificial Sequence: Synthetic oligonucleotide
  source 1..36: mol_type = other DNA
gtttgagagctttgttaattcagataggtgtaaagc

SEQ ID NO: 14352 - DNA, 27 bp, synthetic construct
  misc_feature 1..27: note = Description of Artificial Sequence: Synthetic oligonucleotide
  source 1..27: mol_type = other DNA
gtttgagagctttgttaattcataaag

SEQ ID NO: 14353 - DNA, 36 bp, synthetic construct
  misc_feature 1..36: note = Description of Artificial Sequence: Synthetic oligonucleotide
  source 1..36: mol_type = other DNA
gtttgagagctttgttaattcataaaggtacaaaac

SEQ ID NO: 14354 - DNA, 36 bp, synthetic construct
  misc_feature 1..36: note = Description of Artificial Sequence: Synthetic oligonucleotide
  source 1..36: mol_type = other DNA
gtttgagagctttgttaatttaaaaggatgtaaaac

SEQ ID NO: 14355 - DNA, 36 bp, synthetic construct
  misc_feature 1..36: note = Description of Artificial Sequence: Synthetic oligonucleotide
  source 1..36: mol_type = other DNA
gtttgagagctttgttaatttagaaggatgtaaaac

SEQ ID NO: 14356 - DNA, 36 bp, synthetic construct
  misc_feature 1..36: note = Description of Artificial Sequence: Synthetic oligonucleotide
  source 1..36: mol_type = other DNA
gtttgagagctttgttaatttgataagatataaaac

SEQ ID NO: 14357 - DNA, 36 bp, synthetic construct
  misc_feature 1..36: note = Description of Artificial Sequence: Synthetic oligonucleotide
  source 1..36: mol_type = other DNA
gtttgagagctttgttattttgatatactcttaaac

SEQ ID NO: 14358 - DNA, 36 bp, synthetic construct
  misc_feature 1..36: note = Description of Artificial Sequence: Synthetic oligonucleotide
  source 1..36: mol_type = other DNA
gtttgagagctttgttgttttgtaagcggttaaaac

SEQ ID NO: 14359 - DNA, 36 bp, synthetic construct
  misc_feature 1..36: note = Description of Artificial Sequence: Synthetic oligonucleotide
  source 1..36: mol_type = other DNA
gtttgagagggttgctaaaccaaagactcctctgac

SEQ ID NO: 14360 - DNA, 36 bp, synthetic construct
  misc_feature 1..36: note = Description of Artificial Sequence: Synthetic oligonucleotide
  source 1..36: mol_type = other DNA
gtttgagaggtgtgtaatttattagagtgattaaac

SEQ ID NO: 14361 - DNA, 36 bp, synthetic construct
  misc_feature 1..36: note = Description of Artificial Sequence: Synthetic oligonucleotide
  source 1..36: mol_type = other DNA
gtttgagaggtgtgtaattttgtatggtaaacaagc

SEQ ID NO: 14362 - DNA, 36 bp, synthetic construct
  misc_feature 1..36: note = Description of Artificial Sequence: Synthetic oligonucleotide
  source 1..36: mol_type = other DNA
gtttgagagtaatgcaatatcttatgaatatcaaac

SEQ ID NO: 14363 - DNA, 36 bp, synthetic construct
  misc_feature 1..36: note = Description of Artificial Sequence: Synthetic oligonucleotide
  source 1..36: mol_type = other DNA
gtttgagagtaatgtaaattcagatagtattcaaac

SEQ ID NO: 14364 - DNA, 36 bp, synthetic construct
  misc_feature 1..36: note = Description of Artificial Sequence: Synthetic oligonucleotide
  source 1..36: mol_type = other DNA
gtttgagagtaatgtaaattcatagaggtataagac

SEQ ID NO: 14365 - DNA, 36 bp, synthetic construct
  misc_feature 1..36: note = Description of Artificial Sequence: Synthetic oligonucleotide
  source 1..36: mol_type = other DNA
gtttgagagtaatgtaaattcataggatggtaaagc

SEQ ID NO: 14366 - DNA, 36 bp, synthetic construct
  misc_feature 1..36: note = Description of Artificial Sequence: Synthetic oligonucleotide
  source 1..36: mol_type = other DNA
gtttgagagtaatgtaatatcttatgaatatcaaac

SEQ ID NO: 14367 - DNA, 36 bp, synthetic construct
  misc_feature 1..36: note = Description of Artificial Sequence: Synthetic oligonucleotide
  source 1..36: mol_type = other DNA
gtttgagagtaatgtaatctacataggtactaagac

SEQ ID NO: 14368 - DNA, 36 bp, synthetic construct
  misc_feature 1..36: note = Description of Artificial Sequence: Synthetic oligonucleotide
  source 1..36: mol_type = other DNA
gtttgagagtaatgtaattctataaatgtctaaaac

SEQ ID NO: 14369 - DNA, 36 bp, synthetic construct
  misc_feature 1..36: note = Description of Artificial Sequence: Synthetic oligonucleotide
  source 1..36: mol_type = other DNA
gtttgagagtaatgtaattctataagtgtctaaaac

SEQ ID NO: 14370 - DNA, 31 bp, synthetic construct
  misc_feature 1..31: note = Description of Artificial Sequence: Synthetic oligonucleotide
  source 1..31: mol_type = other DNA
gtttgagagtaatgtaatttcatatggtaat

SEQ ID NO: 14371 - DNA, 36 bp, synthetic construct
  misc_feature 1..36: note = Description of Artificial Sequence: Synthetic oligonucleotide
  source 1..36: mol_type = other DNA
gtttgagagtaatgtaatttctgatggtattcaaac

SEQ ID NO: 14372 - DNA, 36 bp, synthetic construct
  misc_feature 1..36: note = Description of Artificial Sequence: Synthetic oligonucleotide
  source 1..36: mol_type = other DNA
gtttgagagtaatgtagaatcgtatagttataaaac

SEQ ID NO: 14373 - DNA, 36 bp, synthetic construct
  misc_feature 1..36: note = Description of Artificial Sequence: Synthetic oligonucleotide
  source 1..36: mol_type = other DNA
gtttgagagtaatgttattttagatagatataaaac

SEQ ID NO: 14374 - DNA, 36 bp, synthetic construct
  misc_feature 1..36: note = Description of Artificial Sequence: Synthetic oligonucleotide
  source 1..36: mol_type = other DNA
gtttgagagtagtgcaaattcgtaggggaatcaaac

SEQ ID NO: 14375 - DNA, 35 bp, synthetic construct
  misc_feature 1..35: note = Description of Artificial Sequence: Synthetic oligonucleotide
  source 1..35: mol_type = other DNA
gtttgagagtagtgcaattctaggtaagatgagac

SEQ ID NO: 14376 - DNA, 36 bp, synthetic construct
  misc_feature 1..36: note = Description of Artificial Sequence: Synthetic oligonucleotide
  source 1..36: mol_type = other DNA
gtttgagagtagtgcagtttcataggggtctcaaac

SEQ ID NO: 14377 - DNA, 36 bp, synthetic construct
  misc_feature 1..36: note = Description of Artificial Sequence: Synthetic oligonucleotide
  source 1..36: mol_type = other DNA
gtttgagagtagtgtaaatctatagggtaatgaaac

SEQ ID NO: 14378 - DNA, 36 bp, synthetic construct
  misc_feature 1..36: note = Description of Artificial Sequence: Synthetic oligonucleotide
  source 1..36: mol_type = other DNA
gtttgagagtagtgtaaatctatagggtaattaaac

SEQ ID NO: 14379 - DNA, 36 bp, synthetic construct
  misc_feature 1..36: note = Description of Artificial Sequence: Synthetic oligonucleotide
  source 1..36: mol_type = other DNA
gtttgagagtagtgtaaatctatggggttctcaaac

SEQ ID NO: 14380 - DNA, 36 bp, synthetic construct
  misc_feature 1..36: note = Description of Artificial Sequence: Synthetic oligonucleotide
  source 1..36: mol_type = other DNA
gtttgagagtagtgtaaattcagagggtattgaaac

SEQ ID NO: 14381 - DNA, 36 bp, synthetic construct
  misc_feature 1..36: note = Description of Artificial Sequence: Synthetic oligonucleotide
  source 1..36: mol_type = other DNA
gtttgagagtagtgtaaattcagatagtattcaaac

SEQ ID NO: 14382 - DNA, 36 bp, synthetic construct
  misc_feature 1..36: note = Description of Artificial Sequence: Synthetic oligonucleotide
  source 1..36: mol_type = other DNA
gtttgagagtagtgtaaattcagatagtatttaaac

SEQ ID NO: 14383 - DNA, 36 bp, synthetic construct
  misc_feature 1..36: note = Description of Artificial Sequence: Synthetic oligonucleotide
  source 1..36: mol_type = other DNA
gtttgagagtagtgtaaattcagatggtactcaaac

SEQ ID NO: 14384 - DNA, 36 bp, synthetic construct
  misc_feature 1..36: note = Description of Artificial Sequence: Synthetic oligonucleotide
  source 1..36: mol_type = other DNA
gtttgagagtagtgtaaattcagatggttcttaaac

SEQ ID NO: 14385 - DNA, 36 bp, synthetic construct
  misc_feature 1..36: note = Description of Artificial Sequence: Synthetic oligonucleotide
  source 1..36: mol_type = other DNA
gtttgagagtagtgtaaattcatatgatagtcaaac

SEQ ID NO: 14386 - DNA, 36 bp, synthetic construct
  misc_feature 1..36: note = Description of Artificial Sequence: Synthetic oligonucleotide
  source 1..36: mol_type = other DNA
gtttgagagtagtgtaaattcatatggtagtcaagc

SEQ ID NO: 14387 - DNA, 36 bp, synthetic construct
  misc_feature 1..36: note = Description of Artificial Sequence: Synthetic oligonucleotide
  source 1..36: mol_type = other DNA
gtttgagagtagtgtaaatttatagggtagtaaaac

SEQ ID NO: 14388 - DNA, 36 bp, synthetic construct
  misc_feature 1..36: note = Description of Artificial Sequence: Synthetic oligonucleotide
  source 1..36: mol_type = other DNA
gtttgagagtagtgtaatactagtgtggtctaaaac

SEQ ID NO: 14389 - DNA, 36 bp, synthetic construct
  misc_feature 1..36: note = Description of Artificial Sequence: Synthetic oligonucleotide
  source 1..36: mol_type = other DNA
gtttgagagtagtgtaatccaagatggtagtaaaac

SEQ ID NO: 14390 - DNA, 36 bp, synthetic construct
  misc_feature 1..36: note = Description of Artificial Sequence: Synthetic oligonucleotide
  source 1..36: mol_type = other DNA
gtttgagagtagtgtaatcccaagtggtagtaaaac

SEQ ID NO: 14391 - DNA, 36 bp, synthetic construct
  misc_feature 1..36: note = Description of Artificial Sequence: Synthetic oligonucleotide
  source 1..36: mol_type = other DNA
gtttgagagtagtgtaatcctagatggtagtcaaac

SEQ ID NO: 14392 - DNA, 36 bp, synthetic construct
  misc_feature 1..36: note = Description of Artificial Sequence: Synthetic oligonucleotide
  source 1..36: mol_type = other DNA
gtttgagagtagtgtaatcttcaatggtactcaaac

SEQ ID NO: 14393 - DNA, 36 bp, synthetic construct
  misc_feature 1..36: note = Description of Artificial Sequence: Synthetic oligonucleotide
  source 1..36: mol_type = other DNA
gtttgagagtagtgtaattccaagtggtagtaaaac

SEQ ID NO: 14394 - DNA, 36 bp, synthetic construct
  misc_feature 1..36: note = Description of Artificial Sequence: Synthetic oligonucleotide
  source 1..36: mol_type = other DNA
gtttgagagtagtgtaattccatatggtagtaaaac

SEQ ID NO: 14395 - DNA, 36 bp, synthetic construct
  misc_feature 1..36: note = Description of Artificial Sequence: Synthetic oligonucleotide
  source 1..36: mol_type = other DNA
gtttgagagtagtgtaattcccaagacctccaaaac

SEQ ID NO: 14396 - DNA, 36 bp, synthetic construct
  misc_feature 1..36: note = Description of Artificial Sequence: Synthetic oligonucleotide
  source 1..36: mol_type = other DNA
gtttgagagtagtgtaattccttagacctctgaacc

SEQ ID NO: 14397 - DNA, 36 bp, synthetic construct
  misc_feature 1..36: note = Description of Artificial Sequence: Synthetic oligonucleotide
  source 1..36: mol_type = other DNA
gtttgagagtagtgtaattctaaagccctccaaaac

SEQ ID NO: 14398 - DNA, 36 bp, synthetic construct
  misc_feature 1..36: note = Description of Artificial Sequence: Synthetic oligonucleotide
  source 1..36: mol_type = other DNA
gtttgagagtagtgtaattctataaacctctaaaac

SEQ ID NO: 14399 - DNA, 36 bp, synthetic construct
  misc_feature 1..36: note = Description of Artificial Sequence: Synthetic oligonucleotide
  source 1..36: mol_type = other DNA
gtttgagagtagtgtaattctatatggtggttaaac

SEQ ID NO: 14400 - DNA, 36 bp, synthetic construct
  misc_feature 1..36: note = Description of Artificial Sequence: Synthetic oligonucleotide
  source 1..36: mol_type = other DNA
gtttgagagtagtgtaattctgcaaatctctaaaac

SEQ ID NO: 14401 - DNA, 26 bp, synthetic construct
  misc_feature 1..26: note = Description of Artificial Sequence: Synthetic oligonucleotide
  source 1..26: mol_type = other DNA
gtttgagagtagtgtaattctgtaaa

SEQ ID NO: 14402 - DNA, 36 bp, synthetic construct
  misc_feature 1..36: note = Description of Artificial Sequence: Synthetic oligonucleotide
  source 1..36: mol_type = other DNA
gtttgagagtagtgtaattctgtaaacctctaaaac

SEQ ID NO: 14403 - DNA, 36 bp, synthetic construct
  misc_feature 1..36: note = Description of Artificial Sequence: Synthetic oligonucleotide
  source 1..36: mol_type = other DNA
gtttgagagtagtgtaattctgtaaatctctaaaac

SEQ ID NO: 14404 - DNA, 36 bp, synthetic construct
  misc_feature 1..36: note = Description of Artificial Sequence: Synthetic oligonucleotide
  source 1..36: mol_type = other DNA
gtttgagagtagtgtaattctgtaaatttctaaaac

SEQ ID NO: 14405 - DNA, 36 bp, synthetic construct
  misc_feature 1..36: note = Description of Artificial Sequence: Synthetic oligonucleotide
  source 1..36: mol_type = other DNA
gtttgagagtagtgtaatttaataacaaacttgaac

SEQ ID NO: 14406 - DNA, 36 bp, synthetic construct
  misc_feature 1..36: note = Description of Artificial Sequence: Synthetic oligonucleotide
  source 1..36: mol_type = other DNA
gtttgagagtagtgtaatttatgaaggtactaaaac

SEQ ID NO: 14407 - DNA, 36 bp, synthetic construct
  misc_feature 1..36: note = Description of Artificial Sequence: Synthetic oligonucleotide
  source 1..36: mol_type = other DNA
gtttgagagtagtgtaatttcagatgggtatcaaac

SEQ ID NO: 14408 - DNA, 31 bp, synthetic construct
  misc_feature 1..31: note = Description of Artificial Sequence: Synthetic oligonucleotide
  source 1..31: mol_type = other DNA
gtttgagagtagtgtaatttcataaggtact

SEQ ID NO: 14409 - DNA, 36 bp, synthetic construct
  misc_feature 1..36: note = Description of Artificial Sequence: Synthetic oligonucleotide
  source 1..36: mol_type = other DNA
gtttgagagtagtgtaatttcataaggtactgaaac

SEQ ID NO: 14410 - DNA, 37 bp, synthetic construct
  misc_feature 1..37: note = Description of Artificial Sequence: Synthetic oligonucleotide
  source 1..37: mol_type = other DNA
gtttgagagtagtgtaatttcataaggtagtaaaacg

SEQ ID NO: 14411 - DNA, 36 bp, synthetic construct
  misc_feature 1..36: note = Description of Artificial Sequence: Synthetic oligonucleotide
  source 1..36: mol_type = other DNA
gtttgagagtagtgtaatttcataaggtagtcaaac

SEQ ID NO: 14412 - DNA, 36 bp, synthetic construct
  misc_feature 1..36: note = Description of Artificial Sequence: Synthetic oligonucleotide
  source 1..36: mol_type = other DNA
gtttgagagtagtgtaatttcataggggtctcaaac

SEQ ID NO: 14413 - DNA, 36 bp, synthetic construct
  misc_feature 1..36: note = Description of Artificial Sequence: Synthetic oligonucleotide
  source 1..36: mol_type = other DNA
gtttgagagtagtgtaatttcatatgatagtaaaac

SEQ ID NO: 14414 - DNA, 36 bp, synthetic construct
  misc_feature 1..36: note = Description of Artificial Sequence: Synthetic oligonucleotide
  source 1..36: mol_type = other DNA
gtttgagagtagtgtaatttcatatggtaatcaaac

SEQ ID NO: 14415 - DNA, 36 bp, synthetic construct
  misc_feature 1..36: note = Description of Artificial Sequence: Synthetic oligonucleotide
  source 1..36: mol_type = other DNA
gtttgagagtagtgtaatttcatatggtagtaaaac

SEQ ID NO: 14416 - DNA, 36 bp, synthetic construct
  misc_feature 1..36: note = Description of Artificial Sequence: Synthetic oligonucleotide
  source 1..36: mol_type = other DNA
gtttgagagtagtgtaatttcatatggtagtaaagc

SEQ ID NO: 14417 - DNA, 36 bp, synthetic construct
  misc_feature 1..36: note = Description of Artificial Sequence: Synthetic oligonucleotide
  source 1..36: mol_type = other DNA
gtttgagagtagtgtaatttcatatggtagtcaaac

SEQ ID NO: 14418 - DNA, 36 bp, synthetic construct
  misc_feature 1..36: note = Description of Artificial Sequence: Synthetic oligonucleotide
  source 1..36: mol_type = other DNA
gtttgagagtagtgtaatttcatatggtagttaaac

SEQ ID NO: 14419 - DNA, 36 bp, synthetic construct
  misc_feature 1..36: note = Description of Artificial Sequence: Synthetic oligonucleotide
  source 1..36: mol_type = other DNA
gtttgagagtagtgtaatttcatatggtagttaagc

SEQ ID NO: 14420 - DNA, 36 bp, synthetic construct
  misc_feature 1..36: note = Description of Artificial Sequence: Synthetic oligonucleotide
  source 1..36: mol_type = other DNA
gtttgagagtagtgtaatttcgtagaggtacaaaac

SEQ ID NO: 14421 - DNA, 35 bp, synthetic construct
  misc_feature 1..35: note = Description of Artificial Sequence: Synthetic oligonucleotide
  source 1..35: mol_type = other DNA
gtttgagagtagtgtaatttctgagtgattaaaac

SEQ ID NO: 14422 - DNA, 36 bp, synthetic construct
  misc_feature 1..36: note = Description of Artificial Sequence: Synthetic oligonucleotide
  source 1..36: mol_type = other DNA
gtttgagagtagtgtaatttcttagaggtcttaatc

SEQ ID NO: 14423 - DNA, 36 bp, synthetic construct
  misc_feature 1..36: note = Description of Artificial Sequence: Synthetic oligonucleotide
  source 1..36: mol_type = other DNA
gtttgagagtagtgtaattttatagggtactaaaac

SEQ ID NO: 14424 - DNA, 35 bp, synthetic construct
  misc_feature 1..35: note = Description of Artificial Sequence: Synthetic oligonucleotide
  source 1..35: mol_type = other DNA
gtttgagagtagtgtaattttatagggtagaaaaa

SEQ ID NO: 14425 - DNA, 36 bp, synthetic construct
  misc_feature 1..36: note = Description of Artificial Sequence: Synthetic oligonucleotide
  source 1..36: mol_type = other DNA
gtttgagagtagtgtaattttatagggtagtaaaac

SEQ ID NO: 14426 - DNA, 36 bp, synthetic construct
  misc_feature 1..36: note = Description of Artificial Sequence: Synthetic oligonucleotide
  source 1..36: mol_type = other DNA
gtttgagagtagtgtaatttttgataagtctcaaac

SEQ ID NO: 14427 - DNA, 36 bp, synthetic construct
  misc_feature 1..36: note = Description of Artificial Sequence: Synthetic oligonucleotide
  source 1..36: mol_type = other DNA
gtttgagagtagtgtagttctaaagaggtagtaggc

SEQ ID NO: 14428 - DNA, 36 bp, synthetic construct
  misc_feature 1..36: note = Description of Artificial Sequence: Synthetic oligonucleotide
  source 1..36: mol_type = other DNA
gtttgagagtagtgtagtttcatatgatagtaaaac

SEQ ID NO: 14429 - DNA, 36 bp, synthetic construct
  misc_feature 1..36: note = Description of Artificial Sequence: Synthetic oligonucleotide
  source 1..36: mol_type = other DNA
gtttgagagtagtgtagtttcgtagggtactcaggc

SEQ ID NO: 14430 - DNA, 27 bp, synthetic construct
  misc_feature 1..27: note = Description of Artificial Sequence: Synthetic oligonucleotide
  source 1..27: mol_type = other DNA
gtttgagagtagtgtcatttcgttagg

SEQ ID NO: 14431 - DNA, 34 bp, synthetic construct
  misc_feature 1..34: note = Description of Artificial Sequence: Synthetic oligonucleotide
  source 1..34: mol_type = other DNA
gtttgagagtagtgtgattctgtaaatgtctcaa

SEQ ID NO: 14432 - DNA, 36 bp, synthetic construct
  misc_feature 1..36: note = Description of Artificial Sequence: Synthetic oligonucleotide
  source 1..36: mol_type = other DNA
gtttgagagtagtgtgatttcataggggtcttaaac

SEQ ID NO: 14433 - DNA, 36 bp, synthetic construct
  misc_feature 1..36: note = Description of Artificial Sequence: Synthetic oligonucleotide
  source 1..36: mol_type = other DNA
gtttgagagtagtgttatccaagatagttctctaac

SEQ ID NO: 14434 - DNA, 36 bp, synthetic construct
  misc_feature 1..36: note = Description of Artificial Sequence: Synthetic oligonucleotide
  source 1..36: mol_type = other DNA
gtttgagagtagtgttatcctagatggtagtcaaac

SEQ ID NO: 14435 - DNA, 26 bp, synthetic construct
  misc_feature 1..26: note = Description of Artificial Sequence: Synthetic oligonucleotide
  source 1..26: mol_type = other DNA
gtttgagagtagtgttgtcttagatg

SEQ ID NO: 14436 - DNA, 36 bp, synthetic construct
  misc_feature 1..36: note = Description of Artificial Sequence: Synthetic oligonucleotide
  source 1..36: mol_type = other DNA
gtttgagagtagtgttgtcttagatggctcttaaac

SEQ ID NO: 14437 - DNA, 36 bp, synthetic construct
  misc_feature 1..36: note = Description of Artificial Sequence: Synthetic oligonucleotide
  source 1..36: mol_type = other DNA
gtttgagagtattgttattcaagaattatcttctac

SEQ ID NO: 14438 - DNA, 36 bp, synthetic construct
  misc_feature 1..36: note = Description of Artificial Sequence: Synthetic oligonucleotide
  source 1..36: mol_type = other DNA
gtttgagagtattgttattctaaaaggtactaaaat

SEQ ID NO: 14439 - DNA, 36 bp, synthetic construct
  misc_feature 1..36: note = Description of Artificial Sequence: Synthetic oligonucleotide
  source 1..36: mol_type = other DNA
gtttgagagtcgtatcaaacaatcgtataactgaac

SEQ ID NO: 14440 - DNA, 36 bp, synthetic construct
  misc_feature 1..36: note = Description of Artificial Sequence: Synthetic oligonucleotide
  source 1..36: mol_type = other DNA
gtttgagagtcgtgtaaaataatcgtataactgaac

SEQ ID NO: 14441 - DNA, 36 bp, synthetic construct
  misc_feature 1..36: note = Description of Artificial Sequence: Synthetic oligonucleotide
  source 1..36: mol_type = other DNA
gtttgagagtcgtgtaaaatcatcgtgtaactgaac

SEQ ID NO: 14442 - DNA, 36 bp, synthetic construct
  misc_feature 1..36: note = Description of Artificial Sequence: Synthetic oligonucleotide
  source 1..36: mol_type = other DNA
gtttgagagtcgtgtaatattatcgtgtaactgaac

SEQ ID NO: 14443 - DNA, 36 bp, synthetic construct
  misc_feature 1..36: note = Description of Artificial Sequence: Synthetic oligonucleotide
  source 1..36: mol_type = other DNA
gtttgagagtcgtgtaattctatagggatagaaaac

SEQ ID NO: 14444 - DNA, 27 bp, synthetic construct
  misc_feature 1..27: note = Description of Artificial Sequence: Synthetic oligonucleotide
  source 1..27: mol_type = other DNA
gtttgagagtcgtgttattttagatgg

SEQ ID NO: 14445 - DNA, 36 bp, synthetic construct
  misc_feature 1..36: note = Description of Artificial Sequence: Synthetic oligonucleotide
  source 1..36: mol_type = other DNA
gtttgagagtcgtgttgaacaatcgcatagtctgac

SEQ ID NO: 14446 - DNA, 36 bp, synthetic construct
  misc_feature 1..36: note = Description of Artificial Sequence: Synthetic oligonucleotide
  source 1..36: mol_type = other DNA
gtttgagagtcgtgttgttttagatggtagtcaaac

SEQ ID NO: 14447 - DNA, 36 bp, synthetic construct
  misc_feature 1..36: note = Description of Artificial Sequence: Synthetic oligonucleotide
  source 1..36: mol_type = other DNA
gtttgagagtcttgtaagtgaataagtgaatcaaac

SEQ ID NO: 14448 - DNA, 36 bp, synthetic construct
  misc_feature 1..36: note = Description of Artificial Sequence: Synthetic oligonucleotide
  source 1..36: mol_type = other DNA
gtttgagagtcttgtaagttataaaaggtatcaaac

SEQ ID NO: 14449 - DNA, 36 bp, synthetic construct
  misc_feature 1..36: note = Description of Artificial Sequence: Synthetic oligonucleotide
  source 1..36: mol_type = other DNA
gtttgagagtcttgtaattcagaaaaggtcttgaac

SEQ ID NO: 14450 - DNA, 36 bp, synthetic construct
  misc_feature 1..36: note = Description of Artificial Sequence: Synthetic oligonucleotide
  source 1..36: mol_type = other DNA
gtttgagagtcttgttaatacagaaagaatcaaaac

SEQ ID NO: 14451 - DNA, 36 bp, synthetic construct
  misc_feature 1..36: note = Description of Artificial Sequence: Synthetic oligonucleotide
  source 1..36: mol_type = other DNA
gtttgagagtgatgcaatatcttatgaatatcaaac

SEQ ID NO: 14452 - DNA, 36 bp, synthetic construct
  misc_feature 1..36: note = Description of Artificial Sequence: Synthetic oligonucleotide
  source 1..36: mol_type = other DNA
gtttgagagtgatgtaaattcaaatggtggttaaag

SEQ ID NO: 14453 - DNA, 36 bp, synthetic construct
  misc_feature 1..36: note = Description of Artificial Sequence: Synthetic oligonucleotide
  source 1..36: mol_type = other DNA
gtttgagagtgatgtaaattcagatagtattcaaac

SEQ ID NO: 14454 - DNA, 36 bp, synthetic construct
  misc_feature 1..36: note = Description of Artificial Sequence: Synthetic oligonucleotide
  source 1..36: mol_type = other DNA
gtttgagagtgatgtaattcacgaatatggttaaac

SEQ ID NO: 14455 - DNA, 36 bp, synthetic construct
  misc_feature 1..36: note = Description of Artificial Sequence: Synthetic oligonucleotide
  source 1..36: mol_type = other DNA
gtttgagagtgatgtaattccagatagtggtaaaac

SEQ ID NO: 14456 - DNA, 36 bp, synthetic construct
  misc_feature 1..36: note = Description of Artificial Sequence: Synthetic oligonucleotide
  source 1..36: mol_type = other DNA
gtttgagagtgatgtaatttctgatggtactcaaac

SEQ ID NO: 14457 - DNA, 36 bp, synthetic construct
  misc_feature 1..36: note = Description of Artificial Sequence: Synthetic oligonucleotide
  source 1..36: mol_type = other DNA
gtttgagagtgatgtaattttatatagtgacaaaac

SEQ ID NO: 14458 - DNA, 36 bp, synthetic construct
  misc_feature 1..36: note = Description of Artificial Sequence: Synthetic oligonucleotide
  source 1..36: mol_type = other DNA
gtttgagagtgatgtaattttatatagtgactaaac

SEQ ID NO: 14459 - DNA, 36 bp, synthetic construct
  misc_feature 1..36: note = Description of Artificial Sequence: Synthetic oligonucleotide
  source 1..36: mol_type = other DNA
gtttgagagtgttgacaaacaatagaggtctcaatc

SEQ ID NO: 14460 - DNA, 36 bp, synthetic construct
  misc_feature 1..36: note = Description of Artificial Sequence: Synthetic oligonucleotide
  source 1..36: mol_type = other DNA
gtttgagagtgttgtcaaataggagtcaaaccaatc

SEQ ID NO: 14461 - DNA, 36 bp, synthetic construct
  misc_feature 1..36: note = Description of Artificial Sequence: Synthetic oligonucleotide
  source 1..36: mol_type = other DNA
gtttgagagtgttgtgattcttgatagtggtaaaac

SEQ ID NO: 14462 - DNA, 36 bp, synthetic construct
  misc_feature 1..36: note = Description of Artificial Sequence: Synthetic oligonucleotide
  source 1..36: mol_type = other DNA
gtttgagagtgttgttaaatctgagggatgtcaatc

SEQ ID NO: 14463 - DNA, 36 bp, synthetic construct
  misc_feature 1..36: note = Description of Artificial Sequence: Synthetic oligonucleotide
  source 1..36: mol_type = other DNA
gtttgagagtgttgttaaattaaagggctacaaacc

SEQ ID NO: 14464 - DNA, 36 bp, synthetic construct
  misc_feature 1..36: note = Description of Artificial Sequence: Synthetic oligonucleotide
  source 1..36: mol_type = other DNA
gtttgagagttatgtcatttactagatctttctaac

SEQ ID NO: 14465 - DNA, 36 bp, synthetic construct
  misc_feature 1..36: note = Description of Artificial Sequence: Synthetic oligonucleotide
  source 1..36: mol_type = other DNA
gtttgagagttgtgtaatgccttatggtgctcaaac

SEQ ID NO: 14466 - DNA, 36 bp, synthetic construct
  misc_feature 1..36: note = Description of Artificial Sequence: Synthetic oligonucleotide
  source 1..36: mol_type = other DNA
gtttgagagttgtgtaatttgatatggtagtaaaac

SEQ ID NO: 14467 - DNA, 36 bp, synthetic construct
  misc_feature 1..36: note = Description of Artificial Sequence: Synthetic oligonucleotide
  source 1..36: mol_type = other DNA
gtttgagagttgtgtgatttaagatggaactaaaac

SEQ ID NO: 14468 - DNA, 36 bp, synthetic construct
  misc_feature 1..36: note = Description of Artificial Sequence: Synthetic oligonucleotide
  source 1..36: mol_type = other DNA
gtttgagagttgtgttattttttagagtgatttagt

SEQ ID NO: 14469 - DNA, 36 bp, synthetic construct
  misc_feature 1..36: note = Description of Artificial Sequence: Synthetic oligonucleotide
  source 1..36: mol_type = other DNA
gtttgagataggtgttatctattagagttctcaagc

SEQ ID NO: 14470 - DNA, 36 bp, synthetic construct
  misc_feature 1..36: note = Description of Artificial Sequence: Synthetic oligonucleotide
  source 1..36: mol_type = other DNA
gtttgagatccatcttaaattacacaactctcaaac

SEQ ID NO: 14471 - DNA, 37 bp, synthetic construct
  misc_feature 1..37: note = Description of Artificial Sequence: Synthetic oligonucleotide
  source 1..37: mol_type = other DNA
gtttgagatggattggatatgacactactctcaaacg

SEQ ID NO: 14472 - DNA, 36 bp, synthetic construct
  misc_feature 1..36: note = Description of Artificial Sequence: Synthetic oligonucleotide
  source 1..36: mol_type = other DNA
gtttgagattcctacaaaattacatcactctcaaac

SEQ ID NO: 14473 - DNA, 36 bp, synthetic construct
  misc_feature 1..36: note = Description of Artificial Sequence: Synthetic oligonucleotide
  source 1..36: mol_type = other DNA
gtttgagcattgtgttatcctgaacggtaattaaac

SEQ ID NO: 14474 - DNA, 36 bp, synthetic construct
  misc_feature 1..36: note = Description of Artificial Sequence: Synthetic oligonucleotide
  source 1..36: mol_type = other DNA
gtttgagcgccgtgtagtttctgatagtggtcaagc

SEQ ID NO: 14475 - DNA, 36 bp, synthetic construct
  misc_feature 1..36: note = Description of Artificial Sequence: Synthetic oligonucleotide
  source 1..36: mol_type = other DNA
gtttgagggtaatgaaattcttagctaaacccttac

SEQ ID NO: 14476 - DNA, 36 bp, synthetic construct
  misc_feature 1..36: note = Description of Artificial Sequence: Synthetic oligonucleotide
  source 1..36: mol_type = other DNA
gtttgagggtattgctaaaacaaatacaacaaacac

SEQ ID NO: 14477 - DNA, 36 bp, synthetic construct
  misc_feature 1..36: note = Description of Artificial Sequence: Synthetic oligonucleotide
  source 1..36: mol_type = other DNA
gtttgagtaccatacatttttacatcattctcaaac

SEQ ID NO: 14478 - DNA, 36 bp, synthetic construct
  misc_feature 1..36: note = Description of Artificial Sequence: Synthetic oligonucleotide
  source 1..36: mol_type = other DNA
gtttgagtaccatcagaaattacaccattctcaaac

SEQ ID NO: 14479 - DNA, 36 bp, synthetic construct
  misc_feature 1..36: note = Description of Artificial Sequence: Synthetic oligonucleotide
  source 1..36: mol_type = other DNA
gtttgagtaccatcagaaattacatcactctcaaac

SEQ ID NO: 14480 - DNA, 36 bp, synthetic construct
  misc_feature 1..36: note = Description of Artificial Sequence: Synthetic oligonucleotide
  source 1..36: mol_type = other DNA
gtttgagtaccatccaattttacaccactctcaaac

SEQ ID NO: 14481 - DNA, 36 bp, synthetic construct
  misc_feature 1..36: note = Description of Artificial Sequence: Synthetic oligonucleotide
  source 1..36: mol_type = other DNA
gtttgagtaccatctaaaataacatcattctcaaac

SEQ ID NO: 14482 - DNA, 36 bp, synthetic construct
  misc_feature 1..36: note = Description of Artificial Sequence: Synthetic oligonucleotide
  source 1..36: mol_type = other DNA
gtttgagtaccatctacttttacatcattctcaaac

SEQ ID NO: 14483 - DNA, 36 bp, synthetic construct
  misc_feature 1..36: note = Description of Artificial Sequence: Synthetic oligonucleotide
  source 1..36: mol_type = other DNA
gtttgagtaccatctgaatttacactactctcaaac

SEQ ID NO: 14484 - DNA, 36 bp, synthetic construct
  misc_feature 1..36: note = Description of Artificial Sequence: Synthetic oligonucleotide
  source 1..36: mol_type = other DNA
gtttgagtaccatctgaatttacactgctctcaaac

SEQ ID NO: 14485 - DNA, 36 bp, synthetic construct
  misc_feature 1..36: note = Description of Artificial Sequence: Synthetic oligonucleotide
  source 1..36: mol_type = other DNA
gtttgagtaccctatggaattacactgctctcaaac

SEQ ID NO: 14486 - DNA, 36 bp, synthetic construct
  misc_feature 1..36: note = Description of Artificial Sequence: Synthetic oligonucleotide
  source 1..36: mol_type = other DNA
gtttgagtaccctctaaaacaacatcactctcaaac

SEQ ID NO: 14487 - DNA, 36 bp, synthetic construct
  misc_feature 1..36: note = Description of Artificial Sequence: Synthetic oligonucleotide
  source 1..36: mol_type = other DNA
gtttgagtatcatcataatttacagggttctcaaac

SEQ ID NO: 14488 - DNA, 36 bp, synthetic construct
  misc_feature 1..36: note = Description of Artificial Sequence: Synthetic oligonucleotide
  source 1..36: mol_type = other DNA
gtttgagtatggtgcaattttaaagggtagtcaaac

SEQ ID NO: 14489 - DNA, 36 bp, synthetic construct
  misc_feature 1..36: note = Description of Artificial Sequence: Synthetic oligonucleotide
  source 1..36: mol_type = other DNA
gtttgagtatggtgtaatcctaaacggtagtcaaac

SEQ ID NO: 14490 - DNA, 36 bp, synthetic construct
  misc_feature 1..36: note = Description of Artificial Sequence: Synthetic oligonucleotide
  source 1..36: mol_type = other DNA
gtttgagtatggtgtaatcctaaatggtagtcaaac

SEQ ID NO: 14491 - DNA, 36 bp, synthetic construct
  misc_feature 1..36: note = Description of Artificial Sequence: Synthetic oligonucleotide
  source 1..36: mol_type = other DNA
gtttgagtatggtgttatcttaaatggtagtcaaac

SEQ ID NO: 14492 - DNA, 36 bp, synthetic construct
  misc_feature 1..36: note = Description of Artificial Sequence: Synthetic oligonucleotide
  source 1..36: mol_type = other DNA
gtttgagtatggtgttattctgaacggtagtcaaac

SEQ ID NO: 14493 - DNA, 36 bp, synthetic construct
  misc_feature 1..36: note = Description of Artificial Sequence: Synthetic oligonucleotide
  source 1..36: mol_type = other DNA
gtttgagttaccctagaatttacacagctctcaaac

SEQ ID NO: 14494 - DNA, 36 bp, synthetic construct
  misc_feature 1..36: note = Description of Artificial Sequence: Synthetic oligonucleotide
  source 1..36: mol_type = other DNA
gtttgagtttcctcagatgtaacataactcccaaac

SEQ ID NO: 14495 - DNA, 36 bp, synthetic construct
  misc_feature 1..36: note = Description of Artificial Sequence: Synthetic oligonucleotide
  source 1..36: mol_type = other DNA
gtttgatacccctttggaactacactactctcaaac

SEQ ID NO: 14496 - DNA, 36 bp, synthetic construct
  misc_feature 1..36: note = Description of Artificial Sequence: Synthetic oligonucleotide
  source 1..36: mol_type = other DNA
gtttgatagtagtgtaatttcatatggtaataaacc

SEQ ID NO: 14497 - DNA, 36 bp, synthetic construct
  misc_feature 1..36: note = Description of Artificial Sequence: Synthetic oligonucleotide
  source 1..36: mol_type = other DNA
gtttgattaccagtcagaacgtcactgcaccaaaac

SEQ ID NO: 14498 - DNA, 36 bp, synthetic construct
  misc_feature 1..36: note = Description of Artificial Sequence: Synthetic oligonucleotide
  source 1..36: mol_type = other DNA
gtttgattaccagtcagatcgacactgcgccaaaac

SEQ ID NO: 14499 - DNA, 36 bp, synthetic construct
  misc_feature 1..36: note = Description of Artificial Sequence: Synthetic oligonucleotide
  source 1..36: mol_type = other DNA
gtttgattaccagtcggaatggcactgctccaaaac

SEQ ID NO: 14500 - DNA, 36 bp, synthetic construct
  misc_feature 1..36: note = Description of Artificial Sequence: Synthetic oligonucleotide
  source 1..36: mol_type = other DNA
gtttgattaccagttaaatcgacactgctccaaaac

SEQ ID NO: 14501 - DNA, 36 bp, synthetic construct
  misc_feature 1..36: note = Description of Artificial Sequence: Synthetic oligonucleotide
  source 1..36: mol_type = other DNA
gtttgattaccagttagatagacactgctccaaaac

SEQ ID NO: 14502 - DNA, 36 bp, synthetic construct
  misc_feature 1..36: note = Description of Artificial Sequence: Synthetic oligonucleotide
  source 1..36: mol_type = other DNA
gtttgattaccagttagatcgacactgctccaaaac

SEQ ID NO: 14503 - DNA, 36 bp, synthetic construct
  misc_feature 1..36: note = Description of Artificial Sequence: Synthetic oligonucleotide
  source 1..36: mol_type = other DNA
gtttgattatcctttgaatttacatatctctcaaac

SEQ ID NO: 14504 - DNA, 36 bp, synthetic construct
  misc_feature 1..36: note = Description of Artificial Sequence: Synthetic oligonucleotide
  source 1..36: mol_type = other DNA
gtttgattcacttattcacttacaagactctcaaac

SEQ ID NO: 14505 - DNA, 36 bp, synthetic construct
  misc_feature 1..36: note = Description of Artificial Sequence: Synthetic oligonucleotide
  source 1..36: mol_type = other DNA
gtttgattcacttattcacttacatgactctcaaac

SEQ ID NO: 14506 - DNA, 26 bp, synthetic construct
  misc_feature 1..26: note = Description of Artificial Sequence: Synthetic oligonucleotide
  source 1..26: mol_type = other DNA
gtttgattcccctacgaatttgcact

SEQ ID NO: 14507 - DNA, 36 bp, synthetic construct
  misc_feature 1..36: note = Description of Artificial Sequence: Synthetic oligonucleotide
  source 1..36: mol_type = other DNA
gtttgcgagttatgctaaaaaaagatagtcctgaac

SEQ ID NO: 14508 - DNA, 36 bp, synthetic construct
  misc_feature 1..36: note = Description of Artificial Sequence: Synthetic oligonucleotide
  source 1..36: mol_type = other DNA
gtttgctagctatgttaaattcaatacgttgtatac

SEQ ID NO: 14509 - DNA, 36 bp, synthetic construct
  misc_feature 1..36: note = Description of Artificial Sequence: Synthetic oligonucleotide
  source 1..36: mol_type = other DNA
gtttgctaggtatgctaaatatgataattactatac

SEQ ID NO: 14510 - DNA, 36 bp, synthetic construct
  misc_feature 1..36: note = Description of Artificial Sequence: Synthetic oligonucleotide
  source 1..36: mol_type = other DNA
gtttgctaggtatgctaaatatgcttagtgctatac

SEQ ID NO: 14511 - DNA, 36 bp, synthetic construct
  misc_feature 1..36: note = Description of Artificial Sequence: Synthetic oligonucleotide
  source 1..36: mol_type = other DNA
gtttgctaggtatgttgaatatagatgttagaagac

SEQ ID NO: 14512 - DNA, 36 bp, synthetic construct
  misc_feature 1..36: note = Description of Artificial Sequence: Synthetic oligonucleotide
  source 1..36: mol_type = other DNA
gtttgctagttatgttatttatagtattaagcaaac

SEQ ID NO: 14513 - DNA, 36 bp, synthetic construct
  misc_feature 1..36: note = Description of Artificial Sequence: Synthetic oligonucleotide
  source 1..36: mol_type = other DNA
gtttgctatgtatgctaaattagataagtactatac

SEQ ID NO: 14514 - DNA, 36 bp, synthetic construct
  misc_feature 1..36: note = Description of Artificial Sequence: Synthetic oligonucleotide
  source 1..36: mol_type = other DNA
gtttgcttgttatgctaaatataataataagtgaac

SEQ ID NO: 14515 - DNA, 36 bp, synthetic construct
  misc_feature 1..36: note = Description of Artificial Sequence: Synthetic oligonucleotide
  source 1..36: mol_type = other DNA
gtttggaagtagtgctatttatgagtactttcaaac

SEQ ID NO: 14516 - DNA, 36 bp, synthetic construct
  misc_feature 1..36: note = Description of Artificial Sequence: Synthetic oligonucleotide
  source 1..36: mol_type = other DNA
gtttggcactaattaaaaattacatatctcccaaac

SEQ ID NO: 14517 - DNA, 36 bp, synthetic construct
  misc_feature 1..36: note = Description of Artificial Sequence: Synthetic oligonucleotide
  source 1..36: mol_type = other DNA
gtttggctcaccttgaaatctgaactatggcaaagc

SEQ ID NO: 14518 - DNA, 36 bp, synthetic construct
  misc_feature 1..36: note = Description of Artificial Sequence: Synthetic oligonucleotide
  source 1..36: mol_type = other DNA
gtttgggagatatgtaaattttaattagtgtcaaac

SEQ ID NO: 14519 - DNA, 36 bp, synthetic construct
  misc_feature 1..36: note = Description of Artificial Sequence: Synthetic oligonucleotide
  source 1..36: mol_type = other DNA
gtttgggagtagtgtctatttattggtatcctgaac

SEQ ID NO: 14520 - DNA, 36 bp, synthetic construct
  misc_feature 1..36: note = Description of Artificial Sequence: Synthetic oligonucleotide
  source 1..36: mol_type = other DNA
gtttgggattgccccccgtccaagggatgccaaact

SEQ ID NO: 14521 - DNA, 36 bp, synthetic construct
  misc_feature 1..36: note = Description of Artificial Sequence: Synthetic oligonucleotide
  source 1..36: mol_type = other DNA
gtttgggattgccccccgtccaagggattctaaact

SEQ ID NO: 14522 - DNA, 36 bp, synthetic construct
  misc_feature 1..36: note = Description of Artificial Sequence: Synthetic oligonucleotide
  source 1..36: mol_type = other DNA
gtttgggattgccccccgtccaagggctggcaaact

SEQ ID NO: 14523 - DNA, 36 bp, synthetic construct
  misc_feature 1..36: note = Description of Artificial Sequence: Synthetic oligonucleotide
  source 1..36: mol_type = other DNA
gtttgggattgccccccgttcaagggctgctaatct

SEQ ID NO: 14524 - DNA, 36 bp, synthetic construct
  misc_feature 1..36: note = Description of Artificial Sequence: Synthetic oligonucleotide
  source 1..36: mol_type = other DNA
gtttgggattgcccccggtccaaggcggcccaaact

SEQ ID NO: 14525 - DNA, 36 bp, synthetic construct
  misc_feature 1..36: note = Description of Artificial Sequence: Synthetic oligonucleotide
  source 1..36: mol_type = other DNA
gtttgggattgccctccgaccggggccttctagact

SEQ ID NO: 14526 - DNA, 36 bp, synthetic construct
  misc_feature 1..36: note = Description of Artificial Sequence: Synthetic oligonucleotide
  source 1..36: mol_type = other DNA
gtttggtaagcattcaaaacaacacagctctaaaac

SEQ ID NO: 14527 - DNA, 47 bp, synthetic construct
  misc_feature 1..47: note = Description of Artificial Sequence: Synthetic oligonucleotide
  source 1..47: mol_type = other DNA
gtttgtcaaagagcgcattcaaaaataagatgaaagctaatcacaac

SEQ ID NO: 14528 - DNA, 36 bp, synthetic construct
  misc_feature 1..36: note = Description of Artificial Sequence: Synthetic oligonucleotide
  source 1..36: mol_type = other DNA
gtttgtctaccatatgaatttacactactctcaaac

SEQ ID NO: 14529 - DNA, 36 bp, synthetic construct
  misc_feature 1..36: note = Description of Artificial Sequence: Synthetic oligonucleotide
  source 1..36: mol_type = other DNA
gtttgttacccctctaaaacaacactactctcaaac

SEQ ID NO: 14530 - DNA, 36 bp, synthetic construct
  misc_feature 1..36: note = Description of Artificial Sequence: Synthetic oligonucleotide
  source 1..36: mol_type = other DNA
gttttaaagtactgtaaatccttattaatgtaaaac

SEQ ID NO: 14531 - DNA, 36 bp, synthetic construct
  misc_feature 1..36: note = Description of Artificial Sequence: Synthetic oligonucleotide
  source 1..36: mol_type = other DNA
gttttaaatctatgtcatctttaatggtattgaaac

SEQ ID NO: 14532 - DNA, 36 bp, synthetic construct
  misc_feature 1..36: note = Description of Artificial Sequence: Synthetic oligonucleotide
  source 1..36: mol_type = other DNA
gttttaagacccctacaaacccctttgtgataaaat

SEQ ID NO: 14533 - DNA, 36 bp, synthetic construct
  misc_feature 1..36: note = Description of Artificial Sequence: Synthetic oligonucleotide
  source 1..36: mol_type = other DNA
gttttaagacccctccaaacccctttgtgctaaaat

SEQ ID NO: 14534 - DNA, 36 bp, synthetic construct
  misc_feature 1..36: note = Description of Artificial Sequence: Synthetic oligonucleotide
  source 1..36: mol_type = other DNA
gttttaagacccctccaaaccgttacctgttataat

SEQ ID NO: 14535 - DNA, 36 bp, synthetic construct
  misc_feature 1..36: note = Description of Artificial Sequence: Synthetic oligonucleotide
  source 1..36: mol_type = other DNA
gttttaagacccctgcaaacccctttgtgctaaaat

SEQ ID NO: 14536 - DNA, 36 bp, synthetic construct
  misc_feature 1..36: note = Description of Artificial Sequence: Synthetic oligonucleotide
  source 1..36: mol_type = other DNA
gttttaagatactgaaaatttttgataatgtccaac

SEQ ID NO: 14537 - DNA, 36 bp, synthetic construct
  misc_feature 1..36: note = Description of Artificial Sequence: Synthetic oligonucleotide
  source 1..36: mol_type = other DNA
gttttaagatactgaagatttttgataatgtccaac

SEQ ID NO: 14538 - DNA, 36 bp, synthetic construct
  misc_feature 1..36: note = Description of Artificial Sequence: Synthetic oligonucleotide
  source 1..36: mol_type = other DNA
gttttaagctactctcaaatccccatttgatataat

SEQ ID NO: 14539 - DNA, 36 bp, synthetic construct
  misc_feature 1..36: note = Description of Artificial Sequence: Synthetic oligonucleotide
  source 1..36: mol_type = other DNA
gttttaatacagttcaaaataacacaatcctaaaac

SEQ ID NO: 14540 - DNA, 36 bp, synthetic construct
  misc_feature 1..36: note = Description of Artificial Sequence: Synthetic oligonucleotide
  source 1..36: mol_type = other DNA
gttttaataccatcaaagatgacatagatctaaaac

SEQ ID NO: 14541 - DNA, 36 bp, synthetic construct
  misc_feature 1..36: note = Description of Artificial Sequence: Synthetic oligonucleotide
  source 1..36: mol_type = other DNA
gttttaataccattcaaaatgtcatagatctaaaac

SEQ ID NO: 14542 - DNA, 36 bp, synthetic construct
  misc_feature 1..36: note = Description of Artificial Sequence: Synthetic oligonucleotide
  source 1..36: mol_type = other DNA
gttttaataccattcagaatgacacaactctaaaac

SEQ ID NO: 14543 - DNA, 36 bp, synthetic construct
  misc_feature 1..36: note = Description of Artificial Sequence: Synthetic oligonucleotide
  source 1..36: mol_type = other DNA
gttttaataccatttaagatgacatagaactaaaac

SEQ ID NO: 14544 - DNA, 36 bp, synthetic construct
  misc_feature 1..36: note = Description of Artificial Sequence: Synthetic oligonucleotide
  source 1..36: mol_type = other DNA
gttttaataccatttaagatgacatagatctaaaac

SEQ ID NO: 14545 - DNA, 36 bp, synthetic construct
  misc_feature 1..36: note = Description of Artificial Sequence: Synthetic oligonucleotide
  source 1..36: mol_type = other DNA
gttttaataccatttaatatgacatagatctaaaac

SEQ ID NO: 14546 - DNA, 36 bp, synthetic construct
  misc_feature 1..36: note = Description of Artificial Sequence: Synthetic oligonucleotide
  source 1..36: mol_type = other DNA
gttttaatacccctacaaacaactatgtgatacaat

SEQ ID NO: 14547 - DNA, 36 bp, synthetic construct
  misc_feature 1..36: note = Description of Artificial Sequence: Synthetic oligonucleotide
  source 1..36: mol_type = other DNA
gttttaatacccctacaaacgactatgtgatacaat

SEQ ID NO: 14548 - DNA, 36 bp, synthetic construct
  misc_feature 1..36: note = Description of Artificial Sequence: Synthetic oligonucleotide
  source 1..36: mol_type = other DNA
gttttaatacccctacaaacgattacctgctataat

SEQ ID NO: 14549 - DNA, 36 bp, synthetic construct
  misc_feature 1..36: note = Description of Artificial Sequence: Synthetic oligonucleotide
  source 1..36: mol_type = other DNA
gttttaatacccctacaaactgctatgtgatacaat

SEQ ID NO: 14550 - DNA, 37 bp, synthetic construct
  misc_feature 1..37: note = Description of Artificial Sequence: Synthetic oligonucleotide
  source 1..37: mol_type = other DNA
gttttaatacccctacaaactgctatgtgatacaatg

SEQ ID NO: 14551 - DNA, 36 bp, synthetic construct
  misc_feature 1..36: note = Description of Artificial Sequence: Synthetic oligonucleotide
  source 1..36: mol_type = other DNA
gttttaatacccctacaaataactatgtgatacaat

SEQ ID NO: 14552 - DNA, 36 bp, synthetic construct
  misc_feature 1..36: note = Description of Artificial Sequence: Synthetic oligonucleotide
  source 1..36: mol_type = other DNA
gttttaatacccctataaacgactatgcgttacaat

SEQ ID NO: 14553 - DNA, 37 bp, synthetic construct
  misc_feature 1..37: note = Description of Artificial Sequence: Synthetic oligonucleotide
  source 1..37: mol_type = other DNA
gttttaatacccctccaagtcgtgtcatgttaaaata

SEQ ID NO: 14554 - DNA, 36 bp, synthetic construct
  misc_feature 1..36: note = Description of Artificial Sequence: Synthetic oligonucleotide
  source 1..36: mol_type = other DNA
gttttaataccttatgaaattacactactctcaaac

SEQ ID NO: 14555 - DNA, 36 bp, synthetic construct
  misc_feature 1..36: note = Description of Artificial Sequence: Synthetic oligonucleotide
  source 1..36: mol_type = other DNA
gttttaatctactctcaaatccccatttgatataat

SEQ ID NO: 14556 - DNA, 36 bp, synthetic construct
  misc_feature 1..36: note = Description of Artificial Sequence: Synthetic oligonucleotide
  source 1..36: mol_type = other DNA
gttttaatctcgcccccaccggggcattttggtatc

SEQ ID NO: 14557 - DNA, 36 bp, synthetic construct
  misc_feature 1..36: note = Description of Artificial Sequence: Synthetic oligonucleotide
  source 1..36: mol_type = other DNA
gttttaatgcagttcaaaataacacatctctaaaac

SEQ ID NO: 14558 - DNA, 36 bp, synthetic construct
  misc_feature 1..36: note = Description of Artificial Sequence: Synthetic oligonucleotide
  source 1..36: mol_type = other DNA
gttttaatggtcttctaattaacacggctctaaaac

SEQ ID NO: 14559 - DNA, 36 bp, synthetic construct
  misc_feature 1..36: note = Description of Artificial Sequence: Synthetic oligonucleotide
  source 1..36: mol_type = other DNA
gttttacaccattctaaattaacaaagctctcaaac

SEQ ID NO: 14560 - DNA, 36 bp, synthetic construct
  misc_feature 1..36: note = Description of Artificial Sequence: Synthetic oligonucleotide
  source 1..36: mol_type = other DNA
gttttacacctatctgaattaacaaggctctcaaac

SEQ ID NO: 14561 - DNA, 36 bp, synthetic construct
  misc_feature 1..36: note = Description of Artificial Sequence: Synthetic oligonucleotide
  source 1..36: mol_type = other DNA
gttttacacctctacaaacttacaaggttctcaaac

SEQ ID NO: 14562 - DNA, 36 bp, synthetic construct
  misc_feature 1..36: note = Description of Artificial Sequence: Synthetic oligonucleotide
  source 1..36: mol_type = other DNA
gttttacactaactcaaattctccagttactaaaat

SEQ ID NO: 14563 - DNA, 36 bp, synthetic construct
  misc_feature 1..36: note = Description of Artificial Sequence: Synthetic oligonucleotide
  source 1..36: mol_type = other DNA
gttttacactcttctgaattaacaaagctctcaaac

SEQ ID NO: 14564 - DNA, 36 bp, synthetic construct
  misc_feature 1..36: note = Description of Artificial Sequence: Synthetic oligonucleotide
  source 1..36: mol_type = other DNA
gttttacaggcattctaatcaacacagctctaaaac

SEQ ID NO: 14565 - DNA, 36 bp, synthetic construct
  misc_feature 1..36: note = Description of Artificial Sequence: Synthetic oligonucleotide
  source 1..36: mol_type = other DNA
gttttacagtagctaaaatcttaagggtactaaaac

SEQ ID NO: 14566 - DNA, 36 bp, synthetic construct
  misc_feature 1..36: note = Description of Artificial Sequence: Synthetic oligonucleotide
  source 1..36: mol_type = other DNA
gttttacagtagtgttatattgaaaggcactgaaat

SEQ ID NO: 14567 - DNA, 36 bp, synthetic construct
  misc_feature 1..36: note = Description of Artificial Sequence: Synthetic oligonucleotide
  source 1..36: mol_type = other DNA
gttttacagtagtgttatattgaatagtactgaaac

SEQ ID NO: 14568 - DNA, 36 bp, synthetic construct
  misc_feature 1..36: note = Description of Artificial Sequence: Synthetic oligonucleotide
  source 1..36: mol_type = other DNA
gttttacagtagtgttatattgaatggtactgaaac

SEQ ID NO: 14569 - DNA, 37 bp, synthetic construct
  misc_feature 1..37: note = Description of Artificial Sequence: Synthetic oligonucleotide
  source 1..37: mol_type = other DNA
gttttacagtagtgttatattgaatggtactgaaact

SEQ ID NO: 14570 - DNA, 36 bp, synthetic construct
  misc_feature 1..36: note = Description of Artificial Sequence: Synthetic oligonucleotide
  source 1..36: mol_type = other DNA
gttttacagttacttaaatcttgagagtacaaaaac

SEQ ID NO: 14571 - DNA, 36 bp, synthetic construct
  misc_feature 1..36: note = Description of Artificial Sequence: Synthetic oligonucleotide
  source 1..36: mol_type = other DNA
gttttacatacttattgatttacacggttctaaaac

SEQ ID NO: 14572 - DNA, 36 bp, synthetic construct
  misc_feature 1..36: note = Description of Artificial Sequence: Synthetic oligonucleotide
  source 1..36: mol_type = other DNA
gttttacattattcaaatttatcaagagtctgtatc

SEQ ID NO: 14573 - DNA, 36 bp, synthetic construct
  misc_feature 1..36: note = Description of Artificial Sequence: Synthetic oligonucleotide
  source 1..36: mol_type = other DNA
gttttaccaccatacagaattacaccactctcaaac

SEQ ID NO: 14574 - DNA, 36 bp, synthetic construct
  misc_feature 1..36: note = Description of Artificial Sequence: Synthetic oligonucleotide
  source 1..36: mol_type = other DNA
gttttaccaccatacagaattacaccattctcaaac

SEQ ID NO: 14575 - DNA, 36 bp, synthetic construct
  misc_feature 1..36: note = Description of Artificial Sequence: Synthetic oligonucleotide
  source 1..36: mol_type = other DNA
gttttaccactatcaagaatcacaacactctcaaac

SEQ ID NO: 14576 - DNA, 36 bp, synthetic construct
  misc_feature 1..36: note = Description of Artificial Sequence: Synthetic oligonucleotide
  source 1..36: mol_type = other DNA
gttttaccactctctaaaattacattgaactaaaac

SEQ ID NO: 14577 - DNA, 36 bp, synthetic construct
  misc_feature 1..36: note = Description of Artificial Sequence: Synthetic oligonucleotide
  source 1..36: mol_type = other DNA
gttttaccgccgtgttgtttagaatgtcgccaaaac

SEQ ID NO: 14578 - DNA, 36 bp, synthetic construct
  misc_feature 1..36: note = Description of Artificial Sequence: Synthetic oligonucleotide
  source 1..36: mol_type = other DNA
gttttacctacttcttgatttacaaggttctcaaac

SEQ ID NO: 14579 - DNA, 36 bp, synthetic construct
  misc_feature 1..36: note = Description of Artificial Sequence: Synthetic oligonucleotide
  source 1..36: mol_type = other DNA
gttttaccttattatgaattaacaaagctctcaaac

SEQ ID NO: 14580 - DNA, 36 bp, synthetic construct
  misc_feature 1..36: note = Description of Artificial Sequence: Synthetic oligonucleotide
  source 1..36: mol_type = other DNA
gttttacgataactcaattctttcaggtactaaaat

SEQ ID NO: 14581 - DNA, 36 bp, synthetic construct
  misc_feature 1..36: note = Description of Artificial Sequence: Synthetic oligonucleotide
  source 1..36: mol_type = other DNA
gttttacgataacttaattctttcaggtactaaaat

SEQ ID NO: 14582 - DNA, 36 bp, synthetic construct
  misc_feature 1..36: note = Description of Artificial Sequence: Synthetic oligonucleotide
  source 1..36: mol_type = other DNA
gttttacgataacttaatttcttcaggtactaaaat

SEQ ID NO: 14583 - DNA, 36 bp, synthetic construct
  misc_feature 1..36: note = Description of Artificial Sequence: Synthetic oligonucleotide
  source 1..36: mol_type = other DNA
gttttacggttacttaaatcctgagagtacaaaaac

SEQ ID NO: 14584 - DNA, 36 bp, synthetic construct
  misc_feature 1..36: note = Description of Artificial Sequence: Synthetic oligonucleotide
  source 1..36: mol_type = other DNA
gttttacggttacttaaatcttgagagtacaaaaac

SEQ ID NO: 14585 - DNA, 36 bp, synthetic construct
  misc_feature 1..36: note = Description of Artificial Sequence: Synthetic oligonucleotide
  source 1..36: mol_type = other DNA
gttttactaccaaaagaaattacactactctcaaac

SEQ ID NO: 14586 - DNA, 36 bp, synthetic construct
  misc_feature 1..36: note = Description of Artificial Sequence: Synthetic oligonucleotide
  source 1..36: mol_type = other DNA
gttttactaccaattagaatgacactactctaaaac

SEQ ID NO: 14587 - DNA, 36 bp, synthetic construct
  misc_feature 1..36: note = Description of Artificial Sequence: Synthetic oligonucleotide
  source 1..36: mol_type = other DNA
gttttactaccacttgaaattacactactctcaaac

SEQ ID NO: 14588 - DNA, 36 bp, synthetic construct
  misc_feature 1..36: note = Description of Artificial Sequence: Synthetic oligonucleotide
  source 1..36: mol_type = other DNA
gttttactaccatacaaaattacactactctcaaac

SEQ ID NO: 14589 - DNA, 36 bp, synthetic construct
  misc_feature 1..36: note = Description of Artificial Sequence: Synthetic oligonucleotide
  source 1..36: mol_type = other DNA
gttttactaccatacgaaattacactactctcaaac

SEQ ID NO: 14590 - DNA, 36 bp, synthetic construct
  misc_feature 1..36: note = Description of Artificial Sequence: Synthetic oligonucleotide
  source 1..36: mol_type = other DNA
gttttactaccatatgaaattacactactctcaaac

SEQ ID NO: 14591 - DNA, 36 bp, synthetic construct
  misc_feature 1..36: note = Description of Artificial Sequence: Synthetic oligonucleotide
  source 1..36: mol_type = other DNA
gttttactaccatcttggattacactactctcaaac

SEQ ID NO: 14592 - DNA, 36 bp, synthetic construct
  misc_feature 1..36: note = Description of Artificial Sequence: Synthetic oligonucleotide
  source 1..36: mol_type = other DNA
gttttactaccattaggaattacactactctcaaac

SEQ ID NO: 14593 - DNA, 36 bp, synthetic construct
  misc_feature 1..36: note = Description of Artificial Sequence: Synthetic oligonucleotide
  source 1..36: mol_type = other DNA
gttttactaccatttaagatgacaccatactcaaac

SEQ ID NO: 14594 - DNA, 36 bp, synthetic construct
  misc_feature 1..36: note = Description of Artificial Sequence: Synthetic oligonucleotide
  source 1..36: mol_type = other DNA
gttttactaccctataaaatcacactactctcaaac

SEQ ID NO: 14595 - DNA, 36 bp, synthetic construct
  misc_feature 1..36: note = Description of Artificial Sequence: Synthetic oligonucleotide
  source 1..36: mol_type = other DNA
gttttactaccctataaaattacactactctcaaac

SEQ ID NO: 14596 - DNA, 36 bp, synthetic construct
  misc_feature 1..36: note = Description of Artificial Sequence: Synthetic oligonucleotide
  source 1..36: mol_type = other DNA
gttttactaccctatagaattacactactctcaaac

SEQ ID NO: 14597 - DNA, 36 bp, synthetic construct
  misc_feature 1..36: note = Description of Artificial Sequence: Synthetic oligonucleotide
  source 1..36: mol_type = other DNA
gttttactaccttacgaaattacactattctcaaac

SEQ ID NO: 14598 - DNA, 36 bp, synthetic construct
  misc_feature 1..36: note = Description of Artificial Sequence: Synthetic oligonucleotide
  source 1..36: mol_type = other DNA
gttttactaccttatagatttacactattctcaaac

SEQ ID NO: 14599 - DNA, 36 bp, synthetic construct
  misc_feature 1..36: note = Description of Artificial Sequence: Synthetic oligonucleotide
  source 1..36: mol_type = other DNA
gttttactaccttatgaaattacactattctcaaac

SEQ ID NO: 14600 - DNA, 36 bp, synthetic construct
  misc_feature 1..36: note = Description of Artificial Sequence: Synthetic oligonucleotide
  source 1..36: mol_type = other DNA
gttttactactataaagatttacactactctcaaac

SEQ ID NO: 14601 - DNA, 36 bp, synthetic construct
  misc_feature 1..36: note = Description of Artificial Sequence: Synthetic oligonucleotide
  source 1..36: mol_type = other DNA
gttttactactatctaaaataacgcaactataaaac

SEQ ID NO: 14602 - DNA, 36 bp, synthetic construct
  misc_feature 1..36: note = Description of Artificial Sequence: Synthetic oligonucleotide
  source 1..36: mol_type = other DNA
gttttactactatctaaaattacattggtctaaaac

SEQ ID NO: 14603 - DNA, 36 bp, synthetic construct
  misc_feature 1..36: note = Description of Artificial Sequence: Synthetic oligonucleotide
  source 1..36: mol_type = other DNA
gttttactatacaaaaattttacagggtactagaac

SEQ ID NO: 14604 - DNA, 36 bp, synthetic construct
  misc_feature 1..36: note = Description of Artificial Sequence: Synthetic oligonucleotide
  source 1..36: mol_type = other DNA
gttttactatacaaaaattttacagggtactagaat

SEQ ID NO: 14605 - DNA, 36 bp, synthetic construct
  misc_feature 1..36: note = Description of Artificial Sequence: Synthetic oligonucleotide
  source 1..36: mol_type = other DNA
gttttactatacaagaattttacagggtactagaac

SEQ ID NO: 14606 - DNA, 36 bp, synthetic construct
  misc_feature 1..36: note = Description of Artificial Sequence: Synthetic oligonucleotide
  source 1..36: mol_type = other DNA
gttttactatcatatgaaattacactactctcaaac

SEQ ID NO: 14607 - DNA, 36 bp, synthetic construct
  misc_feature 1..36: note = Description of Artificial Sequence: Synthetic oligonucleotide
  source 1..36: mol_type = other DNA
gttttactatcgtatggaattacgctactctcaaac

SEQ ID NO: 14608 - DNA, 36 bp, synthetic construct
  misc_feature 1..36: note = Description of Artificial Sequence: Synthetic oligonucleotide
  source 1..36: mol_type = other DNA
gttttactgataagaaattattgagagtacaaaaac

SEQ ID NO: 14609 - DNA, 36 bp, synthetic construct
  misc_feature 1..36: note = Description of Artificial Sequence: Synthetic oligonucleotide
  source 1..36: mol_type = other DNA
gttttactgatagacaattatcgagagtgcaaaaac

SEQ ID NO: 14610 - DNA, 36 bp, synthetic construct
  misc_feature 1..36: note = Description of Artificial Sequence: Synthetic oligonucleotide
  source 1..36: mol_type = other DNA
gttttactgataggaaaatgttgagggtgcaaaaac

SEQ ID NO: 14611 - DNA, 36 bp, synthetic construct
  misc_feature 1..36: note = Description of Artificial Sequence: Synthetic oligonucleotide
  source 1..36: mol_type = other DNA
gttttactgtattctgaatttgcactactctcaaac

SEQ ID NO: 14612 - DNA, 36 bp, synthetic construct
  misc_feature 1..36: note = Description of Artificial Sequence: Synthetic oligonucleotide
  source 1..36: mol_type = other DNA
gttttactgttacttaaatcttgagagtacaaaaac

SEQ ID NO: 14613 - DNA, 36 bp, synthetic construct
  misc_feature 1..36: note = Description of Artificial Sequence: Synthetic oligonucleotide
  source 1..36: mol_type = other DNA
gttttagaacaatgttattttgaatggtaacaaaac

SEQ ID NO: 14614 - DNA, 36 bp, synthetic construct
  misc_feature 1..36: note = Description of Artificial Sequence: Synthetic oligonucleotide
  source 1..36: mol_type = other DNA
gttttagaacagtgtaattttagagagtaatgaaac

SEQ ID NO: 14615 - DNA, 36 bp, synthetic construct
  misc_feature 1..36: note = Description of Artificial Sequence: Synthetic oligonucleotide
  source 1..36: mol_type = other DNA
gttttagaaccatgttaaatagaatgcttccaaaac

SEQ ID NO: 14616 - DNA, 36 bp, synthetic construct
  misc_feature 1..36: note = Description of Artificial Sequence: Synthetic oligonucleotide
  source 1..36: mol_type = other DNA
gttttagaactatgtaatttcaaatgcatccaaaac

SEQ ID NO: 14617 - DNA, 36 bp, synthetic construct
  misc_feature 1..36: note = Description of Artificial Sequence: Synthetic oligonucleotide
  source 1..36: mol_type = other DNA
gttttagaactatgtcattttatatggtattgaaac

SEQ ID NO: 14618 - DNA, 36 bp, synthetic construct
  misc_feature 1..36: note = Description of Artificial Sequence: Synthetic oligonucleotide
  source 1..36: mol_type = other DNA
gttttagaagtgtgttattttgaatgattacaaaac

SEQ ID NO: 14619 - DNA, 36 bp, synthetic construct
  misc_feature 1..36: note = Description of Artificial Sequence: Synthetic oligonucleotide
  source 1..36: mol_type = other DNA
gttttagaagtttacagaattacactactctcaaac

SEQ ID NO: 14620 - DNA, 36 bp, synthetic construct
  misc_feature 1..36: note = Description of Artificial Sequence: Synthetic oligonucleotide
  source 1..36: mol_type = other DNA
gttttagaattatgttattttagatagaaataaaac

SEQ ID NO: 14621 - DNA, 36 bp, synthetic construct
  misc_feature 1..36: note = Description of Artificial Sequence: Synthetic oligonucleotide
  source 1..36: mol_type = other DNA
gttttagacctatgtaaaatcaaatggttccaaagg

SEQ ID NO: 14622 - DNA, 36 bp, synthetic construct
  misc_feature 1..36: note = Description of Artificial Sequence: Synthetic oligonucleotide
  source 1..36: mol_type = other DNA
gttttagacctttgaaatcaggaggtcaaccacggc

SEQ ID NO: 14623 - DNA, 36 bp, synthetic construct
  misc_feature 1..36: note = Description of Artificial Sequence: Synthetic oligonucleotide
  source 1..36: mol_type = other DNA
gttttagactacataataatgataccaaaccaaaac

SEQ ID NO: 14624 - DNA, 36 bp, synthetic construct
  misc_feature 1..36: note = Description of Artificial Sequence: Synthetic oligonucleotide
  source 1..36: mol_type = other DNA
gttttagactgatgtaattctagagagaagtaaaac

SEQ ID NO: 14625 - DNA, 36 bp, synthetic construct
  misc_feature 1..36: note = Description of Artificial Sequence: Synthetic oligonucleotide
  source 1..36: mol_type = other DNA
gttttagagatgtgttattttgaatgattacaaaac

SEQ ID NO: 14626 - DNA, 36 bp, synthetic construct
  misc_feature 1..36: note = Description of Artificial Sequence: Synthetic oligonucleotide
  source 1..36: mol_type = other DNA
gttttagagatttacagaattacactactctcaaac

SEQ ID NO: 14627 - DNA, 36 bp, synthetic construct
  misc_feature 1..36: note = Description of Artificial Sequence: Synthetic oligonucleotide
  source 1..36: mol_type = other DNA
gttttagagccatgtaaaatcaaatggttccaaagg

SEQ ID NO: 14628 - DNA, 37 bp, synthetic construct
  misc_feature 1..37: note = Description of Artificial Sequence: Synthetic oligonucleotide
  source 1..37: mol_type = other DNA
gttttagagccgtgtcgtttagaatgccaccaaaact

SEQ ID NO: 14629 - DNA, 36 bp, synthetic construct
  misc_feature 1..36: note = Description of Artificial Sequence: Synthetic oligonucleotide
  source 1..36: mol_type = other DNA
gttttagagccgtgttgaacggaacgcccccaaaac

SEQ ID NO: 14630 - DNA, 36 bp, synthetic construct
  misc_feature 1..36: note = Description of Artificial Sequence: Synthetic oligonucleotide
  source 1..36: mol_type = other DNA
gttttagagccgtgttgtttcgaatggtcccaaaac

SEQ ID NO: 14631 - DNA, 36 bp, synthetic construct
  misc_feature 1..36: note = Description of Artificial Sequence: Synthetic oligonucleotide
  source 1..36: mol_type = other DNA
gttttagagcggtgtcattctgactggtaatcaaac

SEQ ID NO: 14632 - DNA, 36 bp, synthetic construct
  misc_feature 1..36: note = Description of Artificial Sequence: Synthetic oligonucleotide
  source 1..36: mol_type = other DNA
gttttagagctatgtaattcagaatgggaataaaac

SEQ ID NO: 14633 - DNA, 36 bp, synthetic construct
  misc_feature 1..36: note = Description of Artificial Sequence: Synthetic oligonucleotide
  source 1..36: mol_type = other DNA
gttttagagctatgtcatattaaatggtattaaaac

SEQ ID NO: 14634 - DNA, 36 bp, synthetic construct
  misc_feature 1..36: note = Description of Artificial Sequence: Synthetic oligonucleotide
  source 1..36: mol_type = other DNA
gttttagagctatgttgaatcgaatgcttccaaaac

SEQ ID NO: 14635 - DNA, 36 bp, synthetic construct
  misc_feature 1..36: note = Description of Artificial Sequence: Synthetic oligonucleotide
  source 1..36: mol_type = other DNA
gttttagagctatgttgttttgaatggtcccaaaac

SEQ ID NO: 14636 - DNA, 36 bp, synthetic construct
  misc_feature 1..36: note = Description of Artificial Sequence: Synthetic oligonucleotide
  source 1..36: mol_type = other DNA
gttttagagctgtgctgtttcgaatggtttcaaaac

SEQ ID NO: 14637 - DNA, 36 bp, synthetic construct
  misc_feature 1..36: note = Description of Artificial Sequence: Synthetic oligonucleotide
  source 1..36: mol_type = other DNA
gttttagagctgtgttatcttgaatggtattaaagg

SEQ ID NO: 14638 - DNA, 36 bp, synthetic construct
  misc_feature 1..36: note = Description of Artificial Sequence: Synthetic oligonucleotide
  source 1..36: mol_type = other DNA
gttttagagctgtgttattttgaagagtactaaaac

SEQ ID NO: 14639 - DNA, 36 bp, synthetic construct
  misc_feature 1..36: note = Description of Artificial Sequence: Synthetic oligonucleotide
  source 1..36: mol_type = other DNA
gttttagagctgtgttattttggactgaactaaaac

SEQ ID NO: 14640 - DNA, 36 bp, synthetic construct
  misc_feature 1..36: note = Description of Artificial Sequence: Synthetic oligonucleotide
  source 1..36: mol_type = other DNA
gttttagagctgtgttgaattgaatgcctccaaaac

SEQ ID NO: 14641 - DNA, 36 bp, synthetic construct
  misc_feature 1..36: note = Description of Artificial Sequence: Synthetic oligonucleotide
  source 1..36: mol_type = other DNA
gttttagagctgtgttgatttgaatggttacaaaac

SEQ ID NO: 14642 - DNA, 36 bp, synthetic construct
  misc_feature 1..36: note = Description of Artificial Sequence: Synthetic oligonucleotide
  source 1..36: mol_type = other DNA
gttttagagctgtgttgtttcgaatggtcccaaaac

SEQ ID NO: 14643 - DNA, 29 bp, synthetic construct
  misc_feature 1..29: note = Description of Artificial Sequence: Synthetic oligonucleotide
  source 1..29: mol_type = other DNA
gttttagagctgtgttgtttcgaatggtt

SEQ ID NO: 14644 - DNA, 36 bp, synthetic construct
  misc_feature 1..36: note = Description of Artificial Sequence: Synthetic oligonucleotide
  source 1..36: mol_type = other DNA
gttttagagctgtgttgtttcgaatggttccaaaac

SEQ ID NO: 14645 - DNA, 36 bp, synthetic construct
  misc_feature 1..36: note = Description of Artificial Sequence: Synthetic oligonucleotide
  source 1..36: mol_type = other DNA
gttttagagctgtgttgttttgaatgcttaccaaac

SEQ ID NO: 14646 - DNA, 35 bp, synthetic construct
  misc_feature 1..35: note = Description of Artificial Sequence: Synthetic oligonucleotide
  source 1..35: mol_type = other DNA
gttttagaggtatgttaattttgaatagtacaaaa

SEQ ID NO: 14647 - DNA, 36 bp, synthetic construct
  misc_feature 1..36: note = Description of Artificial Sequence: Synthetic oligonucleotide
  source 1..36: mol_type = other DNA
gttttagaggtatgttattttagatagtaataaaac

SEQ ID NO: 14648 - DNA, 36 bp, synthetic construct
  misc_feature 1..36: note = Description of Artificial Sequence: Synthetic oligonucleotide
  source 1..36: mol_type = other DNA
gttttagaggtctaaggaattacactactctcaaac

SEQ ID NO: 14649 - DNA, 36 bp, synthetic construct
  misc_feature 1..36: note = Description of Artificial Sequence: Synthetic oligonucleotide
  source 1..36: mol_type = other DNA
gttttagaggtttacagaattaaactactctcaaac

SEQ ID NO: 14650 - DNA, 36 bp, synthetic construct
  misc_feature 1..36: note = Description of Artificial Sequence: Synthetic oligonucleotide
  source 1..36: mol_type = other DNA
gttttagaggtttacagaattacactactctcaaac

SEQ ID NO: 14651 - DNA, 36 bp, synthetic construct
  misc_feature 1..36: note = Description of Artificial Sequence: Synthetic oligonucleotide
  source 1..36: mol_type = other DNA
gttttagagtaaggtaattcttgattgatgtaaaac

SEQ ID NO: 14652 - DNA, 36 bp, synthetic construct
  misc_feature 1..36: note = Description of Artificial Sequence: Synthetic oligonucleotide
  source 1..36: mol_type = other DNA
gttttagagtaaggtaattcttgattgatgtcgaac

SEQ ID NO: 14653 - DNA, 36 bp, synthetic construct
  misc_feature 1..36: note = Description of Artificial Sequence: Synthetic oligonucleotide
  source 1..36: mol_type = other DNA
gttttagagtagtgttattttgaatgggtacaaaac

SEQ ID NO: 14654 - DNA, 36 bp, synthetic construct
  misc_feature 1..36: note = Description of Artificial Sequence: Synthetic oligonucleotide
  source 1..36: mol_type = other DNA
gttttagagtagtgttgttttgaatggaactaaaac

SEQ ID NO: 14655 - DNA, 36 bp, synthetic construct
  misc_feature 1..36: note = Description of Artificial Sequence: Synthetic oligonucleotide
  source 1..36: mol_type = other DNA
gttttagagttgtgtcgttttatctagttccaaaac

SEQ ID NO: 14656 - DNA, 36 bp, synthetic construct
  misc_feature 1..36: note = Description of Artificial Sequence: Synthetic oligonucleotide
  source 1..36: mol_type = other DNA
gttttagagttgtgtcgttttttctagttccaaaac

SEQ ID NO: 14657 - DNA, 36 bp, synthetic construct
  misc_feature 1..36: note = Description of Artificial Sequence: Synthetic oligonucleotide
  source 1..36: mol_type = other DNA
gttttagagttgtgttaaattgaatggtattaaagc

SEQ ID NO: 14658 - DNA, 36 bp, synthetic construct
  misc_feature 1..36: note = Description of Artificial Sequence: Synthetic oligonucleotide
  source 1..36: mol_type = other DNA
gttttagatataagccattttaagtacatagaaccc

SEQ ID NO: 14659 - DNA, 36 bp, synthetic construct
  misc_feature 1..36: note = Description of Artificial Sequence: Synthetic oligonucleotide
  source 1..36: mol_type = other DNA
gttttagatcagtgtaattttagagagtagtaaaac

SEQ ID NO: 14660 - DNA, 36 bp, synthetic construct
  misc_feature 1..36: note = Description of Artificial Sequence: Synthetic oligonucleotide
  source 1..36: mol_type = other DNA
gttttagatctatgtcatattgaatggtattaaaac

SEQ ID NO: 14661 - DNA, 36 bp, synthetic construct
  misc_feature 1..36: note = Description of Artificial Sequence: Synthetic oligonucleotide
  source 1..36: mol_type = other DNA
gttttagatctatgtcatcttgaatggtattaaaac

SEQ ID NO: 14662 - DNA, 36 bp, synthetic construct
  misc_feature 1..36: note = Description of Artificial Sequence: Synthetic oligonucleotide
  source 1..36: mol_type = other DNA
gttttagatctgtgtcatattgaatggtattaaaac

SEQ ID NO: 14663 - DNA, 36 bp, synthetic construct
  misc_feature 1..36: note = Description of Artificial Sequence: Synthetic oligonucleotide
  source 1..36: mol_type = other DNA
gttttagatgattgttagatcaatgaggtttagaac

SEQ ID NO: 14664 - DNA, 36 bp, synthetic construct
  misc_feature 1..36: note = Description of Artificial Sequence: Synthetic oligonucleotide
  source 1..36: mol_type = other DNA
gttttagatggttgttagatcaataaggcttagatc

SEQ ID NO: 14665 - DNA, 36 bp, synthetic construct
  misc_feature 1..36: note = Description of Artificial Sequence: Synthetic oligonucleotide
  source 1..36: mol_type = other DNA
gttttagatgtatgtaattcaaaatggtactaaaac

SEQ ID NO: 14666 - DNA, 36 bp, synthetic construct
  misc_feature 1..36: note = Description of Artificial Sequence: Synthetic oligonucleotide
  source 1..36: mol_type = other DNA
gttttagcaccataagaattttagtcattgtaaaac

SEQ ID NO: 14667 - DNA, 36 bp, synthetic construct
  misc_feature 1..36: note = Description of Artificial Sequence: Synthetic oligonucleotide
  source 1..36: mol_type = other DNA
gttttagcagaacgagagagggctgcaatccgcagc

SEQ ID NO: 14668 - DNA, 36 bp, synthetic construct
  misc_feature 1..36: note = Description of Artificial Sequence: Synthetic oligonucleotide
  source 1..36: mol_type = other DNA
gttttagcagatagagaattacagtcaagccgtaac

SEQ ID NO: 14669 - DNA, 36 bp, synthetic construct
  misc_feature 1..36: note = Description of Artificial Sequence: Synthetic oligonucleotide
  source 1..36: mol_type = other DNA
gttttagccgcttgttaaattcttttatggtaaaat

SEQ ID NO: 14670 - DNA, 36 bp, synthetic construct
  misc_feature 1..36: note = Description of Artificial Sequence: Synthetic oligonucleotide
  source 1..36: mol_type = other DNA
gttttagcttaattaaagattagacttattaaaaat

SEQ ID NO: 14671 - DNA, 37 bp, synthetic construct
  misc_feature 1..37: note = Description of Artificial Sequence: Synthetic oligonucleotide
  source 1..37: mol_type = other DNA
gttttagcttgcggacaggccttgtttaaacactaat

SEQ ID NO: 14672 - DNA, 36 bp, synthetic construct
  misc_feature 1..36: note = Description of Artificial Sequence: Synthetic oligonucleotide
  source 1..36: mol_type = other DNA
gttttaggaccatgttaattagaatgcttccaaaac

SEQ ID NO: 14673 - DNA, 30 bp, synthetic construct
  misc_feature 1..30: note = Description of Artificial Sequence: Synthetic oligonucleotide
  source 1..30: mol_type = other DNA
gttttaggagtatgttattttgaatggtaa

SEQ ID NO: 14674 - DNA, 36 bp, synthetic construct
  misc_feature 1..36: note = Description of Artificial Sequence: Synthetic oligonucleotide
  source 1..36: mol_type = other DNA
gttttaggagtatgttattttgaatggtaacaaaac

SEQ ID NO: 14675 - DNA, 36 bp, synthetic construct
  misc_feature 1..36: note = Description of Artificial Sequence: Synthetic oligonucleotide
  source 1..36: mol_type = other DNA
gttttaggatgctgtaaaatttgagtaatgtaaaac

SEQ ID NO: 14676 - DNA, 36 bp, synthetic construct
  misc_feature 1..36: note = Description of Artificial Sequence: Synthetic oligonucleotide
  source 1..36: mol_type = other DNA
gttttaggatgttgttaaatttgaatatgataaaac

SEQ ID NO: 14677 - DNA, 36 bp, synthetic construct
  misc_feature 1..36: note = Description of Artificial Sequence: Synthetic oligonucleotide
  source 1..36: mol_type = other DNA
gttttaggatgttgttaaatttgagtatgataaaac

SEQ ID NO: 14678 - DNA, 36 bp, synthetic construct
  misc_feature 1..36: note = Description of Artificial Sequence: Synthetic oligonucleotide
  source 1..36: mol_type = other DNA
gttttagggtcatgttgaatagaatgcttcccaaac

SEQ ID NO: 14679 - DNA, 36 bp, synthetic construct
  misc_feature 1..36: note = Description of Artificial Sequence: Synthetic oligonucleotide
  source 1..36: mol_type = other DNA
gttttagggttgtgtaattttgaactgaattaaaac

SEQ ID NO: 14680 - DNA, 36 bp, synthetic construct
  misc_feature 1..36: note = Description of Artificial Sequence: Synthetic oligonucleotide
  source 1..36: mol_type = other DNA
gttttaggtgtatgtaattttgaatggtaacacaac

SEQ ID NO: 14681 - DNA, 31 bp, synthetic construct
  misc_feature 1..31: note = Description of Artificial Sequence: Synthetic oligonucleotide
  source 1..31: mol_type = other DNA
gttttagtaatgtgtaaatcaaatgagtact

SEQ ID NO: 14682 - DNA, 36 bp, synthetic construct
  misc_feature 1..36: note = Description of Artificial Sequence: Synthetic oligonucleotide
  source 1..36: mol_type = other DNA
gttttagtaccctcacaatttttgctatactaatac

SEQ ID NO: 14683 - DNA, 36 bp, synthetic construct
  misc_feature 1..36: note = Description of Artificial Sequence: Synthetic oligonucleotide
  source 1..36: mol_type = other DNA
gttttagtacccttagaattttagctactgtaaaac

SEQ ID NO: 14684 - DNA, 36 bp, synthetic construct
  misc_feature 1..36: note = Description of Artificial Sequence: Synthetic oligonucleotide
  source 1..36: mol_type = other DNA
gttttagtacctgaaagaattgagtcatcataaaac

SEQ ID NO: 14685 - DNA, 36 bp, synthetic construct
  misc_feature 1..36: note = Description of Artificial Sequence: Synthetic oligonucleotide
  source 1..36: mol_type = other DNA
gttttagtactctcagaattttagctactgtaaaac

SEQ ID NO: 14686 - DNA, 36 bp, synthetic construct
  misc_feature 1..36: note = Description of Artificial Sequence: Synthetic oligonucleotide
  source 1..36: mol_type = other DNA
gttttagtactctgcgaaatttagtataagtgagat

SEQ ID NO: 14687 - DNA, 36 bp, synthetic construct
  misc_feature 1..36: note = Description of Artificial Sequence: Synthetic oligonucleotide
  source 1..36: mol_type = other DNA
gttttagtactctgtaatctttcgctatgataaaac

SEQ ID NO: 14688 - DNA, 36 bp, synthetic construct
  misc_feature 1..36: note = Description of Artificial Sequence: Synthetic oligonucleotide
  source 1..36: mol_type = other DNA
gttttagtactctgtaattttaggtataaggtatat

SEQ ID NO: 14689 - DNA, 36 bp, synthetic construct
  misc_feature 1..36: note = Description of Artificial Sequence: Synthetic oligonucleotide
  source 1..36: mol_type = other DNA
gttttagtactctgtaattttaggtataagtgaaac

SEQ ID NO: 14690 - DNA, 36 bp, synthetic construct
  misc_feature 1..36: note = Description of Artificial Sequence: Synthetic oligonucleotide
  source 1..36: mol_type = other DNA
gttttagtactctgtaattttaggtatgagtgaaac

SEQ ID NO: 14691 - DNA, 36 bp, synthetic construct
  misc_feature 1..36: note = Description of Artificial Sequence: Synthetic oligonucleotide
  source 1..36: mol_type = other DNA
gttttagtactctgtaatttttcactatgataaaac

SEQ ID NO: 14692 - DNA, 36 bp, synthetic construct
  misc_feature 1..36: note = Description of Artificial Sequence: Synthetic oligonucleotide
  source 1..36: mol_type = other DNA
gttttagtactctgtaatttttcgctatgataaaac

SEQ ID NO: 14693 - DNA, 36 bp, synthetic construct
  misc_feature 1..36: note = Description of Artificial Sequence: Synthetic oligonucleotide
  source 1..36: mol_type = other DNA
gttttagtactctgtaattttttgctatgataaaac

SEQ ID NO: 14694 - DNA, 36 bp, synthetic construct
  misc_feature 1..36: note = Description of Artificial Sequence: Synthetic oligonucleotide
  source 1..36: mol_type = other DNA
gttttagtactctgtacttttaggtagtaaagagac

SEQ ID NO: 14695 - DNA, 36 bp, synthetic construct
  misc_feature 1..36: note = Description of Artificial Sequence: Synthetic oligonucleotide
  source 1..36: mol_type = other DNA
gttttagtactctgttggatattgataaacttacac

SEQ ID NO: 14696 - DNA, 36 bp, synthetic construct
  misc_feature 1..36: note = Description of Artificial Sequence: Synthetic oligonucleotide
  source 1..36: mol_type = other DNA
gttttagtactcttcaaaataacacagctctaaaac

SEQ ID NO: 14697 - DNA, 35 bp, synthetic construct
  misc_feature 1..35: note = Description of Artificial Sequence: Synthetic oligonucleotide
  source 1..35: mol_type = other DNA
gttttagtatcatgacatttttagtacctctaaaa

SEQ ID NO: 14698 - DNA, 36 bp, synthetic construct
  misc_feature 1..36: note = Description of Artificial Sequence: Synthetic oligonucleotide
  source 1..36: mol_type = other DNA
gttttagtatcatgtaattctaataaggaataaaac

SEQ ID NO: 14699 - DNA, 25 bp, synthetic construct
  misc_feature 1..25: note = Description of Artificial Sequence: Synthetic oligonucleotide
  source 1..25: mol_type = other DNA
gttttagtatcatgtaatttaataa

SEQ ID NO: 14700 - DNA, 36 bp, synthetic construct
  misc_feature 1..36: note = Description of Artificial Sequence: Synthetic oligonucleotide
  source 1..36: mol_type = other DNA
gttttagtattctaaggatttaagctattgtaaaac

SEQ ID NO: 14701 - DNA, 36 bp, synthetic construct
  misc_feature 1..36: note = Description of Artificial Sequence: Synthetic oligonucleotide
  source 1..36: mol_type = other DNA
gttttagtcccctataaactcatactactctcaaac

SEQ ID NO: 14702 - DNA, 36 bp, synthetic construct
  misc_feature 1..36: note = Description of Artificial Sequence: Synthetic oligonucleotide
  source 1..36: mol_type = other DNA
gttttagtcccctataaattcacactactctcaaac

SEQ ID NO: 14703 - DNA, 36 bp, synthetic construct
  misc_feature 1..36: note = Description of Artificial Sequence: Synthetic oligonucleotide
  source 1..36: mol_type = other DNA
gttttagtcctctgatggatatcggcaaacttatac

SEQ ID NO: 14704 - DNA, 36 bp, synthetic construct
  misc_feature 1..36: note = Description of Artificial Sequence: Synthetic oligonucleotide
  source 1..36: mol_type = other DNA
gttttagtcctctgatggatattggtaaacttatat

SEQ ID NO: 14705 - DNA, 36 bp, synthetic construct
  misc_feature 1..36: note = Description of Artificial Sequence: Synthetic oligonucleotide
  source 1..36: mol_type = other DNA
gttttagtgataggaaattattgagagtacaaaaac

SEQ ID NO: 14706 - DNA, 36 bp, synthetic construct
  misc_feature 1..36: note = Description of Artificial Sequence: Synthetic oligonucleotide
  source 1..36: mol_type = other DNA
gttttagtggcattctaaacaacatggcgataaaac

SEQ ID NO: 14707 - DNA, 36 bp, synthetic construct
  misc_feature 1..36: note = Description of Artificial Sequence: Synthetic oligonucleotide
  source 1..36: mol_type = other DNA
gttttagttatatacaaaataacataactctcaaac

SEQ ID NO: 14708 - DNA, 36 bp, synthetic construct
  misc_feature 1..36: note = Description of Artificial Sequence: Synthetic oligonucleotide
  source 1..36: mol_type = other DNA
gttttagttcaatgtaattttagagagtggtaaaac

SEQ ID NO: 14709 - DNA, 36 bp, synthetic construct
  misc_feature 1..36: note = Description of Artificial Sequence: Synthetic oligonucleotide
  source 1..36: mol_type = other DNA
gttttagttcagtccaaaataacacaactctaaaac

SEQ ID NO: 14710 - DNA, 36 bp, synthetic construct
  misc_feature 1..36: note = Description of Artificial Sequence: Synthetic oligonucleotide
  source 1..36: mol_type = other DNA
gttttagttccctgatgtttcttggtatggtaaaag

SEQ ID NO: 14711 - DNA, 36 bp, synthetic construct
  misc_feature 1..36: note = Description of Artificial Sequence: Synthetic oligonucleotide
  source 1..36: mol_type = other DNA
gttttagttcccttttgagttttggtatggtataat

SEQ ID NO: 14712 - DNA, 36 bp, synthetic construct
  misc_feature 1..36: note = Description of Artificial Sequence: Synthetic oligonucleotide
  source 1..36: mol_type = other DNA
gttttagttctatgatggatattgataaacttatac

SEQ ID NO: 14713 - DNA, 36 bp, synthetic construct
  misc_feature 1..36: note = Description of Artificial Sequence: Synthetic oligonucleotide
  source 1..36: mol_type = other DNA
gttttagttctatgtcatcttaaatggtattaaaac

SEQ ID NO: 14714 - DNA, 37 bp, synthetic construct
  misc_feature 1..37: note = Description of Artificial Sequence: Synthetic oligonucleotide
  source 1..37: mol_type = other DNA
gttttagttctatgtcatcttaaatggtattaaaacg

SEQ ID NO: 14715 - DNA, 36 bp, synthetic construct
  misc_feature 1..36: note = Description of Artificial Sequence: Synthetic oligonucleotide
  source 1..36: mol_type = other DNA
gttttagttctatgtcgttttaaatggtattaaaac

SEQ ID NO: 14716 - DNA, 36 bp, synthetic construct
  misc_feature 1..36: note = Description of Artificial Sequence: Synthetic oligonucleotide
  source 1..36: mol_type = other DNA
gttttagttctctgatggatattgataaactcatac

SEQ ID NO: 14717 - DNA, 36 bp, synthetic construct
  misc_feature 1..36: note = Description of Artificial Sequence: Synthetic oligonucleotide
  source 1..36: mol_type = other DNA
gttttagttctctgatggatattgatggacttatac

SEQ ID NO: 14718 - DNA, 36 bp, synthetic construct
  misc_feature 1..36: note = Description of Artificial Sequence: Synthetic oligonucleotide
  source 1..36: mol_type = other DNA
gttttagttctctgatggatattgattgacttatac

SEQ ID NO: 14719 - DNA, 36 bp, synthetic construct
  misc_feature 1..36: note = Description of Artificial Sequence: Synthetic oligonucleotide
  source 1..36: mol_type = other DNA
gttttataactgtgttgttttgaataggactaaaac

SEQ ID NO: 14720 - DNA, 36 bp, synthetic construct
  misc_feature 1..36: note = Description of Artificial Sequence: Synthetic oligonucleotide
  source 1..36: mol_type = other DNA
gttttatacctctatgaatttacattgctctcaaac

SEQ ID NO: 14721 - DNA, 36 bp, synthetic construct
  misc_feature 1..36: note = Description of Artificial Sequence: Synthetic oligonucleotide
  source 1..36: mol_type = other DNA
gttttatactactcaaaaatcacagcatcctaaaac

SEQ ID NO: 14722 - DNA, 36 bp, synthetic construct
  misc_feature 1..36: note = Description of Artificial Sequence: Synthetic oligonucleotide
  source 1..36: mol_type = other DNA
gttttatagaattcaaaatttatatatctctcaaac

SEQ ID NO: 14723 - DNA, 36 bp, synthetic construct
  misc_feature 1..36: note = Description of Artificial Sequence: Synthetic oligonucleotide
  source 1..36: mol_type = other DNA
gttttatagttacttaaatcttgagagtacaaaaac

SEQ ID NO: 14724 - DNA, 36 bp, synthetic construct
  misc_feature 1..36: note = Description of Artificial Sequence: Synthetic oligonucleotide
  source 1..36: mol_type = other DNA
gttttatagttgtgttattttgaatgattacaaaac

SEQ ID NO: 14725 - DNA, 36 bp, synthetic construct
  misc_feature 1..36: note = Description of Artificial Sequence: Synthetic oligonucleotide
  source 1..36: mol_type = other DNA
gttttatatccctatgaatttacactactctcaaac

SEQ ID NO: 14726 - DNA, 36 bp, synthetic construct
  misc_feature 1..36: note = Description of Artificial Sequence: Synthetic oligonucleotide
  source 1..36: mol_type = other DNA
gttttatatccttatgaattaacaagactctcaaac

SEQ ID NO: 14727 - DNA, 36 bp, synthetic construct
  misc_feature 1..36: note = Description of Artificial Sequence: Synthetic oligonucleotide
  source 1..36: mol_type = other DNA
gttttatatctatctaaaataacattactctcaaac

SEQ ID NO: 14728 - DNA, 36 bp, synthetic construct
  misc_feature 1..36: note = Description of Artificial Sequence: Synthetic oligonucleotide
  source 1..36: mol_type = other DNA
gttttatatcttatcaaattaacaaagctctcaaac

SEQ ID NO: 14729 - DNA, 36 bp, synthetic construct
  misc_feature 1..36: note = Description of Artificial Sequence: Synthetic oligonucleotide
  source 1..36: mol_type = other DNA
gttttatcacattaagaatttacaaagtactaaaac

SEQ ID NO: 14730 - DNA, 36 bp, synthetic construct
  misc_feature 1..36: note = Description of Artificial Sequence: Synthetic oligonucleotide
  source 1..36: mol_type = other DNA
gttttatcatagcgaaaaattacagagtactaaaac

SEQ ID NO: 14731 - DNA, 36 bp, synthetic construct
  misc_feature 1..36: note = Description of Artificial Sequence: Synthetic oligonucleotide
  source 1..36: mol_type = other DNA
gttttatcatagcgaaaaattatagagtactaaaac

SEQ ID NO: 14732 - DNA, 36 bp, synthetic construct
  misc_feature 1..36: note = Description of Artificial Sequence: Synthetic oligonucleotide
  source 1..36: mol_type = other DNA
gttttatcatattcaaatttaacaacatcctaaaac

SEQ ID NO: 14733 - DNA, 36 bp, synthetic construct
  misc_feature 1..36: note = Description of Artificial Sequence: Synthetic oligonucleotide
  source 1..36: mol_type = other DNA
gttttatgatgactcaattctttcaggtactaaaac

SEQ ID NO: 14734 - DNA, 36 bp, synthetic construct
  misc_feature 1..36: note = Description of Artificial Sequence: Synthetic oligonucleotide
  source 1..36: mol_type = other DNA
gttttattaccattcaaaataacatactcctaaaac

SEQ ID NO: 14735 - DNA, 36 bp, synthetic construct
  misc_feature 1..36: note = Description of Artificial Sequence: Synthetic oligonucleotide
  source 1..36: mol_type = other DNA
gttttattctagcaaaaatccatatggtaacaaaac

SEQ ID NO: 14736 - DNA, 36 bp, synthetic construct
  misc_feature 1..36: note = Description of Artificial Sequence: Synthetic oligonucleotide
  source 1..36: mol_type = other DNA
gttttcaacctctaaaattacacaggatcctaaaac

SEQ ID NO: 14737 - DNA, 36 bp, synthetic construct
  misc_feature 1..36: note = Description of Artificial Sequence: Synthetic oligonucleotide
  source 1..36: mol_type = other DNA
gttttcctataccgaaaactgagagagtaccgaaac

SEQ ID NO: 14738 - DNA, 36 bp, synthetic construct
  misc_feature 1..36: note = Description of Artificial Sequence: Synthetic oligonucleotide
  source 1..36: mol_type = other DNA
gttttcggcatctctcgtttaaagatgtgatataat

SEQ ID NO: 14739 - DNA, 36 bp, synthetic construct
  misc_feature 1..36: note = Description of Artificial Sequence: Synthetic oligonucleotide
  source 1..36: mol_type = other DNA
gttttctaatcacttaattttcccgggtactaaaac

SEQ ID NO: 14740 - DNA, 36 bp, synthetic construct
  misc_feature 1..36: note = Description of Artificial Sequence: Synthetic oligonucleotide
  source 1..36: mol_type = other DNA
gttttctaatcacttagtttttccaggtactaaaac

SEQ ID NO: 14741 - DNA, 36 bp, synthetic construct
  misc_feature 1..36: note = Description of Artificial Sequence: Synthetic oligonucleotide
  source 1..36: mol_type = other DNA
gttttgaacatgcttctaccgaagcaatctgctatc

SEQ ID NO: 14742 - DNA, 36 bp, synthetic construct
  misc_feature 1..36: note = Description of Artificial Sequence: Synthetic oligonucleotide
  source 1..36: mol_type = other DNA
gttttgaatctatttaaaataacattactctcaaac

SEQ ID NO: 14743 - DNA, 44 bp, synthetic construct
  misc_feature 1..44: note = Description of Artificial Sequence: Synthetic oligonucleotide
  source 1..44: mol_type = other DNA
gttttgaattgctttcaattttaagaattatctttgaacaaccg

SEQ ID NO: 14744 - DNA, 47 bp, synthetic construct
  misc_feature 1..47: note = Description of Artificial Sequence: Synthetic oligonucleotide
  source 1..47: mol_type = other DNA
gttttgaattgctttcatttttcaaaaaatattacctttggcttagc

SEQ ID NO: 14745 - DNA, 47 bp, synthetic construct
  misc_feature 1..47: note = Description of Artificial Sequence: Synthetic oligonucleotide
  source 1..47: mol_type = other DNA
gttttgaattgctttcattttttaaacaacatgtatctttgacatag

SEQ ID NO: 14746 - DNA, 36 bp, synthetic construct
  misc_feature 1..36: note = Description of Artificial Sequence: Synthetic oligonucleotide
  source 1..36: mol_type = other DNA
gttttgacgagcctaaaaaattaaatttgttataat

SEQ ID NO: 14747 - DNA, 36 bp, synthetic construct
  misc_feature 1..36: note = Description of Artificial Sequence: Synthetic oligonucleotide
  source 1..36: mol_type = other DNA
gttttgacgctacaaaattttggggatagtcggaat

SEQ ID NO: 14748 - DNA, 36 bp, synthetic construct
  misc_feature 1..36: note = Description of Artificial Sequence: Synthetic oligonucleotide
  source 1..36: mol_type = other DNA
gttttgacggtgctaaaaagttggatttgttagaat

SEQ ID NO: 14749 - DNA, 36 bp, synthetic construct
  misc_feature 1..36: note = Description of Artificial Sequence: Synthetic oligonucleotide
  source 1..36: mol_type = other DNA
gttttgacttcaccccccaaacggttctgttagatt

SEQ ID NO: 14750 - DNA, 36 bp, synthetic construct
  misc_feature 1..36: note = Description of Artificial Sequence: Synthetic oligonucleotide
  source 1..36: mol_type = other DNA
gttttgacttcaccccccggagaagtccgctataat

SEQ ID NO: 14751 - DNA, 36 bp, synthetic construct
  misc_feature 1..36: note = Description of Artificial Sequence: Synthetic oligonucleotide
  source 1..36: mol_type = other DNA
gttttgacttcaccccccggagaggtctgctagaat

SEQ ID NO: 14752 - DNA, 36 bp, synthetic construct
  misc_feature 1..36: note = Description of Artificial Sequence: Synthetic oligonucleotide
  source 1..36: mol_type = other DNA
gttttgacttcaccccccggcgaagtcggctacaat

SEQ ID NO: 14753 - DNA, 36 bp, synthetic construct
  misc_feature 1..36: note = Description of Artificial Sequence: Synthetic oligonucleotide
  source 1..36: mol_type = other DNA
gttttgacttcaccccccggcgaggtctgctagaat

SEQ ID NO: 14754 - DNA, 36 bp, synthetic construct
  misc_feature 1..36: note = Description of Artificial Sequence: Synthetic oligonucleotide
  source 1..36: mol_type = other DNA
gttttgacttcaccccccgtagaagtctgatacagt

SEQ ID NO: 14755 - DNA, 36 bp, synthetic construct
  misc_feature 1..36: note = Description of Artificial Sequence: Synthetic oligonucleotide
  source 1..36: mol_type = other DNA
gttttgacttcaccccctcgtgaagcctgttagaat

SEQ ID NO: 14756 - DNA, 36 bp, synthetic construct
  misc_feature 1..36: note = Description of Artificial Sequence: Synthetic oligonucleotide
  source 1..36: mol_type = other DNA
gttttgacttcacccctcagcgaggtctgacacact

SEQ ID NO: 14757 - DNA, 36 bp, synthetic construct
  misc_feature 1..36: note = Description of Artificial Sequence: Synthetic oligonucleotide
  source 1..36: mol_type = other DNA
gttttgacttccccccccggaagagcggcttaaact

SEQ ID NO: 14758 - DNA, 36 bp, synthetic construct
  misc_feature 1..36: note = Description of Artificial Sequence: Synthetic oligonucleotide
  source 1..36: mol_type = other DNA
gttttgacttgactattttttaaggaatattataat

SEQ ID NO: 14759 - DNA, 36 bp, synthetic construct
  misc_feature 1..36: note = Description of Artificial Sequence: Synthetic oligonucleotide
  source 1..36: mol_type = other DNA
gttttgactttacaacaaatcgttcttttaaacaat

SEQ ID NO: 14760 - DNA, 36 bp, synthetic construct
  misc_feature 1..36: note = Description of Artificial Sequence: Synthetic oligonucleotide
  source 1..36: mol_type = other DNA
gttttgatcctgcctccaacgaggcgatctgatatc

SEQ ID NO: 14761 - DNA, 36 bp, synthetic construct
  misc_feature 1..36: note = Description of Artificial Sequence: Synthetic oligonucleotide
  source 1..36: mol_type = other DNA
gttttgatcgtgccctcacaggggcaatctggtaat

SEQ ID NO: 14762 - DNA, 36 bp, synthetic construct
  misc_feature 1..36: note = Description of Artificial Sequence: Synthetic oligonucleotide
  source 1..36: mol_type = other DNA
gttttgatcgtgccctcaccggggcaatctggtaat

SEQ ID NO: 14763 - DNA, 36 bp, synthetic construct
  misc_feature 1..36: note = Description of Artificial Sequence: Synthetic oligonucleotide
  source 1..36: mol_type = other DNA
gttttgatctcgcccccacacgggcaatctggtaac

SEQ ID NO: 14764 - DNA, 36 bp, synthetic construct
  misc_feature 1..36: note = Description of Artificial Sequence: Synthetic oligonucleotide
  source 1..36: mol_type = other DNA
gttttgatctcgctccccccggagcaatctggtatt

SEQ ID NO: 14765 - DNA, 36 bp, synthetic construct
  misc_feature 1..36: note = Description of Artificial Sequence: Synthetic oligonucleotide
  source 1..36: mol_type = other DNA
gttttgatctcgctccccccggagcattctggtatc

SEQ ID NO: 14766 - DNA, 36 bp, synthetic construct
  misc_feature 1..36: note = Description of Artificial Sequence: Synthetic oligonucleotide
  source 1..36: mol_type = other DNA
gttttgatctcgctcccgccggagctatctggtatc

SEQ ID NO: 14767 - DNA, 36 bp, synthetic construct
  misc_feature 1..36: note = Description of Artificial Sequence: Synthetic oligonucleotide
  source 1..36: mol_type = other DNA
gttttgattacttacagaataacaagactctcaaac

SEQ ID NO: 14768 - DNA, 36 bp, synthetic construct
  misc_feature 1..36: note = Description of Artificial Sequence: Synthetic oligonucleotide
  source 1..36: mol_type = other DNA
gttttgatttactattagtttaaattatgttataat

SEQ ID NO: 14769 - DNA, 36 bp, synthetic construct
  misc_feature 1..36: note = Description of Artificial Sequence: Synthetic oligonucleotide
  source 1..36: mol_type = other DNA
gttttgatttgagtgttttttgatggtatattagag

SEQ ID NO: 14770 - DNA, 36 bp, synthetic construct
  misc_feature 1..36: note = Description of Artificial Sequence: Synthetic oligonucleotide
  source 1..36: mol_type = other DNA
gttttgattttcttttaatttaaaatatgttataat

SEQ ID NO: 14771 - DNA, 36 bp, synthetic construct
  misc_feature 1..36: note = Description of Artificial Sequence: Synthetic oligonucleotide
  source 1..36: mol_type = other DNA
gttttgcacctctctgaattaacaaggctctcaaac

SEQ ID NO: 14772 - DNA, 36 bp, synthetic construct
  misc_feature 1..36: note = Description of Artificial Sequence: Synthetic oligonucleotide
  source 1..36: mol_type = other DNA
gttttgcactcttacaaaatcacaaggttctcaaac

SEQ ID NO: 14773 - DNA, 36 bp, synthetic construct
  misc_feature 1..36: note = Description of Artificial Sequence: Synthetic oligonucleotide
  source 1..36: mol_type = other DNA
gttttgcatctttctgaattaacaaagctctcaaac

SEQ ID NO: 14774 - DNA, 36 bp, synthetic construct
  misc_feature 1..36: note = Description of Artificial Sequence: Synthetic oligonucleotide
  source 1..36: mol_type = other DNA
gttttgccaccctcaagatttttgccatacgaaaac

SEQ ID NO: 14775 - DNA, 36 bp, synthetic construct
  misc_feature 1..36: note = Description of Artificial Sequence: Synthetic oligonucleotide
  source 1..36: mol_type = other DNA
gttttgccttccccccagaggcgcgactgatagaat

SEQ ID NO: 14776 - DNA, 36 bp, synthetic construct
  misc_feature 1..36: note = Description of Artificial Sequence: Synthetic oligonucleotide
  source 1..36: mol_type = other DNA
gttttgccttccccccagaggcgcgtgagataaaat

SEQ ID NO: 14777 - DNA, 36 bp, synthetic construct
  misc_feature 1..36: note = Description of Artificial Sequence: Synthetic oligonucleotide
  source 1..36: mol_type = other DNA
gttttgccttccccccagaggcgcgtgatgtagaat

SEQ ID NO: 14778 - DNA, 36 bp, synthetic construct
  misc_feature 1..36: note = Description of Artificial Sequence: Synthetic oligonucleotide
  source 1..36: mol_type = other DNA
gttttgccttccccccggaagagcatcgggtaaaat

SEQ ID NO: 14779 - DNA, 36 bp, synthetic construct
  misc_feature 1..36: note = Description of Artificial Sequence: Synthetic oligonucleotide
  source 1..36: mol_type = other DNA
gttttgccttccccccggaagtgcatcgggtaaaat

SEQ ID NO: 14780 - DNA, 36 bp, synthetic construct
  misc_feature 1..36: note = Description of Artificial Sequence: Synthetic oligonucleotide
  source 1..36: mol_type = other DNA
gttttgccttccccccggaagtgcctcggttaaaat

SEQ ID NO: 14781 - DNA, 36 bp, synthetic construct
  misc_feature 1..36: note = Description of Artificial Sequence: Synthetic oligonucleotide
  source 1..36: mol_type = other DNA
gttttgccttccccccggaggccgggtcgttagaat

SEQ ID NO: 14782 - DNA, 36 bp, synthetic construct
  misc_feature 1..36: note = Description of Artificial Sequence: Synthetic oligonucleotide
  source 1..36: mol_type = other DNA
gttttgccttccccccggaggcgcgtctgatataat

SEQ ID NO: 14783 - DNA, 36 bp, synthetic construct
  misc_feature 1..36: note = Description of Artificial Sequence: Synthetic oligonucleotide
  source 1..36: mol_type = other DNA
gttttgccttgaatccaaaataaggcacagtacaat

SEQ ID NO: 14784 - DNA, 36 bp, synthetic construct
  misc_feature 1..36: note = Description of Artificial Sequence: Synthetic oligonucleotide
  source 1..36: mol_type = other DNA
gttttgccttgattccaaaatctatcagagcaaaat

SEQ ID NO: 14785 - DNA, 36 bp, synthetic construct
  misc_feature 1..36: note = Description of Artificial Sequence: Synthetic oligonucleotide
  source 1..36: mol_type = other DNA
gttttgctaccagcataatttacatagttctcaaac

SEQ ID NO: 14786 - DNA, 36 bp, synthetic construct
  misc_feature 1..36: note = Description of Artificial Sequence: Synthetic oligonucleotide
  source 1..36: mol_type = other DNA
gttttgctaccattagaatttttgctagattataac

SEQ ID NO: 14787 - DNA, 35 bp, synthetic construct
  misc_feature 1..35: note = Description of Artificial Sequence: Synthetic oligonucleotide
  source 1..35: mol_type = other DNA
gttttgctaccctcaaaaattttgctattcaatta

SEQ ID NO: 14788 - DNA, 36 bp, synthetic construct
  misc_feature 1..36: note = Description of Artificial Sequence: Synthetic oligonucleotide
  source 1..36: mol_type = other DNA
gttttgctaccctcacaatttttgctatgtaaagac

SEQ ID NO: 14789 - DNA, 36 bp, synthetic construct
  misc_feature 1..36: note = Description of Artificial Sequence: Synthetic oligonucleotide
  source 1..36: mol_type = other DNA
gttttgctaccctcagaaattttgctattcaacaac

SEQ ID NO: 14790 - DNA, 36 bp, synthetic construct
  misc_feature 1..36: note = Description of Artificial Sequence: Synthetic oligonucleotide
  source 1..36: mol_type = other DNA
gttttgctaccctccagatttatgctatgtgataac

SEQ ID NO: 14791 - DNA, 36 bp, synthetic construct
  misc_feature 1..36: note = Description of Artificial Sequence: Synthetic oligonucleotide
  source 1..36: mol_type = other DNA
gttttggaaccatgtcattattaacagctgtgatac

SEQ ID NO: 14792 - DNA, 36 bp, synthetic construct
  misc_feature 1..36: note = Description of Artificial Sequence: Synthetic oligonucleotide
  source 1..36: mol_type = other DNA
gttttggaaccattcgaaacaacacagctctaaaac

SEQ ID NO: 14793 - DNA, 37 bp, synthetic construct
  misc_feature 1..37: note = Description of Artificial Sequence: Synthetic oligonucleotide
  source 1..37: mol_type = other DNA
gttttggaaccattcgaaacaacacagctctaaaacc

SEQ ID NO: 14794 - DNA, 36 bp, synthetic construct
  misc_feature 1..36: note = Description of Artificial Sequence: Synthetic oligonucleotide
  source 1..36: mol_type = other DNA
gttttggaaccattcgaaacagcacagctctaaaac

SEQ ID NO: 14795 - DNA, 37 bp, synthetic construct
  misc_feature 1..37: note = Description of Artificial Sequence: Synthetic oligonucleotide
  source 1..37: mol_type = other DNA
gttttggaaccattcgaaacagcacagctctaaaaca

SEQ ID NO: 14796 - DNA, 36 bp, synthetic construct
  misc_feature 1..36: note = Description of Artificial Sequence: Synthetic oligonucleotide
  source 1..36: mol_type = other DNA
gttttggaactagaaaaaacgacacaactctaaaac

SEQ ID NO: 14797 - DNA, 36 bp, synthetic construct
  misc_feature 1..36: note = Description of Artificial Sequence: Synthetic oligonucleotide
  source 1..36: mol_type = other DNA
gttttggaactatgtcattccagatggttctactac

SEQ ID NO: 14798 - DNA, 36 bp, synthetic construct
  misc_feature 1..36: note = Description of Artificial Sequence: Synthetic oligonucleotide
  source 1..36: mol_type = other DNA
gttttggaagcattcaattcaacatagctctaaaac

SEQ ID NO: 14799 - DNA, 36 bp, synthetic construct
  misc_feature 1..36: note = Description of Artificial Sequence: Synthetic oligonucleotide
  source 1..36: mol_type = other DNA
gttttggaagcattctaattaacatggttctaaaac

SEQ ID NO: 14800 - DNA, 36 bp, synthetic construct
  misc_feature 1..36: note = Description of Artificial Sequence: Synthetic oligonucleotide
  source 1..36: mol_type = other DNA
gttttggaagcattctatttaacatggttctaaaac

SEQ ID NO: 14801 - DNA, 36 bp, synthetic construct
  misc_feature 1..36: note = Description of Artificial Sequence: Synthetic oligonucleotide
  source 1..36: mol_type = other DNA
gttttggaatcattcaaaataacatagctctaaaac

SEQ ID NO: 14802 - DNA, 36 bp, synthetic construct
  misc_feature 1..36: note = Description of Artificial Sequence: Synthetic oligonucleotide
  source 1..36: mol_type = other DNA
gttttggaattctctagtttgacaacactctcaaac

SEQ ID NO: 14803 - DNA, 36 bp, synthetic construct
  misc_feature 1..36: note = Description of Artificial Sequence: Synthetic oligonucleotide
  source 1..36: mol_type = other DNA
gttttggacgcattcaaaactacatagctctaaaac

SEQ ID NO: 14804 - DNA, 36 bp, synthetic construct
  misc_feature 1..36: note = Description of Artificial Sequence: Synthetic oligonucleotide
  source 1..36: mol_type = other DNA
gttttggagcagcgtcgttttggctggtagttagac

SEQ ID NO: 14805 - DNA, 36 bp, synthetic construct
  misc_feature 1..36: note = Description of Artificial Sequence: Synthetic oligonucleotide
  source 1..36: mol_type = other DNA
gttttggagcagtgacattctgactggtaatcaaac

SEQ ID NO: 14806 - DNA, 36 bp, synthetic construct
  misc_feature 1..36: note = Description of Artificial Sequence: Synthetic oligonucleotide
  source 1..36: mol_type = other DNA
gttttggagcagtgacattctgactggtagtcaaac

SEQ ID NO: 14807 - DNA, 36 bp, synthetic construct
  misc_feature 1..36: note = Description of Artificial Sequence: Synthetic oligonucleotide
  source 1..36: mol_type = other DNA
gttttggagcagtgccattctgactggtaatcaaac

SEQ ID NO: 14808 - DNA, 36 bp, synthetic construct
  misc_feature 1..36: note = Description of Artificial Sequence: Synthetic oligonucleotide
  source 1..36: mol_type = other DNA
gttttggagcagtggcattctgactggtagtcaaac

SEQ ID NO: 14809 - DNA, 36 bp, synthetic construct
  misc_feature 1..36: note = Description of Artificial Sequence: Synthetic oligonucleotide
  source 1..36: mol_type = other DNA
gttttggagcagtgtcaatctgactggtaatcaaac

SEQ ID NO: 14810 - DNA, 36 bp, synthetic construct
  misc_feature 1..36: note = Description of Artificial Sequence: Synthetic oligonucleotide
  source 1..36: mol_type = other DNA
gttttggagcagtgtcattttgactggtaatcaaac

SEQ ID NO: 14811 - DNA, 36 bp, synthetic construct
  misc_feature 1..36: note = Description of Artificial Sequence: Synthetic oligonucleotide
  source 1..36: mol_type = other DNA
gttttggagcagtgtcgaactgactggtaatcaaac

SEQ ID NO: 14812 - DNA, 36 bp, synthetic construct
  misc_feature 1..36: note = Description of Artificial Sequence: Synthetic oligonucleotide
  source 1..36: mol_type = other DNA
gttttggagcagtgtcgatctaactggtaatcaaac

SEQ ID NO: 14813 - DNA, 36 bp, synthetic construct
  misc_feature 1..36: note = Description of Artificial Sequence: Synthetic oligonucleotide
  source 1..36: mol_type = other DNA
gttttggagtcattcaaaacaacacagctctaaaac

SEQ ID NO: 14814 - DNA, 36 bp, synthetic construct
  misc_feature 1..36: note = Description of Artificial Sequence: Synthetic oligonucleotide
  source 1..36: mol_type = other DNA
gttttggcaccctcagaaactttgctctacgaatac

SEQ ID NO: 14815 - DNA, 36 bp, synthetic construct
  misc_feature 1..36: note = Description of Artificial Sequence: Synthetic oligonucleotide
  source 1..36: mol_type = other DNA
gttttggcgcagtgacattctgactggtaactaaac

SEQ ID NO: 14816 - DNA, 36 bp, synthetic construct
  misc_feature 1..36: note = Description of Artificial Sequence: Synthetic oligonucleotide
  source 1..36: mol_type = other DNA
gttttggcgcagtggcattctgactggtaatcaaac

SEQ ID NO: 14817 - DNA, 36 bp, synthetic construct
  misc_feature 1..36: note = Description of Artificial Sequence: Synthetic oligonucleotide
  source 1..36: mol_type = other DNA
gttttggcgcagtgtcgttctgactggtagatcaac

SEQ ID NO: 14818 - DNA, 36 bp, synthetic construct
  misc_feature 1..36: note = Description of Artificial Sequence: Synthetic oligonucleotide
  source 1..36: mol_type = other DNA
gttttggcttctcctcccagagagatgagctagaat

SEQ ID NO: 14819 - DNA, 36 bp, synthetic construct
  misc_feature 1..36: note = Description of Artificial Sequence: Synthetic oligonucleotide
  source 1..36: mol_type = other DNA
gttttgggaccattcgaaacaacacagctctaaaac

SEQ ID NO: 14820 - DNA, 36 bp, synthetic construct
  misc_feature 1..36: note = Description of Artificial Sequence: Synthetic oligonucleotide
  source 1..36: mol_type = other DNA
gttttgggaccattcgaaacaacacggctctaaaac

SEQ ID NO: 14821 - DNA, 36 bp, synthetic construct
  misc_feature 1..36: note = Description of Artificial Sequence: Synthetic oligonucleotide
  source 1..36: mol_type = other DNA
gttttgggactatgtcattccagatggttctactac

SEQ ID NO: 14822 - DNA, 36 bp, synthetic construct
  misc_feature 1..36: note = Description of Artificial Sequence: Synthetic oligonucleotide
  source 1..36: mol_type = other DNA
gttttgggcctctgatggatgttgataaactgatac

SEQ ID NO: 14823 - DNA, 36 bp, synthetic construct
  misc_feature 1..36: note = Description of Artificial Sequence: Synthetic oligonucleotide
  source 1..36: mol_type = other DNA
gttttggtaccctaagaatttttgctatactaatac

SEQ ID NO: 14824 - DNA, 37 bp, synthetic construct
  misc_feature 1..37: note = Description of Artificial Sequence: Synthetic oligonucleotide
  source 1..37: mol_type = other DNA
gttttggtaccctcacaatttttgctatacggaaaca

SEQ ID NO: 14825 - DNA, 36 bp, synthetic construct
  misc_feature 1..36: note = Description of Artificial Sequence: Synthetic oligonucleotide
  source 1..36: mol_type = other DNA
gttttggtaccctcagattattagttagttataaac

SEQ ID NO: 14826 - DNA, 36 bp, synthetic construct
  misc_feature 1..36: note = Description of Artificial Sequence: Synthetic oligonucleotide
  source 1..36: mol_type = other DNA
gttttggtaccctcggaaaaaaagcagtactcaacg

SEQ ID NO: 14827 - DNA, 36 bp, synthetic construct
  misc_feature 1..36: note = Description of Artificial Sequence: Synthetic oligonucleotide
  source 1..36: mol_type = other DNA
gttttggtaccctctaaatttttgctatactgaaac

SEQ ID NO: 14828 - DNA, 36 bp, synthetic construct
  misc_feature 1..36: note = Description of Artificial Sequence: Synthetic oligonucleotide
  source 1..36: mol_type = other DNA
gttttggtaccctgtaagtttttgatgtgataaaac

SEQ ID NO: 14829 - DNA, 36 bp, synthetic construct
  misc_feature 1..36: note = Description of Artificial Sequence: Synthetic oligonucleotide
  source 1..36: mol_type = other DNA
gttttggtaccttgtaagtttttgatatggtaaaac

SEQ ID NO: 14830 - DNA, 36 bp, synthetic construct
  misc_feature 1..36: note = Description of Artificial Sequence: Synthetic oligonucleotide
  source 1..36: mol_type = other DNA
gttttggtactctaataatttttgctatacaataac

SEQ ID NO: 14831 - DNA, 36 bp, synthetic construct
  misc_feature 1..36: note = Description of Artificial Sequence: Synthetic oligonucleotide
  source 1..36: mol_type = other DNA
gttttggtactctctcaattttcggtataggaaaac

SEQ ID NO: 14832 - DNA, 36 bp, synthetic construct
  misc_feature 1..36: note = Description of Artificial Sequence: Synthetic oligonucleotide
  source 1..36: mol_type = other DNA
gttttggtagcattcaaatcaacatggctctaaaac

SEQ ID NO: 14833 - DNA, 36 bp, synthetic construct
  misc_feature 1..36: note = Description of Artificial Sequence: Synthetic oligonucleotide
  source 1..36: mol_type = other DNA
gttttggtaggattacagaaaaagtgttatattaca

SEQ ID NO: 14834 - DNA, 36 bp, synthetic construct
  misc_feature 1..36: note = Description of Artificial Sequence: Synthetic oligonucleotide
  source 1..36: mol_type = other DNA
gttttggtggcattctaaacaacatggctctaaaac

SEQ ID NO: 14835 - DNA, 36 bp, synthetic construct
  misc_feature 1..36: note = Description of Artificial Sequence: Synthetic oligonucleotide
  source 1..36: mol_type = other DNA
gttttggtggccgaccattcccctaccggctaacct

SEQ ID NO: 14836 - DNA, 38 bp, synthetic construct
  misc_feature 1..38: note = Description of Artificial Sequence: Synthetic oligonucleotide
  source 1..38: mol_type = other DNA
gttttggttgagccgcaatcctttcactgctaatcttc

SEQ ID NO: 14837 - DNA, 46 bp, synthetic construct
  misc_feature 1..46: note = Description of Artificial Sequence: Synthetic oligonucleotide
  source 1..46: mol_type = other DNA
gttttggtttgacttgaattttaggtttttgtagctttgtcaaaac

SEQ ID NO: 14838 - DNA, 36 bp, synthetic construct
  misc_feature 1..36: note = Description of Artificial Sequence: Synthetic oligonucleotide
  source 1..36: mol_type = other DNA
gttttgtaaccattcaaatcaacacagctctaaaac

SEQ ID NO: 14839 - DNA, 36 bp, synthetic construct
  misc_feature 1..36: note = Description of Artificial Sequence: Synthetic oligonucleotide
  source 1..36: mol_type = other DNA
gttttgtaaccattccatttaacacgactctaaaac

SEQ ID NO: 14840 - DNA, 36 bp, synthetic construct
  misc_feature 1..36: note = Description of Artificial Sequence: Synthetic oligonucleotide
  source 1..36: mol_type = other DNA
gttttgtacccatatggaattacattgttctaaaac

SEQ ID NO: 14841 - DNA, 36 bp, synthetic construct
  misc_feature 1..36: note = Description of Artificial Sequence: Synthetic oligonucleotide
  source 1..36: mol_type = other DNA
gttttgtacctgttcaaaataacataactctaaaac

SEQ ID NO: 14842 - DNA, 36 bp, synthetic construct
  misc_feature 1..36: note = Description of Artificial Sequence: Synthetic oligonucleotide
  source 1..36: mol_type = other DNA
gttttgtacctttatgaattaacaaagctctcaaac

SEQ ID NO: 14843 - DNA, 36 bp, synthetic construct
  misc_feature 1..36: note = Description of Artificial Sequence: Synthetic oligonucleotide
  source 1..36: mol_type = other DNA
gttttgtagaattcaaaatttacatatctctcaaac

SEQ ID NO: 14844 - DNA, 36 bp, synthetic construct
  misc_feature 1..36: note = Description of Artificial Sequence: Synthetic oligonucleotide
  source 1..36: mol_type = other DNA
gttttgtagaattgaaaatttacatatttctcaaac

SEQ ID NO: 14845 - DNA, 36 bp, synthetic construct
  misc_feature 1..36: note = Description of Artificial Sequence: Synthetic oligonucleotide
  source 1..36: mol_type = other DNA
gttttgtcaccctcgaaaattttgctatacaaggac

SEQ ID NO: 14846 - DNA, 36 bp, synthetic construct
  misc_feature 1..36: note = Description of Artificial Sequence: Synthetic oligonucleotide
  source 1..36: mol_type = other DNA
gttttgtccccctacaggattacacaggtctcaaac

SEQ ID NO: 14847 - DNA, 36 bp, synthetic construct
  misc_feature 1..36: note = Description of Artificial Sequence: Synthetic oligonucleotide
  source 1..36: mol_type = other DNA
gttttgtcttcccccccggcttgggatggctaaact

SEQ ID NO: 14848 - DNA, 36 bp, synthetic construct
  misc_feature 1..36: note = Description of Artificial Sequence: Synthetic oligonucleotide
  source 1..36: mol_type = other DNA
gttttgtcttccccccggagacaggcgcggcagaat

SEQ ID NO: 14849 - DNA, 36 bp, synthetic construct
  misc_feature 1..36: note = Description of Artificial Sequence: Synthetic oligonucleotide
  source 1..36: mol_type = other DNA
gttttgttaccatatggatttttgctagaacataac

SEQ ID NO: 14850 - DNA, 36 bp, synthetic construct
  misc_feature 1..36: note = Description of Artificial Sequence: Synthetic oligonucleotide
  source 1..36: mol_type = other DNA
gttttgttaccatctgaatctttgctagactacaac

SEQ ID NO: 14851 - DNA, 36 bp, synthetic construct
  misc_feature 1..36: note = Description of Artificial Sequence: Synthetic oligonucleotide
  source 1..36: mol_type = other DNA
gttttgttaccatctgattttttgctaggacataac

SEQ ID NO: 14852 - DNA, 36 bp, synthetic construct
  misc_feature 1..36: note = Description of Artificial Sequence: Synthetic oligonucleotide
  source 1..36: mol_type = other DNA
gttttgttaccattcaaaataacatactcctaaaac

SEQ ID NO: 14853 - DNA, 36 bp, synthetic construct
  misc_feature 1..36: note = Description of Artificial Sequence: Synthetic oligonucleotide
  source 1..36: mol_type = other DNA
gttttgttaccattcaaaataacattgttctaaaac

SEQ ID NO: 14854 - DNA, 36 bp, synthetic construct
  misc_feature 1..36: note = Description of Artificial Sequence: Synthetic oligonucleotide
  source 1..36: mol_type = other DNA
gttttgttactctgttaatttttgtcctttgaaaac

SEQ ID NO: 14855 - DNA, 47 bp, synthetic construct
  misc_feature 1..47: note = Description of Artificial Sequence: Synthetic oligonucleotide
  source 1..47: mol_type = other DNA
gtttttatcagtatctcaaagatcaaaatttgaaagcaaatcacaac

SEQ ID NO: 14856 - DNA, 36 bp, synthetic construct
  misc_feature 1..36: note = Description of Artificial Sequence: Synthetic oligonucleotide
  source 1..36: mol_type = other DNA
gtttttattccctgtgatttcccgatatgctataat

SEQ ID NO: 14857 - DNA, 36 bp, synthetic construct
  misc_feature 1..36: note = Description of Artificial Sequence: Synthetic oligonucleotide
  source 1..36: mol_type = other DNA
gtttttctaccatatgaatttacactactctcaaac

SEQ ID NO: 14858 - DNA, 36 bp, synthetic construct
  misc_feature 1..36: note = Description of Artificial Sequence: Synthetic oligonucleotide
  source 1..36: mol_type = other DNA
gtttttgtaccttaaagaatctagaaatagtaaaac

SEQ ID NO: 14859 - DNA, 36 bp, synthetic construct
  misc_feature 1..36: note = Description of Artificial Sequence: Synthetic oligonucleotide
  source 1..36: mol_type = other DNA
gtttttgtactctcaacattttcctatcaataaaac

SEQ ID NO: 14860 - DNA, 36 bp, synthetic construct
  misc_feature 1..36: note = Description of Artificial Sequence: Synthetic oligonucleotide
  source 1..36: mol_type = other DNA
gtttttgtactctcaagatttaagtaaccgtaaaac

SEQ ID NO: 14861 - DNA, 36 bp, synthetic construct
  misc_feature 1..36: note = Description of Artificial Sequence: Synthetic oligonucleotide
  source 1..36: mol_type = other DNA
gtttttgtactctcaagatttaagtaactataaaac

SEQ ID NO: 14862 - DNA, 36 bp, synthetic construct
  misc_feature 1..36: note = Description of Artificial Sequence: Synthetic oligonucleotide
  source 1..36: mol_type = other DNA
gtttttgtactctcaagatttaagtaactgtaaaac

SEQ ID NO: 14863 - DNA, 36 bp, synthetic construct
  misc_feature 1..36: note = Description of Artificial Sequence: Synthetic oligonucleotide
  source 1..36: mol_type = other DNA
gtttttgtactctcaagatttaagtaactgtacaac

SEQ ID NO: 14864 - DNA, 36 bp, synthetic construct
  misc_feature 1..36: note = Description of Artificial Sequence: Synthetic oligonucleotide
  source 1..36: mol_type = other DNA
gtttttgtactctcaataatttcctatcagtaaaac

SEQ ID NO: 14865 - DNA, 47 bp, synthetic construct
  misc_feature 1..47: note = Description of Artificial Sequence: Synthetic oligonucleotide
  misc_difference 1..32: note = a, c, t, g, unknown or other
  source 1..47: mol_type = other DNA
nnnnnnnnnnnnnnnnnnnnnnnnnnnnnnnnaaagcgaatcacagc

SEQ ID NO: 14866 - DNA, 36 bp, synthetic construct
  misc_feature 1..36: note = Description of Artificial Sequence: Synthetic oligonucleotide
  source 1..36: mol_type = other DNA
taagtatatcaaggagtatttagaaagaatcccaac

SEQ ID NO: 14867 - DNA, 36 bp, synthetic construct
  misc_feature 1..36: note = Description of Artificial Sequence: Synthetic oligonucleotide
  source 1..36: mol_type = other DNA
taagtatatcaaggctgataatgaaagattctcaac

SEQ ID NO: 14868 - DNA, 36 bp, synthetic construct
  misc_feature 1..36: note = Description of Artificial Sequence: Synthetic oligonucleotide
  source 1..36: mol_type = other DNA
taagtatatcaaggtgaataatgaaagattctcaac

SEQ ID NO: 14869 - DNA, 36 bp, synthetic construct
  misc_feature 1..36: note = Description of Artificial Sequence: Synthetic oligonucleotide
  source 1..36: mol_type = other DNA
taagtctatcaaagggagaggtgactgattcccaac

SEQ ID NO: 14870 - DNA, 36 bp, synthetic construct
  misc_feature 1..36: note = Description of Artificial Sequence: Synthetic oligonucleotide
  source 1..36: mol_type = other DNA
taagtctatcaaggctacagaatgaaggttcccaac

SEQ ID NO: 14871 - DNA, 39 bp, synthetic construct
  misc_feature 1..39: note = Description of Artificial Sequence: Synthetic oligonucleotide
  source 1..39: mol_type = other DNA
taatatcgtgttttctaatctttaatcaaaccacaacgt

SEQ ID NO: 14872 - DNA, 38 bp, synthetic construct
  misc_feature 1..38: note = Description of Artificial Sequence: Synthetic oligonucleotide
  source 1..38: mol_type = other DNA
taatctcttaaatctctattcaaaatcaaaccacaact

SEQ ID NO: 14873 - DNA, 47 bp, synthetic construct
  misc_feature 1..47: note = Description of Artificial Sequence: Synthetic oligonucleotide
  source 1..47: mol_type = other DNA
tactgtgattgatcctctaaaataaagaactgaaagcaattcacaac

SEQ ID NO: 14874 - DNA, 47 bp, synthetic construct
  misc_feature 1..47: note = Description of Artificial Sequence: Synthetic oligonucleotide
  source 1..47: mol_type = other DNA
tactgttttcaatatgtcaaagatacaatttgtaaggaattcacaac

SEQ ID NO: 14875 - DNA, 38 bp, synthetic construct
  misc_feature 1..38: note = Description of Artificial Sequence: Synthetic oligonucleotide
  source 1..38: mol_type = other DNA
tagctttcaattcagtaccttcgtatcgctaatgcaac

SEQ ID NO: 14876 - DNA, 40 bp, synthetic construct
  misc_feature 1..40: note = Description of Artificial Sequence: Synthetic oligonucleotide
  source 1..40: mol_type = other DNA
tagctttcagattccgtaccttcatacttgctaatacagc

SEQ ID NO: 14877 - DNA, 38 bp, synthetic construct
  misc_feature 1..38: note = Description of Artificial Sequence: Synthetic oligonucleotide
  source 1..38: mol_type = other DNA
tagctttgccttgattccaaattcgggcggtgcaaact

SEQ ID NO: 14878 - DNA, 37 bp, synthetic construct
  misc_feature 1..37: note = Description of Artificial Sequence: Synthetic oligonucleotide
  source 1..37: mol_type = other DNA
tagtatagcaggcagggaattgtgggccaaccggaat

SEQ ID NO: 14879 - DNA, 45 bp, synthetic construct
  misc_feature 1..45: note = Description of Artificial Sequence: Synthetic oligonucleotide
  source 1..45: mol_type = other DNA
tagtgtgattgataatgtcaaagatacaaaatgaaatcaattcac

SEQ ID NO: 14880 - DNA, 35 bp, synthetic construct
  misc_feature 1..35: note = Description of Artificial Sequence: Synthetic oligonucleotide
  source 1..35: mol_type = other DNA
tagtttaccaagcattccgatggtggggtatcgga

SEQ ID NO: 14881 - DNA, 37 bp, synthetic construct
  misc_feature 1..37: note = Description of Artificial Sequence: Synthetic oligonucleotide
  source 1..37: mol_type = other DNA
tagtttagcagttcggaataagtggtgctaggaaaac

SEQ ID NO: 14882 - DNA, 36 bp, synthetic construct
  misc_feature 1..36: note = Description of Artificial Sequence: Synthetic oligonucleotide
  source 1..36: mol_type = other DNA
tataacacagtgcccttgtgggggcgagatcaaaac

SEQ ID NO: 14883 - DNA, 34 bp, synthetic construct
  misc_feature 1..34: note = Description of Artificial Sequence: Synthetic oligonucleotide
  source 1..34: mol_type = other DNA
tataactgatccgtgtcggagtgcaagtcacaac

SEQ ID NO: 14884 - DNA, 34 bp, synthetic construct
  misc_feature 1..34: note = Description of Artificial Sequence: Synthetic oligonucleotide
  source 1..34: mol_type = other DNA
tatagcacatctttgaaaaacatcaaatcacaac

SEQ ID NO: 14885 - DNA, 36 bp, synthetic construct
  misc_feature 1..36: note = Description of Artificial Sequence: Synthetic oligonucleotide
  source 1..36: mol_type = other DNA
tatatagcacacctcaaaaaaacgtcaaatcacaac

SEQ ID NO: 14886 - DNA, 34 bp, synthetic construct
  misc_feature 1..34: note = Description of Artificial Sequence: Synthetic oligonucleotide
  source 1..34: mol_type = other DNA
tatcgtaattcctaatctttaatcaaaccacaac

SEQ ID NO: 14887 - DNA, 30 bp, synthetic construct
  misc_feature 1..30: note = Description of Artificial Sequence: Synthetic oligonucleotide
  source 1..30: mol_type = other DNA
tatcgtcctcattctacatcaaaccacaac

SEQ ID NO: 14888 - DNA, 34 bp, synthetic construct
  misc_feature 1..34: note = Description of Artificial Sequence: Synthetic oligonucleotide
  source 1..34: mol_type = other DNA
tatcgttaatccattttttcaatcaaaccacaac

SEQ ID NO: 14889 - DNA, 30 bp, synthetic construct
  misc_feature 1..30: note = Description of Artificial Sequence: Synthetic oligonucleotide
  source 1..30: mol_type = other DNA
tatcttattcaattttttaatcaaaccaca

SEQ ID NO: 14890 - DNA, 36 bp, synthetic construct
  misc_feature 1..36: note = Description of Artificial Sequence: Synthetic oligonucleotide
  source 1..36: mol_type = other DNA
tatgtttctgatatgaatttgagagtcattcacaac

SEQ ID NO: 14891 - DNA, 31 bp, synthetic construct
  misc_feature 1..31: note = Description of Artificial Sequence: Synthetic oligonucleotide
  source 1..31: mol_type = other DNA
tattacattctaatatagttggattagaaag

SEQ ID NO: 14892 - DNA, 37 bp, synthetic construct
  misc_feature 1..37: note = Description of Artificial Sequence: Synthetic oligonucleotide
  source 1..37: mol_type = other DNA
tattataaccgctcagagatcgcggtccagcggcaac

SEQ ID NO: 14893 - DNA, 26 bp, synthetic construct
  misc_feature 1..26: note = Description of Artificial Sequence: Synthetic oligonucleotide
  source 1..26: mol_type = other DNA
tattataccataccaaaaaacaaaag

SEQ ID NO: 14894 - DNA, 37 bp, synthetic construct
  misc_feature 1..37: note = Description of Artificial Sequence: Synthetic oligonucleotide
  source 1..37: mol_type = other DNA
tattatagacgattgggagatggtgtctagccgtaac

SEQ ID NO: 14895 - DNA, 37 bp, synthetic construct
  misc_feature 1..37: note = Description of Artificial Sequence: Synthetic oligonucleotide
  source 1..37: mol_type = other DNA
tattatatcaaatggggatttgaaagtaggttaaagc

SEQ ID NO: 14896 - DNA, 37 bp, synthetic construct
  misc_feature 1..37: note = Description of Artificial Sequence: Synthetic oligonucleotide
  source 1..37: mol_type = other DNA
tattatatcaatatctaaattgttagggaactataac

SEQ ID NO: 14897 - DNA, 35 bp, synthetic construct
  misc_feature 1..35: note = Description of Artificial Sequence: Synthetic oligonucleotide
  source 1..35: mol_type = other DNA
tattccgggcggccgcatgacccaaaacgcggcac

SEQ ID NO: 14898 - DNA, 34 bp, synthetic construct
  misc_feature 1..34: note = Description of Artificial Sequence: Synthetic oligonucleotide
  source 1..34: mol_type = other DNA
tattgtaactgatccgcgtctgagggcaagtcac

SEQ ID NO: 14899 - DNA, 37 bp, synthetic construct
  misc_feature 1..37: note = Description of Artificial Sequence: Synthetic oligonucleotide
  source 1..37: mol_type = other DNA
tattgtagctatccggggtgagagagggaactacaac

SEQ ID NO: 14900 - DNA, 37 bp, synthetic construct
  misc_feature 1..37: note = Description of Artificial Sequence: Synthetic oligonucleotide
  source 1..37: mol_type = other DNA
tattgtagttccctaatttttcttggtatgttataat

SEQ ID NO: 14901 - DNA, 37 bp, synthetic construct
  misc_feature 1..37: note = Description of Artificial Sequence: Synthetic oligonucleotide
  source 1..37: mol_type = other DNA
tattgtatcacacacaagtttgtaggggtattaaaac

SEQ ID NO: 14902 - DNA, 23 bp, synthetic construct
  misc_feature 1..23: note = Description of Artificial Sequence: Synthetic oligonucleotide
  source 1..23: mol_type = other DNA
tatttggccatatttgccaaagg

SEQ ID NO: 14903 - DNA, 34 bp, synthetic construct
  misc_feature 1..34: note = Description of Artificial Sequence: Synthetic oligonucleotide
  source 1..34: mol_type = other DNA
tcaaataatacaaataaattcaatcctcaagaac

SEQ ID NO: 14904 - DNA, 23 bp, synthetic construct
  misc_feature 1..23: note = Description of Artificial Sequence: Synthetic oligonucleotide
  source 1..23: mol_type = other DNA
tcagaacgacactgctccaaaac

SEQ ID NO: 14905 - DNA, 34 bp, synthetic construct
  misc_feature 1..34: note = Description of Artificial Sequence: Synthetic oligonucleotide
  source 1..34: mol_type = other DNA
tccgataccccaccatcggaatgcctgataaaat

SEQ ID NO: 14906 - DNA, 35 bp, synthetic construct
  misc_feature 1..35: note = Description of Artificial Sequence: Synthetic oligonucleotide
  source 1..35: mol_type = other DNA
tccgggtttggccacgtcgcttcttctgctaggat

SEQ ID NO: 14907 - DNA, 25 bp, synthetic construct
  misc_feature 1..25: note = Description of Artificial Sequence: Synthetic oligonucleotide
  source 1..25: mol_type = other DNA
tcgtaactttgtgacctcaaacaac

SEQ ID NO: 14908 - DNA, 47 bp, synthetic construct
  misc_feature 1..47: note = Description of Artificial Sequence: Synthetic oligonucleotide
  source 1..47: mol_type = other DNA
tcgtgaccgttggttcagaattgtatctttgatctattgataacagc

SEQ ID NO: 14909 - DNA, 28 bp, synthetic construct
  misc_feature 1..28: note = Description of Artificial Sequence: Synthetic oligonucleotide
  source 1..28: mol_type = other DNA
tctcttctcttcgttagcaagccacaac

SEQ ID NO: 14910 - DNA, 46 bp, synthetic construct
  misc_feature 1..46: note = Description of Artificial Sequence: Synthetic oligonucleotide
  source 1..46: mol_type = other DNA
tctgcgaattatccataaaattaaggaactgaaagcaattcacaac

SEQ ID NO: 14911 - DNA, 47 bp, synthetic construct
  misc_feature 1..47: note = Description of Artificial Sequence: Synthetic oligonucleotide
  source 1..47: mol_type = other DNA
tctgtatgcaatctatcaaagaacacaatctgaaagcaaatcacaac

SEQ ID NO: 14912 - DNA, 26 bp, synthetic construct
  misc_feature 1..26: note = Description of Artificial Sequence: Synthetic oligonucleotide
  source 1..26: mol_type = other DNA
tcttctcttcgtcagcaagccacaac

SEQ ID NO: 14913 - DNA, 36 bp, synthetic construct
  misc_feature 1..36: note = Description of Artificial Sequence: Synthetic oligonucleotide
  source 1..36: mol_type = other DNA
tcttgatgaaattcaaaacttacatatctctcagac

SEQ ID NO: 14914 - DNA, 32 bp, synthetic construct
  misc_feature 1..32: note = Description of Artificial Sequence: Synthetic oligonucleotide
  source 1..32: mol_type = other DNA
tgaaggtacggaatctgaaagctaatcacaac

SEQ ID NO: 14915 - DNA, 32 bp, synthetic construct
  misc_feature 1..32: note = Description of Artificial Sequence: Synthetic oligonucleotide
  source 1..32: mol_type = other DNA
tgaattgctgacaaaatcgtatcatatacaac

SEQ ID NO: 14916 - DNA, 40 bp, synthetic construct
  misc_feature 1..40: note = Description of Artificial Sequence: Synthetic oligonucleotide
  source 1..40: mol_type = other DNA
tgaattgctttcaaatttgtatctttgcggatgcacaaac

SEQ ID NO: 14917 - DNA, 43 bp, synthetic construct
  misc_feature 1..43: note = Description of Artificial Sequence: Synthetic oligonucleotide
  source 1..43: mol_type = other DNA
tgaattgctttcgttctttgacatgtaagagatttgttccgct

SEQ ID NO: 14918 - DNA, 32 bp, synthetic construct
  misc_feature 1..32: note = Description of Artificial Sequence: Synthetic oligonucleotide
  source 1..32: mol_type = other DNA
tgatcaggcctcaggtatcagtcagatacact

SEQ ID NO: 14919 - DNA, 27 bp, synthetic construct
  misc_feature 1..27: note = Description of Artificial Sequence: Synthetic oligonucleotide
  source 1..27: mol_type = other DNA
tgattccaattcgggggcgggcaccct

SEQ ID NO: 14920 - DNA, 47 bp, synthetic construct
  misc_feature 1..47: note = Description of Artificial Sequence: Synthetic oligonucleotide
  source 1..47: mol_type = other DNA
tgcaccatttgctgttgaatttataactccgaaccatcagaaacacc

SEQ ID NO: 14921 - DNA, 35 bp, synthetic construct
  misc_feature 1..35: note = Description of Artificial Sequence: Synthetic oligonucleotide
  source 1..35: mol_type = other DNA
tgccctgaccttcctctagcgagagcggccagcac

SEQ ID NO: 14922 - DNA, 46 bp, synthetic construct
  misc_feature 1..46: note = Description of Artificial Sequence: Synthetic oligonucleotide
  source 1..46: mol_type = other DNA
tgccgaaggaatggcacgcaggcaggtttgatttattggtcacaac

SEQ ID NO: 14923 - DNA, 31 bp, synthetic construct
  misc_feature 1..31: note = Description of Artificial Sequence: Synthetic oligonucleotide
  source 1..31: mol_type = other DNA
tgcggctggtccgcgatttcctatcggctaa

SEQ ID NO: 14924 - DNA, 42 bp, synthetic construct
  misc_feature 1..42: note = Description of Artificial Sequence: Synthetic oligonucleotide
  source 1..42: mol_type = other DNA
tgctgtgttcaatatttcaaagatacaaatcgaaagcaattc

SEQ ID NO: 14925 - DNA, 37 bp, synthetic construct
  misc_feature 1..37: note = Description of Artificial Sequence: Synthetic oligonucleotide
  source 1..37: mol_type = other DNA
tgcttaatacctcttcgtaattacactactctcaaac

SEQ ID NO: 14926 - DNA, 37 bp, synthetic construct
  misc_feature 1..37: note = Description of Artificial Sequence: Synthetic oligonucleotide
  source 1..37: mol_type = other DNA
tgcttgagtaccatattaaattacactactctcaaac

SEQ ID NO: 14927 - DNA, 47 bp, synthetic construct
  misc_feature 1..47: note = Description of Artificial Sequence: Synthetic oligonucleotide
  source 1..47: mol_type = other DNA
tgctttccccgagtaatcggggtatttttacggtggcttaagacaac

SEQ ID NO: 14928 - DNA, 38 bp, synthetic construct
  misc_feature 1..38: note = Description of Artificial Sequence: Synthetic oligonucleotide
  source 1..38: mol_type = other DNA
tgctttgccttgattccaattccggggggcggatgctc

SEQ ID NO: 14929 - DNA, 28 bp, synthetic construct
  misc_feature 1..28: note = Description of Artificial Sequence: Synthetic oligonucleotide
  source 1..28: mol_type = other DNA
tggagcagtgtcgatctaactggtaatc

SEQ ID NO: 14930 - DNA, 32 bp, synthetic construct
  misc_feature 1..32: note = Description of Artificial Sequence: Synthetic oligonucleotide
  source 1..32: mol_type = other DNA
tggggttggaagaaaatcgccgctcaggtata

SEQ ID NO: 14931 - DNA, 28 bp, synthetic construct
  misc_feature 1..28: note = Description of Artificial Sequence: Synthetic oligonucleotide
  source 1..28: mol_type = other DNA
tggtattgatttgtaacccattcacaac

SEQ ID NO: 14932 - DNA, 38 bp, synthetic construct
  misc_feature 1..38: note = Description of Artificial Sequence: Synthetic oligonucleotide
  source 1..38: mol_type = other DNA
tggttgcgggttggtcgcgagtcggggttgggtagact

SEQ ID NO: 14933 - DNA, 32 bp, synthetic construct
  misc_feature 1..32: note = Description of Artificial Sequence: Synthetic oligonucleotide
  source 1..32: mol_type = other DNA
tggtttgatttctgattcagatcggttacact

SEQ ID NO: 14934 - DNA, 37 bp, synthetic construct
  misc_feature 1..37: note = Description of Artificial Sequence: Synthetic oligonucleotide
  source 1..37: mol_type = other DNA
tgtataagtttatcaatattcatcagagagccaaaac

SEQ ID NO: 14935 - DNA, 34 bp, synthetic construct
  misc_feature 1..34: note = Description of Artificial Sequence: Synthetic oligonucleotide
  source 1..34: mol_type = other DNA
tgtattatatcgtttctctacatcaaaccacaac

SEQ ID NO: 14936 - DNA, 33 bp, synthetic construct
  misc_feature 1..33: note = Description of Artificial Sequence: Synthetic oligonucleotide
  source 1..33: mol_type = other DNA
tgtcaaagttacgaatttgtaagcatctcacaa

SEQ ID NO: 14937 - DNA, 37 bp, synthetic construct
  misc_feature 1..37: note = Description of Artificial Sequence: Synthetic oligonucleotide
  source 1..37: mol_type = other DNA
tgtcttcagctactttcaaatccccatttgatacaat

SEQ ID NO: 14938 - DNA, 40 bp, synthetic construct
  misc_feature 1..40: note = Description of Artificial Sequence: Synthetic oligonucleotide
  source 1..40: mol_type = other DNA
tgtgaaaggctttcaggtcaagatctttgacaagctgtga

SEQ ID NO: 14939 - DNA, 30 bp, synthetic construct
  misc_feature 1..30: note = Description of Artificial Sequence: Synthetic oligonucleotide
  source 1..30: mol_type = other DNA
tgtgaatggcttacagattactacctgata

SEQ ID NO: 14940 - DNA, 40 bp, synthetic construct
  misc_feature 1..40: note = Description of Artificial Sequence: Synthetic oligonucleotide
  source 1..40: mol_type = other DNA
tgtgaattgatttcaaattgtatctttaagtgatcagtca

SEQ ID NO: 14941 - DNA, 45 bp, synthetic construct
  misc_feature 1..45: note = Description of Artificial Sequence: Synthetic oligonucleotide
  source 1..45: mol_type = other DNA
tgtgactaatcacgaagataataatttttgaaagcaattcacaac

SEQ ID NO: 14942 - DNA, 45 bp, synthetic construct
  misc_feature 1..45: note = Description of Artificial Sequence: Synthetic oligonucleotide
  source 1..45: mol_type = other DNA
tgtgatttgctttcaaatttgtattttcgagccagctaaaacagc

SEQ ID NO: 14943 - DNA, 33 bp, synthetic construct
  misc_feature 1..33: note = Description of Artificial Sequence: Synthetic oligonucleotide
  source 1..33: mol_type = other DNA
tgtggattgattaaaaaattggaaaaaacgata

SEQ ID NO: 14944 - DNA, 27 bp, synthetic construct
  misc_feature 1..27: note = Description of Artificial Sequence: Synthetic oligonucleotide
  source 1..27: mol_type = other DNA
tgtggattgcacacaaattgtatcttt

SEQ ID NO: 14945 - DNA, 34 bp, synthetic construct
  misc_feature 1..34: note = Description of Artificial Sequence: Synthetic oligonucleotide
  source 1..34: mol_type = other DNA
tgtggtttgatgtaaaaatggaatgatattcaac

SEQ ID NO: 14946 - DNA, 34 bp, synthetic construct
  misc_feature 1..34: note = Description of Artificial Sequence: Synthetic oligonucleotide
  source 1..34: mol_type = other DNA
tgtggtttgatgtagaatcaaaatatgaagcaac

SEQ ID NO: 14947 - DNA, 44 bp, synthetic construct
  misc_feature 1..44: note = Description of Artificial Sequence: Synthetic oligonucleotide
  source 1..44: mol_type = other DNA
tgttatcaatcacaaaattacaagatttgaaagcaattcacaac

SEQ ID NO: 14948 - DNA, 37 bp, synthetic construct
  misc_feature 1..37: note = Description of Artificial Sequence: Synthetic oligonucleotide
  source 1..37: mol_type = other DNA
tgttccggccagatcacatatcccgatgatctagact

SEQ ID NO: 14949 - DNA, 37 bp, synthetic construct
  misc_feature 1..37: note = Description of Artificial Sequence: Synthetic oligonucleotide
  source 1..37: mol_type = other DNA
tgttgcctctagaccgcgatctctgagcggctattct

SEQ ID NO: 14950 - DNA, 37 bp, synthetic construct
  misc_feature 1..37: note = Description of Artificial Sequence: Synthetic oligonucleotide
  source 1..37: mol_type = other DNA
tgttgtagttcccctttttctctcgtagtggtataat

SEQ ID NO: 14951 - DNA, 41 bp, synthetic construct
  misc_feature 1..41: note = Description of Artificial Sequence: Synthetic oligonucleotide
  source 1..41: mol_type = other DNA
tgttgtgaattgctttcaaattattagtagttgaagtgata

SEQ ID NO: 14952 - DNA, 47 bp, synthetic construct
  misc_feature 1..47: note = Description of Artificial Sequence: Synthetic oligonucleotide
  source 1..47: mol_type = other DNA
tgttgtgatttgctttcaaattgatactaacttagttctttcacatc

SEQ ID NO: 14953 - DNA, 37 bp, synthetic construct
  misc_feature 1..37: note = Description of Artificial Sequence: Synthetic oligonucleotide
  source 1..37: mol_type = other DNA
tgttgtggattgataaaaaaaatggattaacgatact

SEQ ID NO: 14954 - DNA, 36 bp, synthetic construct
  misc_feature 1..36: note = Description of Artificial Sequence: Synthetic oligonucleotide
  source 1..36: mol_type = other DNA
tgttgtgttttgataaaagaagctcattgacatact

SEQ ID NO: 14955 - DNA, 47 bp, synthetic construct
  misc_feature 1..47: note = Description of Artificial Sequence: Synthetic oligonucleotide
  source 1..47: mol_type = other DNA
tgttgtttacaaacttatcaaataacaaaatgaaagcaaatcacaac

SEQ ID NO: 14956 - DNA, 37 bp, synthetic construct
  misc_feature 1..37: note = Description of Artificial Sequence: Synthetic oligonucleotide
  source 1..37: mol_type = other DNA
tgtttgagagctttgttaattcataaaggtacaaaac

SEQ ID NO: 14957 - DNA, 37 bp, synthetic construct
  misc_feature 1..37: note = Description of Artificial Sequence: Synthetic oligonucleotide
  source 1..37: mol_type = other DNA
tgtttgagagtagtgtgatttcatatggtagcaaaac

SEQ ID NO: 14958 - DNA, 37 bp, synthetic construct
  misc_feature 1..37: note = Description of Artificial Sequence: Synthetic oligonucleotide
  source 1..37: mol_type = other DNA
tgtttgagtatggtgtaattctaaacggtagtcaaac

SEQ ID NO: 14959 - DNA, 36 bp, synthetic construct
  misc_feature 1..36: note = Description of Artificial Sequence: Synthetic oligonucleotide
  source 1..36: mol_type = other DNA
tgtttgataaccttttgtttaacagtactctcaaat

SEQ ID NO: 14960 - DNA, 39 bp, synthetic construct
  misc_feature 1..39: note = Description of Artificial Sequence: Synthetic oligonucleotide
  source 1..39: mol_type = other DNA
tgtttgattaccatatgaaattacattactctcaaacat

SEQ ID NO: 14961 - DNA, 37 bp, synthetic construct
  misc_feature 1..37: note = Description of Artificial Sequence: Synthetic oligonucleotide
  source 1..37: mol_type = other DNA
tgttttagagctgtgttgtttcgaatggttccaaaac

SEQ ID NO: 14962 - DNA, 26 bp, synthetic construct
  misc_feature 1..26: note = Description of Artificial Sequence: Synthetic oligonucleotide
  source 1..26: mol_type = other DNA
ttacgaatttaaaagcaactcacaac

SEQ ID NO: 14963 - DNA, 33 bp, synthetic construct
  misc_feature 1..33: note = Description of Artificial Sequence: Synthetic oligonucleotide
  source 1..33: mol_type = other DNA
ttactatacaaaaattttacagggtactagaac

SEQ ID NO: 14964 - DNA, 28 bp, synthetic construct
  misc_feature 1..28: note = Description of Artificial Sequence: Synthetic oligonucleotide
  source 1..28: mol_type = other DNA
ttagagctgtgttgtttcgaatggttcc

SEQ ID NO: 14965 - DNA, 23 bp, synthetic construct
  misc_feature 1..23: note = Description of Artificial Sequence: Synthetic oligonucleotide
  source 1..23: mol_type = other DNA
ttagttattaagaatcttccaac

SEQ ID NO: 14966 - DNA, 33 bp, synthetic construct
  misc_feature 1..33: note = Description of Artificial Sequence: Synthetic oligonucleotide
  source 1..33: mol_type = other DNA
ttagttccctttcagaataaggtatggtacaat

SEQ ID NO: 14967 - DNA, 29 bp, synthetic construct
  misc_feature 1..29: note = Description of Artificial Sequence: Synthetic oligonucleotide
  source 1..29: mol_type = other DNA
ttataacatattaaatattgtggtcaata

SEQ ID NO: 14968 - DNA, 30 bp, synthetic construct
  misc_feature 1..30: note = Description of Artificial Sequence: Synthetic oligonucleotide
  source 1..30: mol_type = other DNA
ttatatctcttttctacatcaaaccacaac

SEQ ID NO: 14969 - DNA, 43 bp, synthetic construct
  misc_feature 1..43: note = Description of Artificial Sequence: Synthetic oligonucleotide
  source 1..43: mol_type = other DNA
ttatcaataagacaaagatactaatttgaaagcaattcacaac

SEQ ID NO: 14970 - DNA, 34 bp, synthetic construct
  misc_feature 1..34: note = Description of Artificial Sequence: Synthetic oligonucleotide
  source 1..34: mol_type = other DNA
ttcaaaaaattgtatctttgacttgataaacaac

SEQ ID NO: 14971 - DNA, 34 bp, synthetic construct
  misc_feature 1..34: note = Description of Artificial Sequence: Synthetic oligonucleotide
  source 1..34: mol_type = other DNA
ttcagattgtatctttgacataccgatcacaaca

SEQ ID NO: 14972 - DNA, 47 bp, synthetic construct
  misc_feature 1..47: note = Description of Artificial Sequence: Synthetic oligonucleotide
  source 1..47: mol_type = other DNA
ttcatcccgactttagcgggagtgttctttgatagattgcgtacaga

SEQ ID NO: 14973 - DNA, 35 bp, synthetic construct
  misc_feature 1..35: note = Description of Artificial Sequence: Synthetic oligonucleotide
  source 1..35: mol_type = other DNA
ttctaaacctcattgatctaacaatcatctaaaac

SEQ ID NO: 14974 - DNA, 34 bp, synthetic construct
  misc_feature 1..34: note = Description of Artificial Sequence: Synthetic oligonucleotide
  source 1..34: mol_type = other DNA
ttctattccctacgaatttacactactctcaaac

SEQ ID NO: 14975 - DNA, 36 bp, synthetic construct
  misc_feature 1..36: note = Description of Artificial Sequence: Synthetic oligonucleotide
  source 1..36: mol_type = other DNA
ttctgatacctttattcacttacaaggttctcaagc

SEQ ID NO: 14976 - DNA, 30 bp, synthetic construct
  misc_feature 1..30: note = Description of Artificial Sequence: Synthetic oligonucleotide
  source 1..30: mol_type = other DNA
ttgaaccctaatatagctaccatctacaac

SEQ ID NO: 14977 - DNA, 27 bp, synthetic construct
  misc_feature 1..27: note = Description of Artificial Sequence: Synthetic oligonucleotide
  source 1..27: mol_type = other DNA
ttgaccgtctaattaatctctgatact

SEQ ID NO: 14978 - DNA, 30 bp, synthetic construct
  misc_feature 1..30: note = Description of Artificial Sequence: Synthetic oligonucleotide
  source 1..30: mol_type = other DNA
ttgagaatgatgtaaaagagtatggtattc

SEQ ID NO: 14979 - DNA, 33 bp, synthetic construct
  misc_feature 1..33: note = Description of Artificial Sequence: Synthetic oligonucleotide
  source 1..33: mol_type = other DNA
ttgattgcaccacaatttcctaagtgataaaat

SEQ ID NO: 14980 - DNA, 29 bp, synthetic construct
  misc_feature 1..29: note = Description of Artificial Sequence: Synthetic oligonucleotide
  source 1..29: mol_type = other DNA
ttggcctgcgttttctgatctgctagcct

SEQ ID NO: 14981 - DNA, 34 bp, synthetic construct
  misc_feature 1..34: note = Description of Artificial Sequence: Synthetic oligonucleotide
  source 1..34: mol_type = other DNA
ttgggaatagagcacccctccccctgatatactt

SEQ ID NO: 14982 - DNA, 35 bp, synthetic construct
  misc_feature 1..35: note = Description of Artificial Sequence: Synthetic oligonucleotide
  source 1..35: mol_type = other DNA
ttgtaactgatccgtgcctgagtgcaagccacaac

SEQ ID NO: 14983 - DNA, 35 bp, synthetic construct
  misc_feature 1..35: note = Description of Artificial Sequence: Synthetic oligonucleotide
  source 1..35: mol_type = other DNA
ttgtagttcccttacagttcttggtatggtatgat

SEQ ID NO: 14984 - DNA, 35 bp, synthetic construct
  misc_feature 1..35: note = Description of Artificial Sequence: Synthetic oligonucleotide
  source 1..35: mol_type = other DNA
ttgtatgtgttttctcttcgtcagcaagccacaac

SEQ ID NO: 14985 - DNA, 42 bp, synthetic construct
  misc_feature 1..42: note = Description of Artificial Sequence: Synthetic oligonucleotide
  source 1..42: mol_type = other DNA
ttgtgaattgctttcaaatttgtatctttgtatcagataata

SEQ ID NO: 14986 - DNA, 47 bp, synthetic construct
  misc_feature 1..47: note = Description of Artificial Sequence: Synthetic oligonucleotide
  source 1..47: mol_type = other DNA
ttgtgaattgctttcgaaatttttacctttgacagactgataacaac

SEQ ID NO: 14987 - DNA, 45 bp, synthetic construct
  misc_feature 1..45: note = Description of Artificial Sequence: Synthetic oligonucleotide
  source 1..45: mol_type = other DNA
ttgtgattagctttcatttattacttttgtctaaggacatacaga

SEQ ID NO: 14988 - DNA, 43 bp, synthetic construct
  misc_feature 1..43: note = Description of Artificial Sequence: Synthetic oligonucleotide
  source 1..43: mol_type = other DNA
ttgtgattgctcacacaaaaatacaatttgaaatcaattcaca

SEQ ID NO: 14989 - DNA, 46 bp, synthetic construct
  misc_feature 1..46: note = Description of Artificial Sequence: Synthetic oligonucleotide
  source 1..46: mol_type = other DNA
ttgtgatttgctaaaaaattagtatctttgcagaggcataaacatc

SEQ ID NO: 14990 - DNA, 46 bp, synthetic construct
  misc_feature 1..46: note = Description of Artificial Sequence: Synthetic oligonucleotide
  source 1..46: mol_type = other DNA
ttgtgatttgctttcaaattagtatctttgtcctattggaaacagc

SEQ ID NO: 14991 - DNA, 45 bp, synthetic construct
  misc_feature 1..45: note = Description of Artificial Sequence: Synthetic oligonucleotide
  source 1..45: mol_type = other DNA
ttgtgatttgctttcaattttagatctttgacttactataaacaa

SEQ ID NO: 14992 - DNA, 46 bp, synthetic construct
  misc_feature 1..46: note = Description of Artificial Sequence: Synthetic oligonucleotide
  source 1..46: mol_type = other DNA
ttgtgtatgtcattcaaaaaaaagtaaaaatacggactaaaacaag

SEQ ID NO: 14993 - DNA, 45 bp, synthetic construct
  misc_feature 1..45: note = Description of Artificial Sequence: Synthetic oligonucleotide
  source 1..45: mol_type = other DNA
ttgtttatggactatattttactttttttgaatgacatacacaac

SEQ ID NO: 14994 - DNA, 45 bp, synthetic construct
  misc_feature 1..45: note = Description of Artificial Sequence: Synthetic oligonucleotide
  source 1..45: mol_type = other DNA
ttgtttatggactatgttttactttttttgaatgacatacacaac

SEQ ID NO: 14995 - DNA, 30 bp, synthetic construct
  misc_feature 1..30: note = Description of Artificial Sequence: Synthetic oligonucleotide
  source 1..30: mol_type = other DNA
tttactattagaattacatacctctcaaac

SEQ ID NO: 14996 - DNA, 35 bp, synthetic construct
  misc_feature 1..35: note = Description of Artificial Sequence: Synthetic oligonucleotide
  source 1..35: mol_type = other DNA
tttagcaagtgtagagggggcggtcaagcccagac

SEQ ID NO: 14997 - DNA, 35 bp, synthetic construct
  misc_feature 1..35: note = Description of Artificial Sequence: Synthetic oligonucleotide
  source 1..35: mol_type = other DNA
tttagtactcatcatattctacacgcctctcaaac

SEQ ID NO: 14998 - DNA, 23 bp, synthetic construct
  misc_feature 1..23: note = Description of Artificial Sequence: Synthetic oligonucleotide
  source 1..23: mol_type = other DNA
tttatatgacacatcacccaaaa

SEQ ID NO: 14999 - DNA, 34 bp, synthetic construct
  misc_feature 1..34: note = Description of Artificial Sequence: Synthetic oligonucleotide
  source 1..34: mol_type = other DNA
tttatcacagcgaaaaattacagagtactaaaac

SEQ ID NO: 15000 - DNA, 28 bp, synthetic construct
  misc_feature 1..28: note = Description of Artificial Sequence: Synthetic oligonucleotide
  source 1..28: mol_type = other DNA
tttcaatccgcgctccttataaaaggag

SEQ ID NO: 15001 - DNA, 29 bp, synthetic construct
  misc_feature 1..29: note = Description of Artificial Sequence: Synthetic oligonucleotide
  source 1..29: mol_type = other DNA
tttcaattccttataggtagtatctaatc

SEQ ID NO: 15002 - DNA, 47 bp, synthetic construct
  misc_feature 1..47: note = Description of Artificial Sequence: Synthetic oligonucleotide
  source 1..47: mol_type = other DNA
tttcatcccgccctagcgggagtgttctttgatagattgcatacaga

SEQ ID NO: 15003 - DNA, 46 bp, synthetic construct
  misc_feature 1..46: note = Description of Artificial Sequence: Synthetic oligonucleotide
  source 1..46: mol_type = other DNA
tttcccgtaaaatgaacgggacaggtttgacaatcttaaaaccaag

SEQ ID NO: 15004 - DNA, 33 bp, synthetic construct
  misc_feature 1..33: note = Description of Artificial Sequence: Synthetic oligonucleotide
  source 1..33: mol_type = other DNA
tttgagtagcaaaatttctgagggtagcaaaac

SEQ ID NO: 15005 - DNA, 34 bp, synthetic construct
  misc_feature 1..34: note = Description of Artificial Sequence: Synthetic oligonucleotide
  source 1..34: mol_type = other DNA
tttggaaccattcgaaacaacacagctctaaaac

SEQ ID NO: 15006 - DNA, 34 bp, synthetic construct
  misc_feature 1..34: note = Description of Artificial Sequence: Synthetic oligonucleotide
  source 1..34: mol_type = other DNA
tttggattcttacgaattcacaaccctaccaagc

SEQ ID NO: 15007 - DNA, 36 bp, synthetic construct
  misc_feature 1..36: note = Description of Artificial Sequence: Synthetic oligonucleotide
  source 1..36: mol_type = other DNA
tttgggttaagcgaacagactccgatcagatacact

SEQ ID NO: 15008 - DNA, 36 bp, synthetic construct
  misc_feature 1..36: note = Description of Artificial Sequence: Synthetic oligonucleotide
  source 1..36: mol_type = other DNA
tttgtacctccccagaggttgaaatcagttcacagc

SEQ ID NO: 15009 - DNA, 47 bp, synthetic construct
  misc_feature 1..47: note = Description of Artificial Sequence: Synthetic oligonucleotide
  source 1..47: mol_type = other DNA
tttgttgatgaccactaagctaagaaataatgaaagcaaatcacaac

SEQ ID NO: 15010 - DNA, 35 bp, synthetic construct
  misc_feature 1..35: note = Description of Artificial Sequence: Synthetic oligonucleotide
  source 1..35: mol_type = other DNA
ttttagaatcttacgtattaacaagtctctcaaac

SEQ ID NO: 15011 - DNA, 35 bp, synthetic construct
  misc_feature 1..35: note = Description of Artificial Sequence: Synthetic oligonucleotide
  source 1..35: mol_type = other DNA
ttttagtactctgtaatttttcgctatgataaaac

SEQ ID NO: 15012 - DNA, 26 bp, synthetic construct
  misc_feature 1..26: note = Description of Artificial Sequence: Synthetic oligonucleotide
  source 1..26: mol_type = other DNA
ttttctcttcgtcagcaagccacaac

SEQ ID NO: 15013 - DNA, 34 bp, synthetic construct
  misc_feature 1..34: note = Description of Artificial Sequence: Synthetic oligonucleotide
  source 1..34: mol_type = other DNA
ttttgtactctcaagatttaagtaaccgtaaaac

SEQ ID NO: 15014 - DNA, 28 bp, synthetic construct
  misc_feature 1..28: note = Description of Artificial Sequence: Synthetic oligonucleotide
  source 1..28: mol_type = other DNA
ttttgtagatttacatcgtaatcttaca

SEQ ID NO: 15015 - DNA, 35 bp, synthetic construct
  misc_feature 1..35: note = Description of Artificial Sequence: Synthetic oligonucleotide
  source 1..35: mol_type = other DNA
ttttgtatccatattaaattacacgcttctcaaac

SEQ ID NO: 15016 - DNA, 19 bp, synthetic construct
  misc_feature 1..19: note = Description of Artificial Sequence: Synthetic oligonucleotide
  source 1..19: mol_type = other DNA
acatgaggatcacccatgt

SEQ ID NO: 15017 - DNA, 25 bp, synthetic construct
  misc_feature 1..25: note = Description of Artificial Sequence: Synthetic oligonucleotide
  source 1..25: mol_type = other DNA
ggagcagacgatatggcgtcgctcc

SEQ ID NO: 15018 - DNA, 15 bp, synthetic construct
  misc_feature 1..15: note = Description of Artificial Sequence: Synthetic oligonucleotide
  source 1..15: mol_type = other DNA
gccctgaagaagggc

SEQ ID NO: 15019 - protein, 16 aa, unidentified
  REGION 1..16: note = Description of Unknown: Cas Enzyme sequence
KRPAATKKAGQAKKKK

SEQ ID NO: 15020 - protein, 7 aa, unidentified
  REGION 1..7: note = Description of Unknown: Cas Enzyme sequence
PKKKRKV

SEQ ID NO: 15021 - protein, 9 aa, unidentified
  REGION 1..9: note = Description of Unknown: Cas Enzyme sequence
LPPLERLTL

SEQ ID NO: 15022 - protein, 1503 aa, unidentified
  REGION 1..1503: note = Cas Enzyme sequence
MNKKIIGLDLGTNSIGWALVEKDTEQNEGKIVDAGSRIIPMPQDAISKYETGNLQSAASVRTDYRGMRRLYERAELRRSRLLRVLNILGFLPEHYREAIDFTNHLGQFKDHGEPLLPYKRNEEGKNEFIFKNAFHEMLEDMRTHHPELVANGKKIPYDWTIYYLRKKALSKSISKEELAWIILNFNTKRGYYQLRGKEEETATNDNQVYDVLEVSNVEETGPNNKKKGYNWYLIHFTNGKVQNRTWKEAPCHIGDKVECIITYQVKKDGSPKLDENGEQLYKITAPDPNDWTLRKKRTESIINNEHVTVGAYIYDHLMEHPEDKIRGKYVHTIERKYYKEELRIILDKQKEYIPELRDRNLLSQCISELYHHNEAHRKALSGQDFTRLFVDDIIFYQRPLKSKKSLIADCPLEFYPYRDKDGVWKHRPIKCTPRSNPLFQEFRLWQFIQNLRIFLREQKEEDGKLKLDVDVTNLFLSTPEDYCDLFDWMKQKSDITQKQLLAYPAFHLGKKTKDYRWNYVDDDKHTYPLCSTHHDICQALKNVDGAPSLSTGQEENLWHILYSVDDRYELEKALCHFAEKYSLDSESFVNAFMTFKPFDNSYASYSEKAIKKMLPLMRTGRYWNVEGIDSRTLQRIEHLITGEADDNISNSVREKCQGLDQIEKYQFLPVWKACYVVYNRHSEAIDTGRWSSPDDIDNYLKSELRQGSLRNPVVESVLTESLRVVRDVWKQYGKPEEVHIEMGRDLKQNKAQRQKANSAMLTNQQTNLRIRCMLQEFADPEFHIDNVRPQSPSQQELLKIYEQGVLDSTDNIPDDIQTIIDHIGDKNKGASRSDMLRYKLWLEQKYQSPYTGQPISLSRLFTSEYEIEHVIPQARYFDDSLNNKVICETEVNREKGSMLAYEFIKSKGGMIVKGTGGRQYKILDTVQYEEFVKSHYSSNKRKMRNLLLDDIPDSFISKQLNDTRYMARKALDIFSHLVREEYKDDSAVSKNVIACNGAITDRLKKDWGLNDVWNDIVAPRFERMNAITHSTDYGQWVCKEGKRYFQISIPLALSKGFSKKRIDHRHHAMDAIVIACTTRNIVNYLNNASGADTEARHDLRNAVCFKDKNVDGCGNYQWTIKKPWCTFTQDAHTTLDHTVVSFKQNKRIITQTSNRYWHYRNGKKVLDRQVKGDHRAIRKSLHKATVSGALYMPEKKKVKLKVALEDINAICNAKARKEIRHIINETYHGHVDNATLLKYFKARDYLINGINFNTLEMRIVPAQPNYTASRVALDSTFTEKDIEKVTDTGIQSILKRHLEHYIDDKGKYDYAAAFSPEGIAEMNEHLTELNGGKSHKPIYKVREKETIGLKFNIGTAGFKNKKFVEADKGTNLFYAVYADNEGKRSFESIPLNMAIERKKNKMDVAPAMNAKGDKLLFVLSPGDLVYLPQEGEHVALPLDENRIYKMVSCSVARSYFVPYCSACMISDKIEYGPLNKMERSLDGIMIKTTCIKLKVDRLGHISI

SEQ ID NO: 15023 - protein, 1980 aa, unidentified
  REGION 1..1980: note = Cas Enzyme sequence
MNETAKLALFVALVMLVLSGAIYTSSYFKKTGTEGQMLSLVPDRVVVTDPVTGALISSSLKTKDLAECCPQKIINDTTASLINTFSSSFTDKNFLRRTKLEPGAILVADAVGNVSSSQIGIPFITSCCESIKALIDDVAPKSDGIYSSLKTDATYVKKPETSVSQRPVTYNAYTGALEMVSLPANSILSTDTNGDIVTTPYSLPSCCDKIKDTIVDYTTTFSSNYIDTNYQRRAVAGSQHLVMMDDYGNLVDSGLTPTIVNTCCETARNALSPSNIIDGGGNALYSAPKIDATFQKKTTAPANALLMPDANGNLVDSGLTPAAIQACCTQAANAATDSLLKSDIVDTSLSATKLYSSLKIDDTFQKKAIAPANAIVVVDAKGDLVDSGFTPQFLQNCCAQAATGSANGLMKADIVDTSTATDKLYSSSKIDTTYQKKTTAPANAILMPDANGNLVDSGLTPLAITTCCTAAMKAANESLKIVDIVDTSTATDKLYSSSKIDMTYQKKTTAPANSLLMPDANGNLVDSGLTPSAIQACCTQAVGAATNSLLKTDIVDTSTSTDKLYSSSKIDTTYQKKTTAPANSLLMPDANGNLVDSGLTPTAIQACCTQAVSAATNSLLKTDIVDTSTSTDKLYSSSKIEATFTKKTTAPANVLLMPDANGNLVDSGITPAFISACCQETADAKIGVANALLKSDIVDTSTAATKLYSSSKIDATYQKKTTAPANSLLMPDANGNLVDSGLTPTAIQACCTQAVSAATNSLLKTDIVDTSTSTNKLYSSSKIDATYSKKTTAPANSLLMPDANGNLVDSGLTPAGIQACCTQAVSAATNSLLKTDIIDTTTSTDKLYSSSKIDATYQKKTTAPANVLLMPDASGNLVDSGITPAFISACCQQTTNATTAVANALLKSDIVDTSTSTSKLYSSSKIDATYAKKPTAPANAILVPDANGNLVDSGLTPTAIQACCTQAVNAATNSLLKTDIVDTSTSATKLYSSAKIDATYTKKTTAPANALLMPDASGNLVDSGLTPAGIQACCTQAASAASNSLLKTDIIDTSTSTTKLYSSSKIDATYQKKTTAPANALLMPDASGNLVDSGITPAFINACCQQTTSATTAVANALLKSDIVDTSTSATKLYSSSKIDATYAKKPTAPANALLMPDANGNLVDSGLTPAGIQACCTQAASAAANSLLKTDIIDTSTSATKLYSSAKIDATYTKKTTAPANALLMPDANGNLVDSGLTPTAIQACCTQAVNAATNSLLKTDIIDTSTSTSKLYSSSKIDATYTKKTTAPANAILVPDANGNLVDSGLTPAGIQACCTQAATAASNSLLKTDIVDTSTSATKLYSSSKIDATYQKKTTAPANALLMPDASGNLVDSGITPAFISACCQQTTNATTAVANALLKSDIVDTSTSASKLYSSSKIDATYAKKPTAPANALLMPDANGNLVDSGLTPAGIQACCTQAATAATNSLLKTDIIDTSTSTSKLYSSSKIDATYTKKTTAPANALLMPDASGNLVDSGLTPTFINACCTQASNALAAATNSLVKTDIVDTSISATKLYSSSKIDATYTKKTTAPANALLMPDASGNLVDSGLTPTSIQACCTQASNALAASNNSLLKTDIVDTSTATTKLYSSSKIDATYQKKTTAPANALLMPDANGNLVDSGLTPTFINACCTQASNALTAATNSLLKTDIVDTSTSTTKLYSSSKIDATYQKKTTAPANALLMPDASGNLVDSGLTPTFINACCTQASNALAATNNALLKSDIKDSGLLGAPSTTSLWSSSKIDTTFQKKSTAAPNTLLMLDTNGNLVGAGFTSAQLQTCCSTSNQSITSNLLYLQYTNVFAYFNAVANTWTLASYFTKRYDTTGGWYASGKFQPQKAGVWSIRATAWAPRTLGGNRIHFCLAQNAAMSPLWQDVNSWNNSTQSNLTTFTAKVDAIFVLNGSTDYVSAYFMTNSLPQDFDVLENCNMFQAYYLGG

SEQ ID NO: 15024 - protein, 1304 aa, unidentified
  REGION 1..1304: note = Cas Enzyme sequence
EFARVLLAINKKRGYKSSRKAKTEDEGQAIDGMVIAKRLYDENLTPGQLSLQLLQQNKKLLPDFYRSDLQKEFDLVWNFQKQFYPDILTDSFYKELQGKGKDATSKAFSKRYHFDTAENKGSKESVRLQAYQWRAEAISKQLSKEGVAYVLTEINNNLNNASGYLGAISDRSKELYFNRQTVGQYLYAQLQENKHNSLKNKVFYRQDYLDEFERIWETQASFHKELTEELKKQIRDVVIFYQRKLKSQKGLISFCEFESKEIEIEKDGKTITKSIGARVVPKSSPLFQEFKIWQILNNVTCKRKGIRKKKSSAKSTELDLFNEPSQTIFSLDMECKQLLFEELNLKGDLKSDKVLKLLGYSPQEWEINYNQLEGNRTQKALYEAYLKIVEIEAHDVKDILQIKSAKDDWALDESPLSASEIRESVKAIFQALGICTKILYFDPLLPVKEFEEQDSYQLWHLLYSYESDDSTSGNETLYRILEKKYAFKREHATILANIALQDDYGSLSTKAIRKLYPYIKENQYSTACEKAGYKHSKLSLTTEELEARELKNIIPLLKKNALRNPVVEKILNQMINVVNALIEKNSERDAEGKITKYFHFDEIRIELARELKKNAQERYEMTQNINKAKLEHQKISEILQKEFGIKNPTKSDIIRYRLYQELEHNGYKELYTNAPIARDMLFSKNIEIEHIVPKARVFDDSFSNKTLAFREFNIKKGESTAFDYITSLNSEEELNQYLTRVENAYKTKSISPTKYKNLLKKASEIGDDFINRDLRDTQYIAKKAKEILFQVTKNVLSTSGSITDRLREDWGLVDVMKELNMPKYQSLGLTEVEERKEGNKVTVIKNWTKRNDHRHHAMDALTVAFTKPSYIQYLNHLNARKDENNKNYSVILAIEEKETIKVPTNNGKNKRVFIEPIPNFRQVAKKHLEEIFISHKAKNKVVTKNINKPAGTDKQQITLTPRGQLHKETVYGKYQYYVNKEEKIGVKFDKETIAKVSNSVYREALLKRLQANDNDPKKAFAGKNALSKNPIYLDEAKTKTLPEKVNLTYLEEDFSIRKDISPDNFKDLKSIEKVIDQGVKRILIKRLQAYGNDPKKAFVDLEKNPIWLNKEKGIAIKRVTISGVNNAQPLHIGKDHLGKTTLNKEGKEIPVDYVSTGNNHHVAIYRDKEGNLQEQIVSFFEAVVRAQQGLPIVDKTYKQAEGWQFLFTMKQNEMFVFPNEATGFNPAEIDLLDPKNKKQISPNLFRVQKIATKDYFFRHHLETNVETDNILKNVTWKREGLSGLKDIVKVRMNHLGDIVSIGEY

SEQ ID NO: 15025 - protein, 1426 aa, unidentified
  REGION 1..1426: note = Cas Enzyme sequence
MKNILGLDLGITSISFAHIVEDENKEKSEIKELGVRIVSLTTDEQSDFEKGKSITTNANRTLKHGARLNLDRYQQRRKYLIDLLQKANLITSSSILAENGKNTTHSTWQLRAKAVTERVEKEEFARVLLAINKKRGYKSSRKAKTEDEGQAIDGMAIAKRLYDENLTPGQLSLQLLQQNKKLLSDFYRSDLQREFDLVWNFQKQFYPDILTDSFYKELQGKGKDATSKGFSKRYHFDIAENKGSKESVRLQAYQWRAEAISKQLSKEEVAYVLTEINNNLNNASGYLGAISDRSKELYFNRQTVGQYLYAQLQENRHNSLKNKVFYRQDYLDEFERIWETQASFHKELTEELKKQIRDVVIFYQRKLKSQKGLISFCEFESKEIEIEKDGKTITKSIGARVVPKSSPLFQEFKIWQILNNVTCKRKGIRKKKSSAKSTELDLFNESSQAIFSLDMECKQLLFDELNLKGDLKSDKVLKLLGYSPQEWEINYNQLEGNRTQKALYEAYLKIVEMEAHDVKDILQIKSAKDDWSLDESPLSASEIKEKVKDIFQALGICTKILYFDPLLPVKEFEEQDSYQLWHLLYSYESDDSTSGNETLYRILEKKYAFKREHATILANVALQDDYGNLSTKAIRKLYPYIKENQYSTACEKAGYKHSKLSLTTEELEARELKNIIPLLKKNALRNPVVEKILNQMINVVNALIEKNSERDAEGKITKYFHFDEIRIELARELKKNAQERYEMTQNINKAKLEHQKISEKLQKEFGIKNPTKSDITRYRLYQELAHNGYNDLYTNTYIPKELLFSKNIDIEHIVPKARVFDDSFSNKTLAFREFNIKKGESTAFDYITSLNNEEELNQYLNRVENAYKTKNISPTKYKNLLKKASEIGDGFINRDLRDTQYIAKKAKEILFQVTKNVLSTSGSITDRLREDWGLVDVMKELNMPKYQSLGLTEVEERKEGNKVTVIKNWTKRNDHRHHAMDALTVAFTKPSYIQYLNHLNARKDKNNKNYSVILAIEEKETIKVPTNNGKNKRVFIEPIPNFRQVAKKHLEEIFISHKAKNKVVTKNINKPAGTDKQQITLTPRGQLHKETVYGKYQYYVNKEEKIGVKFDKETIAKVSNSVYREALLKRLQANDNDPKKAFAGKNALSKNPIYLDEAKTKTLPEKVNLTYLEEDFSIRKDISPDNFKDLKSIEKVIDQGVKRILIKRLQAYGNDPKKAFVDLEKNPIWLNKEKGIAIKRVTISGVNNAQPLHIGKDHLGKTTLNKEGKEIPVDYVSTGNNHHVAIYRDKEGNLQEQIVSFFEAVVRAQQGLPIVDKTYKQAEGWQFLFTMKQNEMFVFPNEATGFNPAEIDLLDPKNKKQISPNLFRVQKIATKDYFFRHHLETNVETDNILKNVTWKREGLSGLKDIVKVRMNHLGDIVSIGEY

SEQ ID NO: 15026 - protein, 1356 aa, unidentified
  REGION 1..1356: note = Cas Enzyme sequence
MKKKAEKIYLGLNVGTNSIGYAVTDEQYNLLKFNGNDAWGSIVFDAASSNEDRRNHRLARRNLDRRQQRIVWLQEIFAKEISKVDDRFFIRLSESFRWREDVQDQYVFFNDKEYTDVQYMKENPTIHHLICELMDNKAPHDVRLVYLACAWLIAHRGHFLNNLNVEKLDEIMDISSVYQNFINYFTENGYKRPWGEIDVSALAEALKRRSGVTAKTKELLKILLNGKKPEKSGTEEFPFSQDSIIRLLAGGQCKLKDVFCKEEYLDLGSISLDMDEDKFGEISGSIGEDYDLLMALRGLYDWSVLADLLNGHSKTISAAKVQMYEQHKEDLRVLKYFMHKYLPGKYNEVFRKAKADNYVAYTGHMDKETASQLKKKANVEDFSRYIQKLVRSINPEEKDQQTYQDMCERLELKCFLPKQRSTNNRVIPHQLYEYELIRILKNASLYLPFLNEVRNGVSEIDKVVSIFRYKLPYYVGPLNEESSFAWISRKQGKITPWNFKDMVDEDTSENVFIRRMTNKCTYLPGEDVLPKDSLCYQKFMVLNELNNLKIDGRKVPVEVKQGIYHELFEKKKKVRRKDIEEYLISNNYLAKGSTELISGIDEQVHSCLSSYSAFRNLLSREILSENDVEKIIERASYAEDKSRVKKWLRKEYPDLSQDDVRYITKIKIKEFGKLSRTFLTELKGCNKQDGEMTTILRIMWETNDNLMEILSDKYTFREAVEAFTQEYYTGKKKSLKERLDEMRVSNSVRRPVYRTLAVVKDIEKAFGKPDKIFVEMTRGGQTDQKRKRTKSRKQQILDLYDKCKDDVHDLMQQLESMGEYADSRLQSDRLYLYFMQFGKCAYSGAHIGFDQLMAGSVEYDIDHIYPQSYVKDDSLNNKVLVLSDLNGTKDNIYPVSPEIRGKMQGLWSWWNHVGAISDEKYKRLIRSAPFTDEEKMGFINRQLTETSQSTKFIADLLKERFPDAEVVYVKAGLVSDFRHEFDLPKSRSYNDLHNAADAFLSVVAGNVYDMRFSKKWFRIDEKYSVKVKTIFTHEVKCRGDIIWDGMPMLEKVEDTARKNTAHFVKYAAFKTGGLFDQNPVKKGTGLIPLKAGLPTEKYGGYNKAGVMFLIPVRYNIGKKSEILILPVELMHGKHFLEDKVFARNYTFTRLENILGKKVGEVSFPMGMRPWKINTMLSFDGFRVCLTGTGGRGKCLVAQPVMQFSADEHWRFYIKKLERFVEKIGINPDLLYDKDHDKVSKDENLKLYELYVDKLQNTIYKKRVNSPVQTLLKGKEEFKKLSIEEQCQVLLNIQSVFGRMTGGCDLTLIGGSAHSAATGSLSTTISNWKKKYSTVRIIDQSPSGMWEKSSENLLDLL

SEQ ID NO: 15027 - protein, 1356 aa, unidentified
  REGION 1..1356: note = Cas Enzyme sequence
MKKKAEKIYLGLNVGTNSIGYAVTDEQYNLLKFNGNDAWGSIVFDAASSNEDRRNHRLARRNLDRRQQRIVWLQEIFAKEISKVDDRFFIRLSESFRWREDVQDQYVFFNDKEYTDVQYMKENPTIHHLICELMDNKAPHDVRLVYLACAWMIAHRGHFLNNLNVEKLDEIMDISSVYQNFINYFTENGYKRPWGEIDVSALAEALKRRSGVTAKTKELLKILLNGKKPEKSGTEEFPFSQDSIIRLLAGGQCKLKDVFCKEEYLDLGSISLDMDEDKFGEISGSIGEDYDLLMALRGLYDWSVLADLLNGHSKTISAAKVQMYEQHKEDLRVLKYFMHKYLPGKYNEVFRKAKADNYVAYTGHMDKETASQLKKKANVEDFSRYIQKLVRSINPEEKDQQTYQDMCERLELKCFLPKQRSTNNRVIPHQLYEYELIRILKNASLYLPFLNEVRNGVSEIDKVVSIFRYKLPYYVGPLNEESSFAWISRKQGKITPWNFKDMVDEDTSENVFIRRMTNKCTYLPGEDVLPKDSLCYQKFMVLNELNNLKIDGRKVPVEVKQGIYHELFEKKKKVRRKDIEEYLISNNYLAKGSTELISGIDEQVHSCLSSYSAFRNLLSREILSENDVEKIIERASYAEDKSRVKKWLRKEYPDLSQDDVRYITKIKIKEFGKLSRTFLTELKGCNKQDGEMTTILRIMWETNDNLMEILSDKYTFREAVEAFTQEYYTGKKKSLKERLDEMRVSNSVRRPVYRTLAVVKDIEKAFGKPDKIFVEMTRGGQTDQKRKRTKSRKQQILDLYDKCKDDVHDLMQQLESMGEYADSRLQSDRLYLYFMQFGKCAYSGAHIGFDQLMAGSVEYDIDHIYPQSYVKDDSLNNKVLVLSDLNGTKDNIYPVSPEIRGKMQGLWSWWNHVGAISDEKYKRLIRSAPFTDEEKMGFINRQLTETSQSTKFIADLLKERFPDAEVVYVKAGLVSDFRHEFDLPKSRSYNDLHNAADAFLSVVAGNVYDMRFSKKWFRIDEKYSVKVKTIFTHEVKCRGDIIWDGMPMLEKVEDTARKNTAHFVKYAAFKTGGLFDQNPVKKGTGLIPLKAGLPTEKYGGYNKAGVMFLIPVRYNIGKKSEILILPVELMHGKHFLEDKVFARNYTFTRLENILGKKVGEVSFPMGMRPWKINTMLSFDGFRVCLTGTGGRGKCLVAQPVMQFSADEHWRFYIKRLERFVEKIGINPDLLYDKDHDKVSKDENLKLYELYVDKLQNTIYKKRVNSPVQTLLKGKEEFKKLSIEEQCQVLLNIQSVFGRMTGGCDLTLIGGSAHSAATGSLSTTISNWKKKYSTVRIIDQSPSGMWEKSSENLLDLL

SEQ ID NO: 15028 - protein, 1362 aa, unidentified
  REGION 1..1362: note = Cas Enzyme sequence
MKKKAEKIYLGLNVGTNSIGYAVTDEQYHLLKFNGNDAWGSIVFDAASSNEDRRNHRLTRRNLDRRQQRIVWLQEIFAKEISKVDDRFFIRLSESFRWREDVQNRYVFFNDKEYTDVQYMKEYPTIHHLICELMDNKAPHDVRLVYLACAWLITHRGHFLNNLNVEKLDEIMDISSVYQNFINYFTENGYKRPWGEIDVSALSEVLKQKTGITVKNKELQNILLEGKKPEKSGTEEFPFSQDSIIRLLAGGQCKLKDVFCKEEYLDLGSVSLGMDEEKFDEISGSIGEDYDLLIALRGLYDWSVLANLLNGHSETISMTKVQIYEQHGKDLQILKYFVRKYVPDKYNEVFRKAKADNYVAYTGHMDKDTASQIKKKAKAEEFSKYVLKLMSPIKPEKTDLQSYEDMCERLKLNRFLPKQKNTDNRVIPHQLYEYELIQILKNASVYLPFLNDTNNGISEADKVLSVFRYKIPYYVGPLNEESSFAWISRKQGKITPWNFKDMVDEDASENAFIRRMTNKCTYLPTEDVLPKDSLCYQKFMVLNEINNLQIDGLKIPVKAKQGIYHELFEKNKKVKRKDIEEYLIRNNYLDKDSTELISGIDEQIHSGLSSYCAFFNLLNKKILSEDDVERIIERASYAEDKSRVIKWLRKEYPGLSEDDIRYIARIKIRDFGRLSKTFLTGLKGCDVSKGFDGQDVEMISILQTMWETNDNLMEILSDKYTFLEAVEAFTQEYYTGKKKSLKERLDEMSVSNSVRRPVYRTLAVVKDIEKAFGKPDKIFLEMTRGGQADQKGKRIKSRKQQILDLYDKCKDDVHDLMWQLESLGEYADSRLQSDRLYLYFMQFGKCAYSGAHIGFEQLMAGSVEYDIDHIYPQSYVKDDSLNNKVLVLSDLNGTKDNIYPVSPEIRGKMQGLWSWWNHVGAISDEKYKRLIRSAPFTDEEKMGFINRQLTETSQSTKFIADLLKERFPDAEVVYVKAGLVSDFRHEFDLPKSRSYNDLHNAADAFLSVVAGNVYDMRFSKKWFRIDEKYSVKVKTIFTHEVKCRGDIIWDGMPMLEKVEDTARKNTAHFVKYAAFKTGGLFDQNPVKKGTGLIPLKAGLPTEKYGGYNKAGVMFLIPVRYNIGKKSEILILPVELMHGKHFLEDKVFARNYTFTRLENILGKKVGEVSFPMGMRPWKINTMLSFDGFRVCLTGTGGRGKCLVAQPVMQFSADEHWRFYIKRLERFVEKIGINPDLLYDKDHDKVSKDENLKLYELYVDKLQNTIYKKRVNSPVQTLLKGKEEFKKLSIEEQCQVLLNIQSVFGRMTGGCDLTLIGGSAHSAATGSLSTTISNWKKKYSTVRIIDQSPSGMWEKSSENLLDLL

SEQ ID NO: 15029 - protein, 1362 aa, unidentified
  REGION 1..1362: note = Cas Enzyme sequence
MKKKAEKIYLGLNVGTNSIGYAVTDEQYRLLKFNGNDAWGSIVFDAASSNEDRRNHRLVRRNLDRRQQRIVWLQEIFAKEISKVDDRFFIRLSESFRWREDVQDRYVFFNDKEYTDVQYMKEYPTIHHLICELMDNKTPHDVRLVYLACAWLITHRGHFLNNINVEKLDEIMDFSSVYQNFINYFTENGYKRPWGEIDVSALSEVLKQKTGITVKNKELQNILLEGKKPEKSGTEEFPFSQDSIIRLLAGGQCKLKDVFCKEEYLDLGSVSLGMDEEKFGEISGSIGEDYDLLIALRGLYDWSVLANLLNGHSETISMAKVQMYEQHGKDLQILKYFVRKYVPDKYNEVFRKAKADNYVAYTGHMDKDTASQIKKKAKAEEFSKYVLKLMSPIKPEKIDLQSYEDMCERLKLNIFLPKQKNTDNRVIPHQLYEYELIQILKNASVYLPFLNDTNNGISEADKVLSVFRYKIPYYVGPLNEKSSFAWISRKAGKITPWNYKDMVDEDASENAFIRRMTNKCTYLPTEDVLPKDSLCYQKFMVLNEINNLQIDGLKIPVKAKQGIYHELFEKNKKVKRKDIEEYLIRNNYLDKDSTKLISGIDEQIHSGLSSYCAFFNLLNKKILSEDDVERIIERASYAEDKSRVIKWLRKEYPGLSEDDIRYITRIKIRDFGRLSKTFLTGLKGCDVSKGFDGQDVEMISILQTMWETNDNLMEILSDKYTFREAVEAFTQEYYTGKKKSLKERLDEMSVSNSVRRPVYRTLAVVKDIEKAFGKPDKIFVEMTRGGQADQKGKRIKSRKQQILDLYDKCKDDVHDLIRQLEAMGEYADSRLQSDRLYLYFMQFGKCAYSGAHIGFEQLMAGSVEYDIDHIYPQSYVKDDSLNNKVLVLSDLNGTKDNIYPVSPEIRGKMQGLWSWWNHVGAISDEKYNRLIRSAPFTDEEKMGFINRQLTETSQSTKFIADLLKERFPDAEVVYVKAGLVSDFRHEFDLPKSRSYNDLHNAADAFLSVVAGNVYDMRFSKKWFRVDEKYSVKVKTIFTHEVKCRGDIIWDGMPMLEKVEDTARKNTAHFVKYAAFKTGGLFDQNPVKKGTGLIPLKAGLPTEKYGGYNKAGIMFLIPVRYNIGKKSEILILPVELMHGKHFLEDKVFARNYTFTRLENILGKKVGEVSFPMGMRPWKINTMLSFDGFRVCLTGTGGRGKCLVAQPVMQFSADEHWRFYIKRLERFVEKIGINPDLLYDKDHDKVSKDENLKLYELYVDKLQNTIYKKRVNSPVQTLLKGKEEFKKLSIEEQCQVLLNIQSVFGRMTGGCDLTLIGGSAHSAATGSLSTTISNWKKKYSTVRIIDQSPSGMWEKSSENLLDLL

SEQ ID NO: 15030 - protein, 1362 aa, unidentified
  REGION 1..1362: note = Cas Enzyme sequence
MKKKAEKIYLGLNVGTNSIGYAVTDEQYHLLKFNGNDAWGSIVFDAASSNEDRRNHRLARRNLDRRQQRIVWLQEIFAKEISKVDDRFFIRLSESFRWREDVQDRYVFFNDKEYTDVQYMKEYPTIHHLICELMDNKTPHDVRLVYLACAWLITHRGHFLNNLNVEKLDEIMDFSSVYQNFINYFTENGYKRPWGEIDVSALSEVLKQKTGITVKNKELQNILLEGKKPEKSGTEEFPFSQDSIIRLLAGGQCKLKDVFCKEEYLDFGSVSLGMDEEKFDEISGSIGEDYDLLIALRGLYDWSVLANLLNGHSETISMAKVQMYEQHGKDLQILKYFVRKYVPDKYNEVFRKAKADNYVAYTGHMDKDTASQIKKKAKAEEFSKYVLKLMSPIKPEKIDLQSYEDMCERLKLNIFLPKQKNTDNRVIPHQLYEYELIQILKNASVYLPFLNDTNNGISEADKVLSVFRYKIPYYVGPLNEKSSFAWISRKAGKITPWNYKDMVDEDASENAFIRRMTNKCTYLPTEDVLSKDSLCYQKFMVLNEINNLQIDGLKIPVKAKQGIYHELFEKNKKVKRKDIEEYLIRNNYLDKDSTKLISGIDEQIHSGLSSYCAFFNLLNKKILSEDDVERIIERASYAEDKSRVIKWLRKEYPGLSEDDIRYIARIKIRDFGRLSKTFLTGLKGCDVSKGFDGQDVEMISILQTMWETNDNLMEILSDKYTFLEAVEAFTQEYYTGKKKSLKERLDEMSASNSVRRPVYRTLAVVKDIEKAFGKPDKIFLEMTRGGQADQKGKRIKSRKQQILDLYDKCKDDVHDLIRQLEAMGEYADSRLQSDRLYLYFMQFGKCAYSGAHIGFEQLMAGSVEYDIDHIYPQSYVKDDSLNNKVLVLSDLNGTKDNIYPVSPEIRGKMQGLWSWWNHVGAISDEKYKRLIRSAPFTDEEKMGFINRQLTETSQSTKFIADLLKERFPDAEVVYVKAGLVSDFRHEFDLPKSRSYNDLHNAADAFLSVVAGNVYDMRFSKKWFRIDEKYSVKVKTIFTHEVKCRGDIIWDGMPMLEKVEDTARKNTAHFVKYAAFKTGGLFDQNPVKKGTGLIPLKAGLPTEKYGGYNKAGVMFLIPVRYNIGKKSEILILPVELMHGKHFLEDKVFARNYTFTRLENILGKKVGEVSFPMGMRPWKINTMLSFDGFRVCLTGTGGRGKCLVAQPVMQFSADEHWRFYIKRLERFVEKIGINPDLLYDKDHDKVSKDENLKLYELYVDKLQNTIYKKRVNSPVQTLLKGKEEFKKLSIEEQCQVLLNIQSVFGRMTGGCDLTLIGGSAHSAATGSLSTTISNWKKKYSTVRIIDQSPSGMWEKSSENLLDLL

SEQ ID NO: 15031 - protein, 960 aa, unidentified
  REGION 1..960: note = Cas Enzyme sequence
YEDMCERLKLNIFLPKQKNTDNRVIPHQLYEYELIQILKNASVYLPFLNDTNNGISEADKVLSVFRYKIPYYVGPLNEKSSFAWISRKAGKITPWNYKDMVDEDASENAFIRRMTNKCTYLPTEDVLSKDSLCYQKFMVLNEINNLQIDGLKIPVKAKQGIYHELFEKNKKVKRKDIEEYLIRNNYLDKDSTKLISGIDEQIHSGLSSYCAFFNLLNKKILSEDDVERIIERASYAEDKSRVIKWLRKEYPGLSEDDIRYIARIKIRDFGRLSKTFLTGLKGCDVSKGFDGQDVEMISILQTMWETNDNLMEILSDKYTFLEAVEAFTQEYYTGKKKSLKERLDEMSASNSVRRPVYRTLAVVKDIEKAFGKPDKIFLEMTRGGQADQKGKRIKSRKQQILDLYDKCKDDVHDLIRQLEAMGEYADSRLQSDRLYLYFMQFGKCAYSGAHIGFEQLMAGSVEYDIDHIYPQSYVKDDSLNNKVLVLSDLNGTKDNIYPVSPEIRGKMQGLWSWWNHVGAISDEKYKRLIRSAPFTDEEKMGFINRQLTETSQSTKFIADLLKERFPDAEVVYVKAGLVSDFRHEFDLPKSRSYNDLHNAADAFLSVVAGNVYDMRFSKKWFRIDEKYSVKVKTIFTHEVKCRGDIIWDGMPMLEKVEDTARKNTAHFVKYAAFKTGGLFDQNPVKKGTGLIPLKAGLPTEKYGGYNKAGVMFLIPVRYNIGKKSEILILPVELMHGKHFLEDKVFARNYTFTRLENILGKKVGEVSFPMGMRPWKINTMLSFDGFRVCLTGTGGRGKCLVAQPVMQFSADEHWRFYIKRLERFVEKIGINPDLLYDKDHDKVSKDENLKLYELYVDKLQNTIYKKRVNSPVQTLLKGKEEFKKLSIEEQCQVLLNIQSVFGRMTGGCDLTLIGGSAHSAATGSLSTTISNWKKKYSTVRIIDQSPSGMWEKSSENLLDLL

SEQ ID NO: 15032 - protein, 1435 aa, unidentified
  REGION 1..1435: note = Cas Enzyme sequence
MKNILGLDLGTTSISFAHIVEDENKEKSEIKELGVRIVSLTTDEQSDFEKGKSITTNANRTLKHGARLNLDRYQQRRKYLIDLLQKANLITPSSILAENGKNTTHSTWQLRAKAVTERVEKEEFARILLAINKKRGYKSSRKAKTEDEGQAIDGMAIAKRLYDENLTPGQLSLQLLQQNKKLLPDFYRSDLQKEFDLVWNFQKQFYPDILTDSFYKELQGKGKDATSKAFSKRYHFDTAENKGSKESVRLQAYQWRAEAISKQLSKEEVAYVLTEINNNLNNASGYLGAISDRSKELYFNRQTVGQYLYAQLQENRHNSLKNKVFYRQDYLDEFERIWETQASFHKELTDELKKQIRDVVIFYQRKLKSQKGLVSFCEFESKEIEIEKDGKAITKSIGARVVPKSSPLFQEFKIWQILNNVTCKRKGIRKKKSSTNPTQLDLFNEPSQTIFSLDMECKQLLFDELNLKGDLKSDKVLKLLGYSPQEWEINYNQLEGNRTQKSLYEAYLKIIEIEGYEVKDILQIKSTKDDWSLDESPLSASEIIERVKAIFQTLGICTKILYFDPLLPVKEFEQQYSYQLWHLLYSYESDDSTSGNETLYQILEKKYAFKREHARILANVALQDDYGSLSTKAIRKIYPYIKENQYSKACELAGYKHSKLSLTTEELEARELKNIIPLLKKNALRNPVVEKILNQMINVVNALIEKNSERDAEGKITKYFHFDEIRIELARELKKNAQERYEMTQNINKAKLEHQKISEKLQKQFGIKNPTKSDIIRYRLYQELEHNGYKELYTNTYIAPDVLFSKNIDIEHIVPKARVFDDSFSNKTLAFKEFNIKKGESTAFDYITSLNCEGELNQYLTRVENAYKTKSISLTKYKNLLKKASEIGDGFINRDLRDTQYIAKKAKEILFQVTKNVLSTSGNITDRLREDWGLVNVMKELNMPKYQSLGLTEVEERKDGNKVTVIKDWTKRNDHRHHAMDALTVAFTKPSYIQYLNHLNARKDENNKNYSVILAIEKKETIKVPSNNGKNKRVFIEPIPNFRQVAKKHLEEIFISHKAKNKVVTKNINKPAGTDKQQITLTPRGQLHKETIYGKYQYYVNKEEKVGVKFDERTITKVSNPLYREALLKRLQANDNDPKKAFAGKNALSKNPIYLDESKTKTLPEKVNLTYLEEDFSIRKDISPDNFKDLKSIEKVIDQGVKRILIKRLQAYDNDPKKAFVDLEKNPIWLNKEKGIAIKRVTISGVSNAQPLHIGKDHLGKTTLNKEGKEIPVDYVSTGNNHHVAIYRDKEGNLQEQIVSFFEAVVRAHQGLPIIDKTYKQAEGWQFMFTMKQNEMFVFPNEATGFNPAEIDLLDPKNKKLISPNLFRVQTISIVKYGNSVVRDFKFRHHLEATLQDDKILQGITFQQIKSLEPLRNIVKVRLNHLGDIVNIGEY

SEQ ID NO: 15033 - protein, 1426 aa, unidentified
  REGION 1..1426: note = Cas Enzyme sequence
MKNILGLDLGTTSIGFAHIVEDENKEKSEIKELGVRIVSLTTDEQSDFEKGKSISTNANRTFKHGARLNLDRYQQRRKFLIDLLQKANLITSSSILAENGKNTTHSTWQLRAKAVTERIEKEEFARVLLAINKKRGYKSSRKAKTEDEGQAIDGMAIAKRLYDENLTPGQLSLQLLQQNKKLLPDFYRSDLQKEFDLVWNFQKQFYPDILTDSFYKELQGKGKDATSKAFSKRYHFDTAENKGSKESVRLQAYQWRAEAISKQLSKEEVAYVLTEINNNLNNASGYLGAISDRSKELYFNRQTVGQYLYAQLQENKHNSLKNKVFYRQDYLDEFERIWETQASFHKELTEELKKQIRDVVIFYQRKLKSQKGLISFCEFESKEIEIEKDGKTITKSIGARVVPKSSPLFQEFKIWQILNNVTCKRKGIRKKKSSAKSTELDLFNEPSQTIFSLDMECKQLLFEELNLKGDLKSDKVLKLLGYSPQEWEINYNQLEGNRTQKALYEAYLKIVEMEAHDVKDILQIKSTKDDWALEESPLSASEIRERVKAIFQTLGICTKILYFDPLLPVKEFEEQDSYQLWHLLYSYESDDSTSGNETLYRILEKKYAFKREHATILANVTLQDDYGSLSTKAIRKIYPYIKENQYSTACEKAGYKHSKLSLTTEELEARELKNIIPLLKKNALRNPVVEKILNQMINVVNALIEKNSERDAEGKITKYFHFDEIRIELARELKKNAQERYEMTQNINKAKLEHQKISGILQKEFGIKNPTKSDITRYRLYQELAHNGYNDLYTNTYIPKELLFSKNIDIEHIVSKARVFDDSFSNKTLAFREFNIKKGESTAFDYITSLNNEEELNQYLNRVENAYKTKNISPAKYKNLLKKASEIGDGFINRDLRDTQYIAKKAKEILFQVTKNVLSTSGSITDRLREDWGLVDVMKELNMPKYQSLGLTEVEERKEGNKVTVIKNWTKRNDHRHHAMDALTVAFTKPSYIQYLNHLNARKDKNNKNYSVILAIEEKETIKVPTNNGKNKRVFIEPIPNFRQVAKKHLEEIFISHKAKNKVVTKNINKPADTDKQQITLTPRGQLHKETVYGKYQYYVNKEEKIGVKFDKETIAKVSNPVYREALLKRLQANDNDPKKAFAGKNALSKNPIYLDEAKTKTLTEKVNLTYLEEDFSIRKDISPDNFKDLKSIEKVIDQGVKRILIKRLQDYDNDPKKAFVDLEKNPIWLNKEKGIAIKRVTISGVNNAQPLHIGKDHLGKTTLNKEGKEIPVDYVSTGNNHHVAIYRDKEGNLQEQIVSFFEAVVRAQQGLPIVDKTYKQAEGWQFLFTMKQNEMFVFPNEATGFNPAEIDLLDPKNKKQISPNLFRVQKIATKDYFFRHHLETNVETDNILKNVTWKREGLSGLKDIVKVRMNHLGDIVSIGEY

SEQ ID NO: 15034 - protein, 1080 aa, unidentified
  REGION 1..1080: note = Cas Enzyme sequence
MSPAMEASQKYVLGLDLGSASLGWALIRLNAAGDPEHLIRTGVRVFEPGVDGSSLDIEQGKDQSKAVERRTARLQRRQLRRRVARQRELFIELQRAGLLPTGSTGHGAGSEQRHQLLNNFDQALTAKYLATDGEAFAQGPLYFLRKRALDHALEPHELGRVLFHLSQRRGFKSNRKETKKTKEDEDLGQVKADIHSLELAMQEAGARTLGEYFAGLDPHTEKVRRRWTARRMFEREFELIWSAQQPHHTSVLTQELHDRIWTLLFFQRPISAQKHLIGTCELERGDEKHPPKRRAPWAFVAAQRFRMLQKINDLVVLDATMRTSRKLTPEERKSLYDLLDREGTQTFAAIRKYLGLKGTTFNLEAGGDKTLPGNRTLKSMRNAFGSAWDSFSEGKQNQIIENWRNSESDDLLMADAVEHLGLDAASAKTLVDEKPQADYCALSLVAINKLMPLMLDGKSFKEAETEVYGSRFSGLPVHDVLPPVRNALPTLRNPAVERALTELRKVVNAIVRAYGKPYEIRIELARELKKPRQERVKATVANRKREAENKLLAKRMADECGIQNPSRKDLEKAKLWVEQQGECPYTGKRLSFSRLFDDPEFDVDHILPISRHPDDSYQNKVLCCLNENRMHKRNQTPYEAYSNDAERWRIILARVAKWSNPGKLSKFEIATADKLTEFSSRQLNDTRYTSIKAGELLSLLYGGRDVIRDGKPEQAVYASTGAVTATLRRNWGFERILQGLVSPEAGETRGKPRTDHRHHAIDAITIALTRQSVIQAMARESQLAPWQPGTRAWRNIPKPWTSPEFEHELQQQMADMVVSHRPEHKISGELHKGTNYGKPYLLNGKSTVHARCAVSALSLSDIEADNVIVDRAVRDAVRTKLAEVGGNPKAFEKPENLPHLLAANGRAIPIRRVRIRQTKGPKTVATGSRERFVDSAGIHHAALFVVRDTARKEAWISDVVQTTDVYDRCPRRDKRKGRPKNPIYGAAVSRVSSEYPEAEFLFSLMKDDTVEMDFKGERAIFRVKKFYANGQIWFTSVNNAQQDADQMKQKTTWSKSPNTLRPLNPRKVVVDLLGKVHSAN

SEQ ID NO: 15035 - protein, 1155 aa, unidentified
  REGION 1..1155: note = Cas Enzyme sequence
MKYRLGLDLGVGSIGSAVIELDNENNAKDIIDAGVRIFEVSEGAEERRLKRTARKNLVRTKKRLELLAKKLFENGLWPNENPEGTDKLKSKSPYKIRTDALNEKLASPYYVGRAVLHIAKHRGAGFVSASEETEEEILEEGEKSKAKKSSYDMMLHHLKETNSKTIGEFFYNKIISGKGNDKTVRQKKYAIEKNIVDYAIPRYLVKDEFNKIWDKQAEFYPQMKKENLKKEIYDILFYERPAAPYATGKCIYFREEDRLLKAHPLSEMRRIYEEVNNIRILNDMNKRKLTLEERDSIVNELLLKGQNAGKQAIKKLLNLSAQHKISLVDDRVIKAYLYSRPEFANNEHLHNMNENELSSFIEFLAEPKMSKDKNARLYNEDALIEYLKPILKIDDEKEIGNLLTKLPKGRGMLGISATKIILEKLKEDVLTHREITDKLAETDKRFMAEEEIARQNQGKCFQLPYYGEILQTDTAPLPPLMINNNKSLNPDEIRWGKIANPAVHMILNQIRLVVNEIIKIYGKPYDINIELGRDVGMSTKKKKEFENQQKQNEKLNEEAKNYLKEHKIAINNKNILKYKLAKEQGWKDAYNPTQNISSIFTGMEIEHIIPQAKGGTDTYNNLCLVNSNDNLNKGNRYAYEYFEETKTQEEIREILKNARSRTPQKSWRFEADAREKYEESGDKEESTRYLTDTRYVAKMAQRYLRAIVDCSDCDEVMQTRILAVKGGQTAKLRQHWNLYGLEYDLMGLDIPRYVNCPPYWLELDTGEIIEGINKPDIDGKWKFFDKAKNKEWQPKPRIDHRHHAMDAITVACANRGLIQKMAEENDINKIHYPLPLTSVESLADFRRKVISCLKDIKVSHKPNHSKAGQFHKETGRTVLCQNPDDPNSLITVYSRKILQVVKSAKDLTKLLIPETIKNEWHEDIAEHKAKQAKLVQDFELYMNTAEQILIAENEQGVAEGKKEIKITEGRILLKAFRIIQDKGLWKGDKFRCYENNSSLVYIKKHGVAYEGRNNHCVDFYQKNGKIGWEVIKRFDANQADFEPQWKKEGGKIIWSVQQGDILELDTPDEWKQYTDKERCLAKVKKFSEGKFCIDYITDARMTSPKDKTLEYMFVNSLEKGLSYYTSHKARKVELTPFGKIKKKHKVLWNGTKTAA

SEQ ID NO: 15036 - protein, 1426 aa, unidentified
  REGION 1..1426: note = Cas Enzyme sequence
MKNILGLDLGTTSIGFAHIVEDENKEKSEIKELGVRIVSLTTDEQSDFEKGKSISTNANRTLKHGARLNLDRYQQRRKFLIDLLQKANLITPSSILAENGKNTTHSTWQLRAKAVTERIEKEEFARVLLTINKKRGYKSSRKAKTEDEGQAIDGMAIAKRLYDENLTPGQLSLQLLQQNKKLLPDFYRSDLQKEFDLVWNFQKQFYPDILTDSFYKELQGKGKDATSKAFSKRYHFDTAENKGSRESVRLQAYQWRAEAISKQLSKEEVAYVLTEINNNLNNASGYLGAISDRSKELYFNRQTVGQYLYAQLQENRHNSLKNKVFYRQDYLDEFERIWETQASFHKELTDELKKQIRDVVIFYQRKLKSQKGLISFCEFESKEIEIEKDGKTITKSIGARVVPKSSPLFQEFKIWQILNNVTCKRKGIRKKKSSAKSTELDLFNESSQAIFSLDMECKQLLFDELNLKGDLKSDKVLNLLGYSPQEWEINYNQLEGNRTQKALYEAYLKIVEMEAHDVKDILQIKSAKDDWSLDESPLSASEIKEKVKDIFQALGICTKILYFDPLLPVKEFEKQDSYQLWHLLYSYESDDSTSGNETLYRILEKKYAFKREHARILANVALQDDYGSLSTKAIRKIYPNIKENQYSKACELAGYKHSKLSLTTEELEARELKNIIPLLKKNALRNPVVEKILNQMINVVNALIEKNSERDAEGKITEYFHFDEIRIELARELKKNAQKRYEMTQNINKAKLEHQKISEILQKQFGIKNPTKSDNIRYRLYQELEHNGYKELYTNAYIAPDVLFSKNIDIEHIVPKARVFDDSFSNKTLAFRDFNIKKGESTAFDYITSLNSEEELNQYLTRVENAYKTKSISPTKYKNLLKKASEIGDDFINRDLRDTQYIAKKAKEILFQVTKNVLSTSGSITDRLREDWGLVDVMKELNMPKYQSLGLTEVEERKDGNKVTVIKNWTKRNDHRHHAMDALTVAFTKPSYIQYLNHLNARKDENNKNYSVILAIEEKETIKVPTNNGKNKRVFIEPIPNFRQVAKKHLEEIFISHKAKNKVVTKNTNKPAGTDKQQITLTPRGQLHKETVYGKYQYYVNKEEKIGVKFDKETIAKVSNPVYREALLKRLQANDNDPKKAFAGKNALSKNPIYLDEAKTKTLPEKVNLTYLEEDFSIRKDISPDNFKDLKSIEKVIDQGVKRILIKRLQAYGNDPKKAFVDLEKNPIWLNKEKGIAIKRVTISGVSNAQPLHIGKDHLGKTTLNKEGKEIPVDYVSTGNNHHVAIYRDKEGNLQEQIVSFFEAVVRAQQGLPIVDKTYKQAEGWQFLFTMKQNEMFIFPNEATGFNPAEIDLLDPKNKKQISPNLFRVQKIATKDYFFRHHLETNVETDNILKNVTWKREGLSGLKNIVKVRMNHLGDIVSIGEY

SEQ ID NO: 15037 - protein, 1398 aa, unidentified
  REGION 1..1398: note = Cas Enzyme sequence
MSGPYSIGFELSSTAHGFVATDPNGNVLYHGKQPVMGTRVFKEGQHAAEARMPRTSRRGIQRRRGREHEMERVFAPVISSIDPDFFIRCRMSYKLGKIRFESDPIGFSYSRLFHSFPTLAHLDVALMEADSAMDPRLIFEAVANHVVRRGHFLLENQNVSSTNSDIDTQVANYAEVLVSYFEDTLDERIELSLEALDINGNVTARELQKQFASAMCVSGDDIQKKTEKAQIKAIADLVAGYKADLTVLVPDAEKLPKVSISDGDALEEFLADSCPDSLVPVLMAAQALYTSWKLQGMLSYAPGKSLSHNQVAQHDVYGKQLRMLKDLALKYVAKQDANGNVDEDGFKDYVRFFGGPKREDGYRYDKVQVKKQDSPKNNMGYTAYNLNVLGYEEFAKRVELLFKDTDAVDDSQYKTMMEAFANHAFLRRIHTVDNAAIPYQLHAEVVNRIIDNQGRFYPWLIDAREHILKVLTSRIPYYVGPLDSTDHGKAGENGTRFAWVKRLAGHEDAFVSPWNYEDHIDIDTTAELFIRRMTGECSYLDGEDVLAKNSLLYEKYCFFNELASLSFTEDGDSWMPFDAGMRRAIYDAASDGKTMTVKRIESVLQRDFFIAHPHVRGTSNPKAMSSKRSNYAYFCRLFDVKALSASDMSMAEDLVLWNTVFEDRDILRRKILKTYGDLLTEKAVDDFCHKHLSGWGKLSERLLTGIWADTASGDMCVMDVLEQGRPYGRYRGSSMNLMQILNDDVLGFKMEIKRLNDSHMQMAEGFDLNALPGSPALRRGVSQAMKVLDDIVSVAGKAPDRIYLKVTRTASNSRKGKRTAKRCDKIKQALKALDADAAADLGAAKLLRELGMFDEKEINERIYLYFHQAGKCLYTGKPIDITRIASNDYYVDHVVPLAYRKDESLDNKVLVYAEASRYKSETLLVSPAVQRKMLPFWRKLRNAGLMSERKLNALNRTEISEGMLKSIIGRQFTENSWEAKLFTAAIAAKYPGTVVIPVKAGVIGAVRSRIGIPKSLKANQFYHAHDALLAAEVGRYMELAKPAFVHNRVKYEQYMRKIKLVDEENKKAPKSQLDFFAGGFFFDRVDKDTGEVYWDKDEEVERIYRACGWKNLRVTYAAFEDGGAFWKQTIYSPREKSKLIATKSDRPAEIYGGYSSQTFANFFVYEVMKKKVKQLRFGAVPAAIASKSDPDTYNAMLEMYARGLAKTAKEKFVRIVRARVLKNTTIELYGERFRVAGEKQVYPVRQMPLAIDEVYLLKGVEAIAAAGNAGASARIDFEKAAESLVGFWDLLLEKLPVNYPKLTAQLKLGSLKHPKDILAATSESEFPAIVYKIAEAEIQVMEQASGLRNMSDTKILGGNTFGGSLVFTFNKVLNDPKSKACFIDTTPAGLHEVKTKIW

SEQ ID NO: 15038 - protein, 1183 aa, unidentified
  REGION 1..1183: note = Cas Enzyme sequence
MKYRLGIDLGTSSIGIAAFSLKENNEIDDLIYMDSYIFGEPVNPKAMVTLNTDRRSARLIRRQIERKAKRLKKLTYIVKSIGVSKENLDAIKDSDVIALRAKAISEKLTLPELIKVFSHIVKNRGYKGDLKRAEGDVGSKIKETKSMLGDKTLGQLLYEKREAAENNTPWRKLNQDGTFITRDIIEDEFEKIWQKQINHHEELKGNYQITYKEMFTNHAGKDEVLLKDAFFSAMFYQRPIKWKPETVGFCSLEEDEYRSAVAQPVFQKYRLAANIANLRVKTLGSKEECSLTEDEIKKIYDFVCENFKLYNDRAKISYKLIYEKLGFRDNEKFTIDRAKGDAAKDAGLKGITTLQAFYNCDKEDFKFINAFNSLSEKVQELAMEFLANITKYADIQENEDGYIDLKFPELTKNVKNKTEEDNQKAIMFIKMLRKEEIFYNNKFDLEQGRASYSIKALNRIIPELLKSENEQNIINKLYPPKSESQENPVLRDYEKVATNNPVIDKVLREFKRTMDFIVKKFDGNPAEMTIELTRELKNSLAKRSYIEKQNQIAQDDRTKAINELKSHNIYLSGENIEKYLLRQEQDNHCPYCGQTLSIGDIVNNTQIDHIIPQAIGGPNIFSNKILAHTKCNHDKGNKIPYEYKFQKDIEDYIAFLQEKKKSKKAGKDEKIDFRKDSSLINLVKSLWQKYTKESKGYYDKRKRKWTATQKGKRLLDKINFILTKPDEIKDIIGEFSNLHLNSTAWINKIIMDWSKDICPKVTPSFGALTAYLRSKWNFSEILPLVRISEGKKLFDENDKEIDSKKWQELWIKHDLSLSNTKTLMENFEDYINDLEESDKPINDTDKQEQFKKICQDLRQENKFNKRCDHRHHAVDAAIIGLSTLSLIQQASQHNAKYGGLYEVKNDKGEVEIPHFEIKKEDALLYKIIKEKALKYLTNFVVWHKPDHFPSGAFFKDFAYDAVKILKGDENERFVKKYFLSDILGKETNLDKLIKKLNVFVEGNTLKQEIIKQLQERTRKGLSLKDAFLGENENDGIFYRGHKVKKLRGIYQESYYKEERDKKITLVNKKGQKIGNKYYMNDGFACMDFDAENRKRINIIPIATYYRDYFNKPIPNNIIRIFIGDILFDKKNNNFYKVQSFKFRDGLHCILHSEVNDDGRDVNSLKDMLLIKTRSDIAKIKNGK

SEQ ID NO: 15039 - protein, 1460 aa, unidentified
  REGION 1..1460: note = Cas Enzyme sequence
MKRILGLDLGSNSIGWALVQQNFENKQGKIIAAGSRIIPMDQKMLSNFEEGTTVSQTAERTAYRSTRRLRERHLLRRERLHRVLHILGFLPPHYDSQIDFSKRYGKFIDDAEPKIAYNKGNFIFMDSFNEMIEDFRKHQPQLFYKKSNGEESKIPYDWTIYYLRKKALSQKITQQELAWLILHFNQKRGYYQLRGEEETEGNDMEIISSKVLSVIKKNKDKKYDKYWYDITLENGLVYNAAFYNDLVYSWIGQEREFVVKRTLLKNGDEKIELSYLPTFDEIAKMDKKQQDKFYQKIKVKTESSIGNKTVGAYIYDHLLQNPNQKIKGKLVRTIERKYYKNELKAILAKQIALQSELFTENLLADCIRELYRKNQTQQQNLLSKDFLHLFVEDIIFYQRPLRSKKSTIANCPLEKRSYIDKETNERKDVPIKVCAKSNPYYQEFRVLQWLQNLRIYEIETGREVTAEFIETAQDYEALFNFLMSQKEIDNEGLLKYFLLTKNPQIKDKAAKSELKKWLTTYRWNYVYDAADNSSKKYPMNETGYDLQRYLQKVEGLPVNFLTFDITYQLWHLLYSVKDKVEFEKALKKFAQKYQLDEASFVDSFKDFKPYPNEYGSFSEKAIKKMLPLMRFGKHWNFKNIDVHTQKRIDDLINGVANEDIRTIIREKAEKYQLNSETCFQGLPLWLAQYIVYNRYAEATNIEKWTSVSDLETYLEDFKQHSLRNPIVEQVVTETLRVVRDIWQQYGGGQANFFDEIHIELGRELKNTSKEREKLSKQNQENENTNLRIKKLLAELKEDANIQNVRPYSLVQQELLKIYEEGVFSSTDEIEEDIQKIHKKAEPTTPEIQRYKLWLEQKYKSPYTGEVISLTKLFTEEYEIEHIIPQSRYYDDSLSNKVICESAVNKLKTNQLGLEFIQNHHGEKVRIAGNKEVTIFTEEQYKEFVKKYYANNLAKQQKLLLNEIPEKMVARQMNDTRYISKYVSEILSKIVRSDKKDEGVNSKNVIPCTGKITTALKQDWGLNDVWNDLILPRFERMNQLTQTQLFTSYNDRLQKNLPTVPIKYSQGFQKKRIDHRHHAMDALVIACVTREHINYMNNQHALDKSKDKKEKQQSRIDLRTILCEKKNNNWQFKKPWRTFTQEAKEALEHIVVSFKQNLRVINKATNYYEKWEEKNGVLVKKKVKQEGTNWAIRKPLHEETFSGKISLNREKVGKGNILTATRKAVDSSFDVKKISKITDTGIQKILLNYLKYKGSSEVAFSAEGLEELNKNIAQYNDGKKHQPIYKVRIYEKGSGRFVLGEKGTKSKKYVQGAPNLYFGVYQGKEKRTYATIPLNEVIERQKQGLPSVPEHNEKGEPLLFSLSPNDLVYVPMEGEATEAIDFSNLSKEQKERIYKTVSFTGNECHFVKSTIASLIKSYDAKSKIGELGSLNKLEVTISGDSRIKEVCIKLKVDRLGNITKA

SEQ ID NO: 15040 - protein, 1450 aa, unidentified
  REGION 1..1450: note = Cas Enzyme sequence
MKRILGLDLGSNSIGWALVQQNFENKQGQIMAAGSRIIPMDQGVLGDFEKGNTVSQTAERTAYRSTRRLRERHLLRRERLHRVLHILGFLPSHYDLQIDFSKRYGKFIDDAEPKIAYNKGNFIFMNSFNEMIEDFRNYQPQLFYKKSNGEESKIPYDWTIYYLRKKALSQKITQQELAWLILHFNQKRGYYQLRGEEETENPNKEVAFHSLKVVDVEAEAPNKKGEIWYTIRLENGWIYRRTSKISLEDWKGKTRDFIVTTDLNDDGTVKVDKEGKEKRSFRAPDENDWNLLKKKTEYDIDFSAKTVGAYIYDHLLQNPNQKIKGKLVRTIERKYYKDELKAILAQQIALQPELFTENLLADCIRELYRKNETQQQTLLSKDFLHLFVEDIIFYQRPLRSQKSTIANCALEKRSYIDKETNERKDAPIKVCAKSNPYYQEFRVLQWLQNLRIYEIETDREVTSEFIETAEDYEALFNFLMSQKEIDNESLLKYFLLAKNPQIKDKVAKSELKKWLTTYRWNYVYDVADNSSKKYPMNETGYDLQRYLQKVEGLPANFLTFDITYQLWHLLYSVKDKVEFEKALKKFANKNQLDEISFVESFKNFKPYPNEYGSFSEKAIKKLLPLMRFGKYSNFKNIDVSTQKRIDDLINGVANEDIRTIIREKAEKYQLNSETCFQGLPLWLAQYIVYNRHVEATNIEKWTSVSDLEAYLEDFKQYSLRNPIVEKVVTETLRVVRDIWQQYGGGQANFFDEIHIELGRELKNTSKERERLSKQNQENENTNLRIKKLLAELKEDANIQNVRPYSLVQQELLKIYEEGVFSSTDEIEEDIQKIRKKAEPTTPEIQRYKLWLEQKYKSPYTGEVISLTKLFTEEYEIEHIIPQSRYYDDSLSNKVICESAVNKLKTNQLGLEFIQNHHGEKVRIAGNKEVTIFTEEQYKEFVKKYYANNLPKQQKLLLNDIPEKMVARQMNDTRYISKYVSEILSKIVRSDEKDEGVNSKNIIPCTGKITTALKQDWGLNDVWNELILPRFERMNQLTQTQLFTSYNDRLQKNLPTVPIEYSQGFQKKRIDHRHHAMDALVIACATREHINYMNNQHALDKSKDKKEKQQSRIDLRTILCEKKNNNWQFKKPWRTFTQEAKEALEHIVVSFKQNLRVINKATNYYEKWEEKNGVLVKKKVKQEGTNWAIRKPLHKETVSGKIVLDRKIGKDKILTATRKTVDITFTEKIISSITDTGIQKILLNYLKYKGSPEVAFSAEGLEELNKNIAQYNDGKKHQPIYKVRIFEEGSKFPLGETGAKVTKYVEAAKGTNLFFGVYQGKGKRTYATIPLNGVIERQKQGLPSVPEHNEKGEPLLFSLSPNDLVYVPMVGEATDTIDFSNLSKEQKERIYKTVSFTGNQCFFVQEAVAFPIVNKMEYSPLNKMERDILGIMIKEVCIKLKVDRLGNITKA

SEQ ID NO: 15041 - protein, 1453 aa, unidentified
  REGION 1..1453: note = Cas Enzyme sequence
MKRILGLDLGSNSIGWALVQQNFENKQGQIMAAGSRIIPMDQSILGDFEKGNTVSQTAERTAYRSTRRLRERHLLRRERLHRVLHILGFLPPHYDSQIDFSKRYGKFIDDAEPKIAYNKGNFIFMDSFNEMIEDFRKHQPQLFYKKSNGEESKIPYDWTIYYLRKKALSQKITQQELAWLILHFNQKRGYYQLRGEEETEGNDVEIISSKVLSVIKKDKDKKYDKYWYDITLENGLVYKAAFYNDLVYSWIGQEREFVVKRTLLKNGDEKIELSYLPTFDEIAKMDKKQQDKFYQKIKVKTESSIGNKTVGTYIYDHLLQNPNQKIKGKLVRTIERKYYKDELKAILAKQIALQPEFFTENLLADCIRELYRKNETQQQNLLSKDFLHLFVEDIIFYQRPLRSKKSTIANCLLEKRSYIDKETNEHKDAYIKVCAKSNPYYQEFRVLQWLQNLRIYEIETDREVTAEFIETAQDYEALFNFLMSQKEIDNEGLLKYFLLAKNPQIKDKVAKGELRKWITTYRWNYVYDAADNSSKKYPMNETGYELQRYLQKVEGLPANFLTFDITYQLWHLLYSVKDKVEFEKALKKFANKNQLDETSFVESFKNFKPYPNEYGSFSEKAIKKMLPLMRFGNHWDFSCIDVSTQKRIDDLINGVANDEIRTIIREKVEKFQLNNEISFQGLPLWLAQYVVYNRHAEATNIEKWTSVSDLEAYLEDFKQYSLRNPIVEQVVTETLRVVRDIWQQYGEGQANFFDEIHIELGRELKNTAEERYRASKQNQENENTNLRIKKLLAELKEDASIQNVRPYSLVQHDLLKIYEEGVFSSTDEIDEDIQKIRKKAEPNKTELQRYKLWLEQKYRSPYTGEVISLTRLFTEEYEIEHIIPQSRYYDDSLSNKVICESAVNKLKTNQLGLEFIQNHHGEKVRIAGNKEVNIFTEEQYKEFVKKYYANNLAKQQKLLLNEIPEKMVARQLNDTRYISKYISEILSKIVRSDEKDEGVNSKNVIPCTGKITTALKQDWGLNDVWNELILPRFERMNQLTQTQLFTSYNDRLQKNLPTVPIEYSQGFQKKRIDHRHHAMDALVIACATREHINYMNNQHALDKSKDKKEKQQSRIDLRTILCEKKNNNWQFKKPWGTFTQEAKEALEHIVVSFKQNLRVINKATNYYEKWEEKNGVLVKKKVKQEGTNWAIRKPLHKETVSGKIVLDRKIGKDKILTAIRKAVDITFTEKIISSITDTGIQKILLNYLKYKGSPEVAFSAEGLEELNKNIAQYNNGKKHQPIYKVRIFEEGSKFPLGETGAKVTKYVEAAKGTNLFFGVYQGKGKRTYATIPLNGVIERQKQGLPSVPEHNEKGEPLLFSLSPNDLVYVPMVGEATDTIDFSNLSKEQKERIYKTVSFTGNQCFFVQEAVAFPIVNKMEYSPLNKMERDILGIMIKEVCIKLKVDRLGNITKA

SEQ ID NO: 15042 - protein, 1504 aa, unidentified
  REGION 1..1504: note = Cas Enzyme sequence
MKNILGLDLGTNSIGWAVVNGSVNDNGSEQLVKIQASGSRIIPMDAAMIGDFNKGNSISQTAERTRLRGIRRLSERYLLRRERLHRILDILGFLPSHFAQDLDRHGKIVKGKEPKLAWRKNEAGQFEFIFQDSFKEMLEDFKLNHPNLITDDKKVPYDWTIYYLRKKGLTSKISKEELAWILLNFNQKRGYYQLRGEEEEENNNKLVEFYALKVVAVEDSGEKKGKDIWYNVHLENGWVYRRTSNMPLDWVGKTKEFIVTTDLEKDGTPKKDKEGNVKRSFRAPKEDDWSLVKKKTEADIDQTHKTVGTYIYDTLLGNPSQKIRGRLVRTIERKYYKEELKLILDKQKEFHPELQDRALYAACVEELYTINEAHRNNIGNRDFTYLFLEDILFYQRPLKSKKSLIDNCPYEENHCLDKETGEIKSFPVKCIAKSHPLFQEFRLWQFIVNLRIYRKGLAQDVDVTNELLKTEEDYVALFDWLNGKKEIDQKAFLKYPLFGLKKEVENYRWNYVQDKPYPCNETRSSMLARLEKCDISIEFLTKENEEALWHILYSVEDKNEIVKALQKFADKHDLNASFVDVFRKFPPFKKEYGSYSAKAIKKLLPLMRMGKYWSENSIDKGTRERIDKIITGEYDEKIENRVREKAIHLADVSDFRGLPLWLVCYIVYGRHSEAKEITQWKSPADIDSYLKSFKQHSLRNPIVEQIIIETLRVVRDIWKQVGNIDEIHVELGREMKNPADKRKKMTQQMSENENTNLRIKYLLTEFLNPEYEVENVRPYSPSQQDILRIYEEGVLNSVSDLPEEISDILKKFTETDLKKRPSRSEVLRYKLWLEQKYRSPYTGEVIPLGKLFTPAYEIEHVIPQSCYFDDSFSNKVICEAEVNKLKSNLLGHEFIVKHHGEIVELPFGKKVRIFTVDEYEQFVKDNYSRTRGKMKKLLMDDIPEEFVTRQLNDSRYISKVVKSLLSNIVREKGEEEAISKNVIPCTGGVTDRLKKDWGINEVWNKIILPRFQRLNELTGTNKFTTKNVGIQEIPTMPLELQKGFNKKRIDHRHHAMDAIIIACANRNIINYLNNESATAKAELSRYDLQKMLCDKAKTDNNGNYKWVIRKPWASFTQDTYLALENIIVSFKQNLRVINKATNHFLHYNEEGKKIFVKQGKGDNWAIRKSMHKDTVFGKVNLRRIKTVALNEAMKNPQSIVVKDFKRKLLELWNLGFDAKRIKKYFEDNRETWSDINLSKIEVYYFSKDTKDRFFATRKPLDTSFDRKKIENNITDTGIQKILLRHLELKDNNPDIAFSPDGIDEMNRNIIQLNNGKYHQPIIKVRWYEQADKFAVGQTGNKSSKFVEAAKGTNLFFAVYESNILDKKTNTIIKKRNYATIPLNVAIERQKQGLSVAPEDENGNDPIFVLSPNDLVYLPTDDELANGIIAQPLDRGRIYKMVSCTGNEGHFIPARIANPILQTIELGSNNKAQKAWTDEMIKEICMPIKVDRLGNVLESSSSYKK

SEQ ID NO: 15043 - protein, 1034 aa, unidentified
  REGION 1..1034: note = Cas Enzyme sequence
  REGION 1000..1003: note = misc_feature - Xaa can be any naturally occurring amino acid
VQNGFLGITVSSEQVGWAVTNPKYELERASRKDLWGVRLFDKAETAEDRRMFRTNRRLNQRKKNRIHYLRDIFHEEVNQKDPNFFQQLDESNFCEDDRTVEFNFDTNLYKNQFPTVYHLRKYLMETKDKPDIRLVYLAFSKFMKNRGHFLYKGNLGEVMDFENSMKGFCESLEKFNIDFPTLSDEQVKEVRDILCDHKIAKTVKKKNIITITKVKSKTAKAWIGLFCGCSVPVKVLFQDIDEEIVTDPEKISFEDASYDDYIANIEKGVGIYYEAIVSAKMLFDWSIMNEILGDHQLLSDAMIAEYNKHHDDLKRLQKIIKGTGSRELYQDIFINDVSGNYVCYVGHAKTMSSADQKQFYTFLKNRLKNVNGISSEDAEWIDTEIKNGTLLPKQTKRDNSVIPHQLQLREFELILDNMQEMYPFLKENREKLLKIFNFVIPYYVGPLKGVVRKGESTNWMVPKKDGVIHPWNFDEMVDKEASAECFISRMTGNCSYLFNEKVLPKNSLLYETFEVLNELNPLKINGEPISVELKQRIYEQLFLTGKKVTKKSLTKYLIKNGYDEDIELSGIDNEFHSNLKSHIDFEDYDNLSDEEVERIILRITVFEDKQLLKDYLNREFVKLSEDERKQICSLSYKGWGNLSEMLLNGITVTDSNGVEVSVMDMLWNTNLNLMQILSKKYGYKAEIERYNKEHEKNIYNREDLMDYLNIPPAQRRKVNQLITIVKSLKKRCGVPNKIFFKVSREHQDDPKRTSSRKEQLKYLYKSLKSEDEKHLMKELDELNGHELSNDKVYLYFLQKGRCIYSGKKLNLSRLRKSNYQNDIDYIYPLSAVNDRSMNNKVLTGIQENRADKYTYFPVDPEIQKKMKGFWMELVLQGFMSKEKYFRLSRENDFSENELVSFIEREISDNQQSGRMIASVLQYYFPESKIVFVKEKLISSFKRDFHLISSYGHNHLQAAKDAYITIVVGNVYHTKFTMDPAIYFKNHKRKDYDLNRLFLEXXXXLHGKVVHMGQFRRFEKNMLKTILLLQKESWK

SEQ ID NO: 15044 - protein, 1312 aa, unidentified
  REGION 1..1312: note = Cas Enzyme sequence
VQNGFLGITVSSEQVGWAVTNPKYELERASRKDLWGVRLFDKAETAEDRRMFRTNRRLNQRKKNRIHYLRDIFHEEVNQKDPNFFQQLDESNFCEDDRTVEFNFDTNLYKNQFPTVYHLRKYLMETKDKPDIRLVYLAFSKFMKNRGHFLYKGNLGEVMDFENSMKGFCESLEKFNIDFPTLSDEQVKEVRDILCDHKIAKTVKKKNIITITKVKSKTAKAWIGLFCGCSVPVKVLFQDIDEEIVTDPEKISFEDASYDDYIANIEKGVGIYYEAIVSAKMLFDWSIMNEILGDHQLLSDAMIAEYNKHHDDLKRLQKIIKGTGSRELYQDIFINDVSGNYVCYVGHAKTMSSADQKQFYTFLKNRLKNVNGISSEDAEWIDTEIKNGTLLPKQTKRDNSVIPHQLQLREFELILDNMQEMYPFLKENREKLLKIFNFVIPYYVGPLKGVVRKGESTNWMVPKKDGVIHPWNFDEMVDKEASAECFISRMTGNCSYLFNEKVLPKNSLLYETFEVLNELNPLKINGEPISVELKQRIYEQLFLTGKKVTKKSLTKYLIKNGYDEDIELSGIDNEFHSNLKSHIDFEDYDNLSDEEVERIILRITVFEDKQLLKDYLNREFVKLSEDERKQICSLSYKGWGNLSEMLLNGITVTDSNGVEVSVMDMLWNTNLNLMQILSKKYGYKAEIERYNKEHEKNIYNREDLMDYLNIPPAQRRKVNQLITIVKSLKKRCGVPNKIFFKVSREHQDDPKRTSSRKEQLKYLYKSLKSEDEKHLMKELDELNGHELSNDKVYLYFLQKGRCIYSGKKLNLSRLRKSNYQNDIDYIYPLSAVNDRSMNNKVLTGIQENRADKYTYFPVDPEIQKKMKGFWMELVLQGFMSKEKYFRLSRENDFSENELVSFIEREISDNQQSGRMIASVLQYYFPESKIVFVKEKLISSFKRDFHLISSYGHNHLQAAKDAYITIVVGNVYHTKFTMDPAIYFKNHKRKDYDLNRLFLENISRDGQIAWESGPYGSIQTVRKEYAQNHIAVTKRVVEVKGGLFKQMPLKKGHGEYPLKTNDPRFGNIAQYGGYTNVTGSYFVLVESMEKGKKRISLEYVPVYLHERLEDDPGHKLLKEYLVDHRKLNHPKILLAKVRKNSLLKIDGFYYRLNGRSGNALILTNAVELIMDDWQTKTANKISGYMKRRAIDKKARVYQNEFHIQELEQLYDFYLDKLENGVYKNRKNNQAELIHNEKEQFMELKTEDQCVLLTEIKKLFVCSPMQADLTLIGGSKHTGMIAMSSNVTKADFSIIAEDPLGLRNKVIYSHMGEK

SEQ ID NO: 15045 - protein, 1312 aa, unidentified
  REGION 1..1312: note = Cas Enzyme sequence
VQNGFLGITVSSEQVGWAVTNPKYELERASRKDLWGVRLFDKAETAEDRRMFRTNRRLNQRKKNRIHYLRDIFHEEVNQKDPNFFQQLDESNFCEDDRTVEFNFDTNLYKNQFPTVYHLRKYLMETKDKPDIRLVYLAFSKFMKNRGHFLYKGNLGEVMDFENSMKGFCESLEKFNIDFPTLSDEQVKEVRDILCDHKIAKTVKKKNIITITKVKSKTAKAWIGLFCGCSVPVKVLFQDIDEEIVTDPEKISFEDASYDDYIANIEKGVGIYYEAIVSAKMLFDWSILNEILGDHQLLSDAMIAEYNKHHDDLKRLQKIIKGTGSRELYQDIFINDVSGNYVCYVGHAKTMSSADQKQFYTFLKNRLKNVNGISSEDAEWIDTEIKNGTLLPKQTKRDNSVIPHQLQLREFELILDNMQEMYPFLKENREKLLKIFNFVIPYYVGPLKGVVRKGESTNWMVPKKDGVIHPWNFDEMVDKEASAECFISRMTGNCSYLFNEKVLPKNSLLYETFEVLNELNPLKINGEPISVELKQRIYEQLFLTGKKVTKKSLTKYLIKNGYDKDIELSGIDNEFHSNLKSHIDFEDYDNLSDEEVERIILRITVFEDKQLLKDYLNREFVKLSEDERKQICSLSYKGWGNLSEMLLNGITVTDSNGVEVSVMDMLWNTNLNLMQILSKKYGYKAEIERYNKEHEKNIYNREDLMDYLNIPPAQRRKVNQLITIVKSLKKRCGVPNKIFFKVSREHQDDPKRTSSRKEQLKYLYKSLKSEDEKHLMKELDELNGHELSNDKVYLYFLQKGRCIYSGKKLNLSRLRKSNYQNDIDYIYPLSAVNDRSMNNKVLTGIQENRADKYTYFPVDPEIQKKMKGFWMELVLQGFMSKEKYFRLSRENDFSENELVSFIEREISDNQQSGRMIASVLQYYFPESKIVFVKEKLIPSFKRDFHLISSYGHNHLQAAKDAYITIVVGNVYHTKFTMDPAIYFKNHKRKDYDLNRLFLENISRDGQIAWESGPYGSIQTVRKEYAQNHIAVTKRVVEVKGGLFKQMPLKKGHGEYPLKTNDPRFGNIAQYGGYTNVTGSYFVLVESMEKGEKRISLEYVPVYLHERLEDDPGHKLLKEYLVDHRKLNHPKILLAKVRKNSLLKIDGFYYRLNGRSGNALILTNAVEVIMDDWQTKTANKISGYMKRRAIDKKARVYQNEFHIQELEQLYDFYLDKLENGVYKNRKNNQAELIHNEKEQFMELKTEDQCVLLTEIKKLFVCSPMQADLTLIGGSKHTGMIAMSSNVTKADFAVIAEDPLGLRNKVIYSHKGEK

SEQ ID NO: 15046 - protein, 1101 aa, unidentified
  REGION 1..1101: note = Cas Enzyme sequence
MTKIKDDLRYRVGIDVGLKSIGFCAVEVDENDQPLRLLNSMVFIHDAGVDPNENKAAKSRKLTAGVARRTQRRTAQNKRRLAELDRVLSEELHWPLPNLEDFEDPYEPWRTRAELVEHYIKDDAERAEALAIAIRHIARHRGWRNPYLSVDSLLTPQEPSEFLRGLNERVTQALGCEFPADATPGQLICAYIDSPKYAETQGIRGDDGILNGRLHQFDNVGEIRKICEVQRLDHDVFKLLVRKVFFAKSPRGSAAGLVGHDQIPGQGKYIRAEKAHPDFQLFRMVAVLTNLRIREGKAERCLTPDELRGLVDYILEVQLKQQVTWADLADNLGIERSDLRGTARASFDGSPALRFPPTDVTAEKIMASKVKWLKDWWDKADSERRGFMVDALSNSGGSTGDNDIDDEVAELLEAATEDEQAELEKIQLPQGRAAYSLDSLRRLTKRMLEEGVDLHTARKEEFNVDDDWRPEPEPIEAPVGNPAVDRVLKQVSRWLRMTTDRWGEPAVINIEHTRDGLGSEKVARELLREGQRRQDLNQKNLVEIAQQLGIPVKDKRSALIKYAAIQRQNSMCLYCGAEIGFTTAEMDHIVPRALSGSTNDRSNLAAVCRACNHQKGAVPFAVWATSGEAHAGVSLEDAIKRVGLWQKGPGMSPKQHKAFQREVIARLNSRKPDEEFDGRSMESVAWMAVELRTRIDGYYRKLNSDSVPKIGIYRGQLTAEARKASGFENRVNLIGGKGKTRFDRRHHAMDALVIAMMNQSVSQTLALRVNMRESQRITGQEETWKNFYGKPGQANERFEKWREGMLRAVELFNIELAKNAIPFHENVRLCVGSSKAHGDKIRKFIHAKLGEALSVALIDRAETPALWTALTRLPDFDPKDGLPEDPSREIYIHGRKITADEQLNFFGTSSACIAVRNGYAMLETALHHVRIYRIEGKKTSYAMVRVFAADLYRMTHQDVFTLPLKESAISVRTSSSTIRKALREGNATQIGWLVRGDELQIENAEFKKGDIAVFSAKYPQVTAWTVDGFEDTTRINLRPLMLSGEGIADDEEPEVVKIIEKSWRVSLDLLLSGSNVSVIRRNALGEVRMKGSSLPVSMRLK

SEQ ID NO: 15047 - protein, 1156 aa, unidentified
  REGION 1..1156: note = Cas Enzyme sequence
MKYRLGLDLGVGSIGSAVIELDNENNAKDIIDAGVRIFEVSEGAEERRLKRTARKNLVRTKKRLELLAKKLFENGLWPNENPEGTDKLKSKSPYKIRTDALNEKLASPYYVGRAILHIAKHRGAGFVSASEETEEEILEEGEKSKAKKSSYDMMQHHLKETNSRTIGEFFYNKIISGKGNDKTVRQKKYAIEKNIVDYAIPRYLVKDEFNKIWDKQAEFYPQMKKENLKKEIYDILFYERPAAPYATGKCIYFREEDRLLKAHPLSEMRRIYEEVNNIRILNDMNKRKLTLEERDSIVNELLLKGQNAGKQAIKKLLNLSAQHKISLVDDRVIKAYLYSRPEFANNEHLRNMNENELSSFIEFLAEPKMSKDKNARLYNEDALIEYLKPILKIDDEKEIGNLLTKLPKGREMLGISATKIILEKLKEDVVTHREITDKLAETDKRFMAEEEIARQNQGKCFQLPYYGEILQTDTAPLPPLMINNNKSLNPDEIKWGKIANPAVHMILNQIRQVVNEIIKIYGKPYDINIELGRDVGMSTKKKKEFENRQKQNEKLNEEAKNYLKEHKIAINNKNILKYKLAKEQGWKDAYNPTQNISSVFTGMEIEHIIPQAKGGTDTYNNLCLVNCNDNLNKSDRYAYEYFEETKTQEEIREILKNARSRTPEKSWRFEADAREKYEESGDKEESTRYLTDTRYVAKMAQRYLRAIVDCSDCDEVMQTRILAVKGGQTAKLRQHWNLYGLEYDLMGLDIPRYVDCSPYWLELNTGEIIEGINKPDIDGKWKFFDKAKNKEWQPKPRIDHRHHAMDAITVACANRGLIQKMAEENDINKIHYPLPLTSVKSVADFRRKVISCLKDVKVSHKPNHSKAGQFHKETGRTVLCQNPDDPNSLITVYSRKILQVVKSAKDLTKLLIPETIKNEWHEDIAEHKVKQAKLVQDFELYMNTAEQILIAENEQGMAEGKKEIKITEGRILLKAFRIIQDKGLWKGDKFRCYSNSSSMINIPKHGVAYEAQNNHCVDFYQKNGKIGWEVIKRFDVNQTDFEPQWKKEGGKIIWSVQQGDILELDTPDEWKQYTDKERCLAKVKKFSDGKIAIDFITDARMTSPKNKELKYMFVNTISDKGLTYLINHKTRKVELTPFGKIKKKHKVLWNGTKTAA

SEQ ID NO: 15048 - protein, 1156 aa, unidentified
  REGION 1..1156: note = Cas Enzyme sequence
MKYRLGLDLGVGSIGSAVIELDNENNAKDIIDAGVRIFEVSEGAEERRLKRTARKNLVRTKKRLELLAKKLFENGLWPNENPEGTDKLKSKSPYKIRTDALNEKLASPYYVGRAILHIAKHRGAGFVSASEETEEEILEEGEKSKAKKSSYDMMQHHLKETNSRTIGEFFYNKIISGKGNDKTVRQKKYAIEKNIVDYAIPRYLVKDEFNKIWDKQAEFYPQMKKENLKKEIYDILFYERPAAPYATGKCIYFREEDRLLKAHPLSEMRRIYEEVNNIRILNDMNKRKLTLEERDSIVNKLLLKGQNAGKQAIKKLLNLSAQHKISLVDDRVIKAYLYSRPEFANNKHLQNMNENELSSFIEFLAEPKMSKDKNARLYNEDALIEYLKPILKIDDEKEIGNLLTKLPKGRGMLGISATKIILEKLKEDVVTHREITDKLAETDKRFMAEEEIARQNQGKCFQLPYYGEILQTDTAPLPPLMINNNKSLNPDEIKWGKIANPAVHMILNQIRQVVNEIIKIYGKPYDINIELGRDVGMSTKKKKEFENRQKQNEKLNEEAKNYLKEHKIAINNKNILKYKLAKEQGWKDAYNPTQNISSVFTGMEIEHIIPQAKGGTDTYNNLCLVNCNDNLNKSDRYAYEYFEETKTQEEIREILKNARSRTPEKSWRFEADAREKYEESGDKEESTRYLTDTRYVAKMAQRYLRAIVDCSDCDEVMQTRILAVKGGQTAKLRQHWNLYGLEYDLMGLDIPRYVDCSPYWLELNTGEIIEGINKPDIDGKWKFFDKAKNKEWQPKPRIDHRHHAMDAITVACANRGLIQKMAEENDINKIHYPLPLTSVKSVADFRRKVISCLKDVKVSHKPNHSKAGQFHKETGRTVLCQNPDDPNSLITVYSRKILQVVKSAKDLTKLLIPETIKNEWHEDIAEHKAKQAKLVQDFELYMNTAEQILIAENEQGMAEGKKEIKITEGRILLKAFRIIQDKGLWKGDKFRCYSNSSSMINIPKHGVAYEAQNNHCVDFYQKNGKIGWEVIKRFDANQADFEPQWQKEGGKIIWSVQQGDILELDTPDEWKQYTDKERCLAKVKKFSDGAVTIDFVSDARMTSPKDKNLQYMFVDSLVNRGLSYFTNNKARKIELTPFGKIKKKHKVLWNGTKTAA

SEQ ID NO: 15049 - protein, 1156 aa, unidentified; identical to SEQ ID NO: 15048
  REGION 1..1156: note = Cas Enzyme sequence

SEQ ID NO: 15050 - protein, 1156 aa, unidentified
  REGION 1..1156: note = Cas Enzyme sequence
MKYRLGLDLGVGSIGSAVIELDNENNAKDIIDAGVRIFEISEGAEERRLKRTARKNLVRTKKRLELLAKKLFENGLWPNENPEGTDKLKSKSPYKIRTDALNEKLASPYYVGRAILHIAKHRGAGFVSASEETEEEILEEGEKSKAKKSSYDMLPHHLKETNSRTIGEFFYNKIISGKGNDKTVRQKKYAIEKNIVDYAIPRYLVKDEFNKIWDKQTEFYPQMKKENLKKEIYDILFYERPAAPYATGKCIYFREEDRLLKAHPLSEMRRIYEEVNNIRILNDMNKRKLTLEERDSIVNKLLLKGQNAGKQAIKKLLNLSAQHKISLVDDRVIKAYLYSRPEFANNEHLRNMNENELSSFIEFLAEPKMSKDKNARLYNEDALIEYLKPILKIDDEKEIGNLLTKLPKGRGMLGISATKIILEKLKEDVVTHREITDKLAETDKRFMAEEEIARQNQGKCFQLPYYGEILQTDTAPLPPLMINNNKSLNPDEIKWGKIANPAVHMILNQIRLVVNEIIKIYGKPYDINIELGRDVGMSTKKKKEFENRQKQNEKLNEEAKNYLKEHKIAINNKNILKYKLAKEQGWKDAYNPTQNISSVFTGMEIEHIIPQAKGGTDTYNNLCLVNRNDNLNKSDRYAYEYFEETKTQEEIREILKNARSRTPEKSWRFEADAREKYEESGDKEESTRYLTDTRYVAKMAQRYLRAIVDCSDCDKVMQTRILAVKGGQTAKLRQHWNLYGLEYDLMGLDIPRYVICPPYWLELDTGEIIEGINKPDIDGKWKFFDKAKNKEWQPKPRIDHRHHAMDAITVACANRGLIQKMAEENDINKIHYPLPLTSVKSVADFRRKVISCLKDVKVSHKPNHSKAGQFHKETGRTVLCQNPDDPNSLITVYSRKILQVVKSAKDLTKLLIPETIKNEWHEDIAEHKAKQAKLVQDFELYMNTAEQILIAENEQGMAEGKKEIKITEGRILLKAFRIIQDKGLWKGDKFRCYSNSSSMINIPKHGVAYEAQNNHCVDFYQKNGKIGWEVIKRFDVNQTDFEPQWKKEGGKIIWSVQQGDILELDTPDEWKQYTDKERCLAKVKKFSDGKIAIDFITDARMTSPKNKELKYMFVNTISDKGLTYLINHKTRKVELTPFGKIKKKHKVLWNGTKTAA

SEQ ID NO: 15051 - protein, 1156 aa, unidentified
  REGION 1..1156: note = Cas Enzyme sequence
MKYRLGLDLGVGSIGSAVIELDNKNNAKDIIDAGVRIFEVSEGAEERRLKRTARKNLVRTKKRLELLAKKLFENGLWPNENPEGTDKLKSKSPYKIRTDALNEKLASPYYVGRAVLHIAKHRGAGFVSAIEETEEEILEEGEKSKAKKSSYDMMLHHLKETNSRTIGEFFYNKIISGKGNDKTVRQKKYAIEKNIVDYAIPRYFVKDEFNKIWDKQAEFYPQMKKENLKKEIYDILFYERPAAPYATGKCIYFREEDRLLKAHPLSEMRRIYEEVNNIRILNDMNKRKLTLEERDSIVNELLLKGQNAGKQAIKKLLNLSAQHKISLVDDRVIKAYLYSRPEFANNEHLQNMNENELSSFIEFLAEPKMSKDKNARLYNEDALIEYLKPILKIDDEKEIGNLLTKLPKGRGMLGISATKIILEKLKEDVLTHREITDKLAETDKRFMAEEEIARQNQGKCFQLPYYGEILQTDTAPLPPLMINNNKSLNPDEIRWGKIANPAVHMILNQIRLVVNEIIKIYGKPYDINIELGRDVGMSTKKKKEFENQQKQNEKLNEEAKNYLKEHKIAINNKNILKYKLAKEQGWKDAYNPTQNISSIFTGMEIEHIIPQAKGGTDTYNNLCLVNSNDNLNKGNRYAYEYFEETKTQEEIREILKNARSRTPQKSWRFEADAREKYEESGDKEESTRYLTDTRYVAKMAQRYLRAIVDCSDCDEVMQTRILAVKGGQTAKLRQHWNLYGLEYDLMGLDIPRYVNCPPYWLELDTGEIIEGINKPDIDGKWKFFDKAKNKEWQPKPRIDHRHHAMDAITVACANRGLIQKMAEENDINKIHYPLPLTSVESLADFRRKVISCLKDIKVSHKPNHSKAGQFHKETGRTVLCQNPDDPNSLITVYSRKILQVVKSAKDLTKLLIPETIKNEWHEDIAEHKAKQAKLVQDFELYMNTAEQILIAENEQGVAEGKKEIKITEGRILLKAFRIIQDKGLWKGDKFRCYENNSSLVYIKKHGVAYEGRNNHCVDFYQKNGKIGWEVIKRFDANQADFEPQWKKEGGKIIWSVQQGDILELDTPDEWKQYTDKERCLAKVKKFSNGAVTIDFVSDARMTSPKDKNLQYMFVDSLVNRGLSYFTNNKARKIELTPFGKIKKKHKALWNGTKTAA

SEQ ID NO: 15052 - protein, 955 aa, unidentified
  REGION 1..955: note = Cas Enzyme sequence
PRYLVKDEFNKIWDKQAEFYPQMKKENLKKEIYDILFYERPAAPYATGKCIYFREEDRLLKAHPLSEMRRIYEEVNNIRILNDMNKRKLTLEERDSIVNELLLKGQNAGKQAIKKLLNLSAQHKISLVDDRVIKAYLYSRPEFANNEHLQNMNENELSSFIEFLAEPKMSKDKNARLYNEDALIEYLKPILKIDDEKEIGNLLTKLPKGRGMLGISATKIILEKLKEDVLTHREITDKLAETDKRFMAEEEIARQNQGKCFQLPYYGEILQTDTAPLPPLMINNNKSLNPDEIRWGKIANPAVHMILNQIRLVVNEIIKIYGKPYDINIELGRDVGMSTKKKKEFENQQKQNEKLNEEAKNYLKEHKIAINNKNILKYKLAKEQGWKDAYNPTQNISSIFTGMEIEHIIPQAKGGTDTYNNLCLVNSNDNLNKGDRYAYEYFEETKTQEEIREILKNARSRTPQKSWRFEADAREKYEESGDKEESTRYLTDTRYVAKMAQRYLRAIVDCSDCDEVMQTRILAVKGGQTAKLRQHWNLYGLEYDLMGLDIPRYVNCPPYWLELDTGEIIEGINKPDIDGKWKFFDKAKNKEWQPKPRIDHRHHAMDAITVACANRGLIQKMAEENDINKIHYPLPLTSVESLADFRRKVISCLKDIKVSHKPNHSKAGQFHKETGRTVLCQNPDDPNSLITVYSRKILQVVKSAKDLTKLLIPETIKNEWHEDIAEHKAKQAKLVQDFELYMNTAEQILIAENEQGVAEGKKETKITEGRILLKAFRIIQDKGLWKGDKFRCYSNSSSMINIPKHGVAYEAQNNHCIDFYQKNGKIGWEVIKRFDANQADFEPQWKKEGGKIIWSVQQGDILELDTPDEWKQYTDKERCLAKVKKFSEGKFCIDYITDARMTSPKDKTLEYMFVNSLEKGLSYYTSHKARKVELTPFGKIKKKHKVLWNGTKTAA

SEQ ID NO: 15053 - protein, 1156 aa, unidentified
  REGION 1..1156: note = Cas Enzyme sequence
MKYRLGLDLGVGSIGSAVIELDNENNAKDIIDAGVRIFEVSEGAEERRLKRTARKNLVRTKKRLELLAKKLFENGLWPNENPEGTDKLKSKSPYKIRTDALNEKLASPYYVGRAVLHIAKHRGAGFVSASEETEEEILEEGEKSKAKKSSYDMMLHHLKETNSKTIGEFFYNKIISGKGNDKTVRQKKYAIEKNIVDYAIPRYLVKDEFNKIWDKQAEFYPQMKKENLKKEIYDILFYERPAAPYATGKCIYFREEDRLLKAHPLSEMRRIYEEVNNIRILNDMNKRKLTLEERDSIVNELLLKGQNAGKQAIKKLLNLSAQHKISLVDDRVIKAYLYSRPEFANNEHLHNMNENELSSFIEFLAEPKMSKDKNARLYNEDALIEYLKPILKIDDEKEIGNLLTKLPKGRGMLGISATKIILEKLKEDVLTHREITDKLAETDKRFMAEEEIARQNQGKCFQLPYYGEILQTDTAPLPPLMINNNKSLNPDEIRWGKIANPAVHMILNQIRLVVNEIIKIYGKPYDINIELGRDVGMSTKKKKEFENQQKQNEKLNEEAKNYLKEHKIAINNKNILKYKLAKEQGWKDAYNPTQNISSIFTGMEIEHIIPQAKGGTDTYNNLCLVNSNDNLNKGNRYAYEYFEETKTQEEIREILKNARSRTPQKSWRFEADAREKYEESGDKEESTRYLTDTRYVAKMAQRYLRAIVDCSDCDEVMQTRILAVKGGQTAKLRQHWNLYGLEYDLMGLDIPRYVNCPPYWLELDTGEIIEGINKPDIDGKWKFFDKAKNKEWQPKPRIDHRHHAMDAITVACANRGLIQKMAEENDINKIHYPLPLTSVESLADFRRKVISCLKDIKVSHKPNHSKAGQFHKETGRTVLCQNPDDPNSLITVYSRKILQVVKSAKDLTKLLIPETIKNEWHEDIAEHKAKQAKLVQDFELYMNTAEQILIAENEQGVAEGKKEIKITEGRILLKAFRIIQDKGLWKGDKFRCYENNSSLVYIKKHGVAYEGRNNHCVDFYQKNGKIGWEVIKRFDANQADFEPQWKKEGGKIIWSVQQGDILELDTPDEWKQYTDKERCLAKVKKFSNGAVTIDFVSDARMTSPKDKNLQYMFVDSLVNRGLSYFTNNKARKIELTPFGKIKKKHKALWNGTKTAA

SEQ ID NO: 15054 - protein, 1156 aa, unidentified
  REGION 1..1156: note = Cas Enzyme sequence
MKYRLGLDLGVGSIGSAVIELDNENNAKDIIDAGVRIFEVSESAEERRLKRTARKNLVRTKKRLELLAKKLFENGLWPNENPEGTDKLKSKSPYKIRTDALNEKLANPYYVGRAVLHIAKHRGAGFVSASEETEEEILEEGEKSKAKKSSYDMMLHHLKETNSKTIGEFFYNKIISGKGNDKTVRQKKYAIEKNIVDYAIPRYLVKDEFNKIWDKQAEFYPQMKKENLKKEIYDILFYERPAAPYATGKCIYFREEDRLLKAHPLSEMRRIYEEVNNIRILNDMNKRKLTLEERDSIVNELLLKGQNAGKQAIKKLLNLSAQHKISLVDDRVIKAYLYSRPEFANNEHLHNMNENELSSFIEFLAEPKMSKDKNARLYNEDALIEYLKPILKIDDEKEIGNLLTKLPKGRGMLGISATKIILEKLKEDVLTHREITDKLAETDKRFMAEEEIARQNQGKCFQLPYYGEILQTDTAPLPPLMINNNKSLNPDEIRWGKIANPAVHMILNQIRLVVNEIIKIYGKPYDINIELGRDVGMSTKKKKEFENQQKQNEKLNEEAKNYLKEHKIAINNKNILKYKLAKEQGWKDAYNPTQNISSIFTGMEIEHIIPQAKGGTDTYNNLCLVNSNDNSNKGDRYAYEYFEETKTQEEIREILKNARSRTPQKSWRFEADAREKYEESGDKEESTRYLTDTRYVAKMAQRYLRAIVDCSDCDEVMQTRILAVKGGQTAKLRQHWNLYGLEYDLMGLDIPRYVNCPPYWLELDTGEIIEGINKPDIDGKWKFFDKAKNKEWQPKPRIDHRHHAMDAITVACANRGLIQKMAEENDINKIHYPLPLTSVESLADFRRKVISCLKDIKVSHKPNHSKAGQFHKETGRTVLCQNPDDPNSLITVYSRKILQVVKSAKDLTKLLIPETIKNEWHEDIAEHKAKQAKLVQDFELYMNTAEQILIAENEQGVAEGKKEIKITEGRILLKAFRIIQDKGLWKGDKFRCYSNSSSMINIPKHGVAYEAQNNHCIDFYQKNGKIGWEVIKRFDANQADFEPQWKKEGGKIIWSVQQGDILELDTPDEWKQYTDKERCLAKVKKFSDGDLSIDYITDARMTSPKDKNLQYMFVDSKRLRSINAICKANIRKVELTPFGKIKKKHKVLWNGTKTAA

SEQ ID NO: 15055 - protein, 1156 aa, unidentified
  REGION 1..1156: note = Cas Enzyme sequence
MKYRLGLDLGVGSIGSAVIELDNENNAKDIIDAGVRIFEVSEGAEERRLKRTARKNLVRTKKRLELLAKKLFENGLWPNENPEGTDKLKSKSPYKIRTDALNEKLASPYYVGRAVLHIAKHRGAGFVSASEETEEEILEEGEKSKAKKSSYDMMLHHLKETNSKTIGEFFYNKIISGKGNDKTVRQKKYAIEKNIVDYAIPRYLVKDEFNKIWDKQAEFYPQMKKENLKKEIYDILFYERPAAPYATGKCIYFREEDRLLKAHPLSEMRRIYEEVNNIRILNDMNKRKLTLEERDSIVNELLLKGQNAGKQAIKKLLNLSAQHKISLVDDRVIKAYLYSRPEFANNEHLQNMNENELSSFIEFLAEPKMSKDKNARLYNEDALIEYLKPILKIDDEKEIGNLLTKLPKGRGMLGISATKIILEKLKEDVLTHREITDKLAETDKRFMAEEEIARQNQGKCFQLPYYGEILQTDTAPLPPLMINNNKSLNPDEIRWGKIANPAVHMILNQIRLVVNEIIKIYGKPYDINIELGRDVGMSTKKKKEFENQQKQNEKLNEEAKNYLKEHKIAINNKNILKYKLAKEQGWKDAYNPTQNISSIFTGMEIEHIIPQAKGGTDTYNNLCLVNSNDNSNKGDRYAYEYFEETKTQEEIREILKNARSRTPQKSWRFEADAREKYEESGDKEENTRYLTDTRYVAKMAQRYLRAIVDCSDCDEVMQTRILAVKGGQTAKLRQHWNLYGLEYDLMGLDIPRYVNCPPYWLELDTGEIIEGINKPDIDGKWKFFDKAKNKEWQPKPRIDHRHHAMDAITVACANRGLIQKMAEENDINKIHYPLPLTSVESLADFRRKVISCLKDIKVSHKPNHSKAGQFHKETGRTVLCQNPDDPNSLITVYSRKILQVVKSAKDLTKLLIPETIKNEWHEDIAEHKAKQAKLVQDFELYMNTAEQILIAENEQGVAEGKKETKITEGRILLKAFRIIQDKGLWKGDKFRCYSNSSSMINIPKHGVAYEAQNNHCIDFYQKNGKIGWEVIKRFDANQADFEPQWKKEGGKIIWSVQQGDILELDTPDEWKQYTDKERCLAKVKKFSDGDLSIDYITDARMTSPKDKNLQYMFVDSKRLRSINAICKANIRKVELTPFGKIKKKHKVLWNGTKTAA

SEQ ID NO: 15056 - protein, 1156 aa, unidentified
  REGION 1..1156: note = Cas Enzyme sequence
MKYRLGLDLGVGSIGSAVIELDNENNAKDIIDAGVRIFEVSEGAEERRLKRTARKNLVRTKKRLELLAKKLFENGLWPNENPEGTDKLKSKSPYKIRTDALNEKLANPYYVGRAVLHIAKHRGAGFVSASEETEEEILEEGEKSKAKKSSYDMMLHHLKETNSKTIGEFFYNKIISGKGNDKTVRQKKYAIEKNIVDYAIPRYLVKDEFNKIWDKQAEFYPQMKKENLKKEIYDILFYERPAAPYATGKCIYFREEDRLLKAHPLSEMRRIYEEVNNIRILNDMNKRKLTLEERDSIVNELLLKGQNAGKQAIKKLLNLSAQHKISLVDDRVIKAYLYSRPEFANNEHLHNMNENELSSFIEFLAEPKMSKDKNARLYNEDALIEYLKPILKIDDEKEIGNLLTKLPKGRGMLGISATKIILEKLKEDVLTHREITDKLAETDKRFMAEEEIARQNQGKCFQLPYYGEILQTDTAPLPPLMINNNKSLNPDEIRWGKIANPAVHMILNQIRLVVNEIIKIYGKPYDINIELGRDVGMSTKKKKEFENQQKQNEKLNEEAKNYLKEHKIAINNKNILKYKLAKEQGWKDAYNPTQNISSIFTGMEIEHIIPQAKGGTDTYNNLCLVNSNDNSNKGDRYAYEYFEETKTQEEIREILKNARSRTPQKSWRFEADAREKYEESGDKEESTRYLTDTRYVAKMAQRYLRAIVDCSDCDEVMQTRILAVKGGQTAKLRQHWNLYGLEYDLMGLDIPRYVNCPPYWLELDTGEIIEGINKPDIDGKWKFFDKAKNKEWQPKPRIDHRHHAMDAITVACANRGLIQKMAEENDINKIHYPLPLTSVESLADFRRKVISCLKDIKVSHKPNHSKAGQFHKETGRTVLCQNPDDPNSLITVYSRKILQVVKSAKDLTKLLIPETIKNEWHEDIAEHKAKQAKLVQDFELYMNTAEQILIAENEQGVAEGKKEIKITEGRILLKAFRIIQDKGLWKGDKFRCYENNSSLVYIKKHGVAYEGRNNHCVDFYQKNGKIGWEVIKRFDANQADFEPQWKKEGGKIIWSVQQGDILELDTPDEWKQYTDKERCLAKVKKFSNGAVTIDFVSDARMTSPKDKNLQYMFVDSLVNRGLSYFTNNKARKIELTPFGKIKKKHKVLWNGTKTAA

SEQ ID NO: 15057 - protein, 1156 aa, unidentified
  REGION 1..1156: note = Cas Enzyme sequence
MKYRLGLDLGVGSIGSAVIELDNENNAKDIIDAGVRIFEVSEGAEERRLKRTARKNLVRTKKRLELLAKKLFENGLWPNENPEGTDKLKSKSPYKIRTDALNEKLASPYYVGRAVLHIAKHRGAGFVSASEETEEEILEEGEKSKAKKSSYDMMLHHLKETNSKTIGEFFYNKIISGKGNDKTVRQKKYAIEKNIVDYAIPRYLVKDEFNKIWDKQAEFYPQMKKENLKKEIYDILFYERPAAPYATGKCIYFREEDRLLKAHPLSEMRRIYEEVNNIRILNDMCKRKLTLEERDSIVNELLLKGQNAGKQAIKKLLNLSAQHKISLVDDRVIKAYLYSRPEFANIEYLQNMNEDELSSFIEFLAEPKMSKDKNARLYNEDALIEYLKPILKIDDEKEIGNLLTKLPKGRGMLGISATKIILKKLKEDVLTHREITDKLAETDKRFMAEEEIARQNQGKCFQLPYYGEILQTDTAPLPPLMINNNKSLNPDEIKWGKIANPAVHMILNQIRLVVNEIIRIYGKPYDINIELGRDVGMSTKKKKEFENRQKQNEKLNEEAKNYLKEHKIAINNKNILKYKLAKDQGWKDAYNPTQNISSVFTGMEIEHIIPQAKGGTDTYNNLCLVNRNDNLNKGDRYAYEYFEEAKMPEEIREILKNARSRTPDKSWRFEADAREKYEESGDKEESTRYLTDTRYVAKMAQRYLRAVVDCSDCDEVMQTRILAVKGGQTAKLRQHWNLYGLEYDLMGLDIPRYVNCPPYWLELDTGEIIEGINKPDIDGKWKFFDKAKNKEWQPKPRIDHRHHAMDAITVACANRGLIQKMAEENDINKIHYPLPLTSVESLADFRRKVISCLKDIKVSHKPNHSKAGQFHKETGRTVLCQNPDDPNSLITVYSRKILQVVKSAKDLTKLLIPETIKNEWHEDIAEHKAKQAKLVQDFELYMNTAEQILIAENEQGVAEGKKEIKITEGRILLKAFRIIQDKGLWKGDKFRCYENNSSLVYIKKHGVAYEGRNNHCVDFYQKNGKIGWEVIKRFDANQADFEPQWKKEGGKIIWSVQQGDILELDTPDEWKQYTDKERCLAKVKKFSNGAVTIDFVSDARMTSPKDKNLQYMFVDSLVNRGLSYFTNNKARKIELTPFGKIKKKHKALWNGTKTAA

SEQ ID NO: 15058 - protein, 1156 aa, unidentified
  REGION 1..1156: note = Cas Enzyme sequence
MKYRLGLDLGVGSIGSAVIELDNENNAKDIIDAGVRIFEVSEGAEERRLKRTARKNLVRTKKRLELLAKKLFENGLWPNENPEGTDKLKSKSPYKIRTDALNEKLANPYYVGRAVLHIAKHRGAGFVSASEETEEEILEEGEKSKAKKSSYDMMLHHLKETNSKTIGEFFYNKIISGKGNDKTVRQKKYAIEKNIVDYAIPRYLVKDEFNKIWDKQAEFYPQMKKENLKKEIYDILFYERPAAPYATGKCIYFREEDRLLKAHPLSEMRRIYEEVNNIRILNDMNKRKLTLEERDSIVNELLLKGQNAGKQAIKKLLNLSAQHKISLVDDRVIKAYLYSRPEFANNEHLHNMNENELSSFIKFLAEPKMSKDKNARLYNEDALIEYLKPILKIDDEKEIGNLLTKLPKGRGMLGISATKIILEKLKEDVLTHREITDKLAETDKRFMAEEEIARQNQGKCFQLPYYGEILQTDTAPLPPLMINNNKSLNPDEIRWGKIANPAVHMILNQIRLVVNEIIKIYGKPYDINIELGRDVGMSTKKKKEFENQQKQNEKLNEEAKNYLKEHKIAINNKNILKYKLAKEQGWKDAYNPTQNISSIFTGMEIEHIIPQAKGGTDTYNNLCLVNSNDNSNKGDRYAYEYFEETKTQEEIREILKNARSRTPQKSWRFEADAREKYEESGDKEENTRYLTDTRYVAKMAQRYLRAIVDCSDCDEVMQTRILAVKGGQTAKLRQHWNLYGLEYDLMGLDIPRYVNCPPYWLELDTGEIIEGINKPDIDGKWKFFDKAKNKEWQPKPRIDHRHHAMDAITVACANRGLIQKMAEENDINKIHYPLPLTSVESLADFRRKVISCLKDIKVSHKPNHSKAGQFHKETGRTVLCQNPDDPNSLITVYSRKILQVVKSAKDLTKLLIPETIKNEWHEDIAEHKAKQAKLVQDFELYMNTAEQILIAENEQGVAEGKKETKITEGRILLKAFRIIQDKGLWKGDKFRCYSNSSSMINIPKHGVAYEAQNNHCIDFYQKNGKIGWEVIKRFDANQADFEPQWKKEGGKIIWSVQQGDILELDTPDEWKQYTDKERCLAKVKKFSDGDLSIDYITDARMTSPKDKNLQYMFVDSKRLRSINAICKANIRKVELTPFGKIKKKHKVLWNGTKTAA

SEQ ID NO: 15059 - protein, 1156 aa, unidentified
  REGION 1..1156: note = Cas Enzyme sequence
MKYRLGLDLGVGSIGSAVIELDNENNAKDIIDAGVRIFEVSEGAEERRLKRTARKNLVRTKKRLELLAKKLFENGLWPNENPERTDKLKSKSPYKIRTDALNEKLASPYYVGRAVLHIAKHRGAGFVSASEETEEEILEEGEKSKAKKSSYDMMLHHLKETNSKTIGEFFYNKIISGKGNDKTVRQKKYAIEKNIVDYAIPRYLVKDEFNKIWDKQAEFYPQMKKENLKKEIYDILFYERPAAPYATGKCIYFREEDRLLKAHPLSEMRRIYEEVNNIRILNDMNKRKLTLEERDSIVNELLLKGQNAGKQAIKKLLNLSAQHKISLVDDRVIKAYLYSRPEFANNEHLQNMNENELSSFIEFLAEPKMSKDKNARLYNEDALIEYLKPILKIDDEKEIGNLLTKLPKGRGMLGISATKIILEKLKEDVLTHREITDKLAETDKRFMAEEEIARQNQGKCFQLPYYGEILQTDTAPLPPLMINNNKSLNPDEIRWGKIANPAVHMILNQIRLVVNEIIKIYGKPYDINIELGRDVGMSTKKKKEFENQQKQNEKLNEEAKNYLKEHKIAINNKNILKYKLAKEQGWKDAYNPTQNISSIFTGMEIEHIIPQAKGGTDTYNNLCLVNNNDNLNKGDRYAYEYFEETKTQEEIREILKNARSRTPQKSWRFEADAREKYEESGDKEESTRYLTDTRYVAKMAQRYLRAIVDCSDCDEVMQTRILAVKGGQTAKLRQHWNLYGLEYDLMGLDIPRYVNCPPYWLELDTGEIIEGINKPDIDGKWKFFDKAKNKEWQPKPRIDHRHHAMDAITVACANRGLIQKMAEENDINKIHYPLPLTSVESLADFRRKVISCLKDIKVSHKPNHSKAGQFHKETGRTVLCQNPDDPNSLITVYSRKILQVVKSAKDLTKLLIPETIKNEWHEDIAEHKAKQAKLVQDFELYMNTAEQILIAENEQGVAEGKKEIKITEGRILLKAFRIIQDKGLWKGDKFRCYENNSSLVYIKKHGVAYEGRNNHCVDFYQKNGKIGWEVIKRFDANQADFEPQWKKEGGKIIWSVQQGDILELDTPDEWKQYTDKERCLAKVKKFSNGAVTIDFVSDARMTLPKDKNLQYMFVDSLVNRGLSYFTNNKARKIELTPFGKIKKKHKVLWNGTKTAA

SEQ ID NO: 15060 - protein, 1155 aa, unidentified
  REGION 1..1155: note = Cas Enzyme sequence
MKYRLGLDLGVGSIGSAVIELDNENNAKDIIDAGVRIFEVSEGAEERRLKRTARKNLVRTKKRLELLAKKLFENGLWPNENPEGTDKLKSKSPYKIRTDALNEKLASPYYVGRAVLHIAKHRGAGFVSASEETEEEILEEGEKSKAKKSSYDMMLHHLKETNSKTIGEFFYNKIISGKGNDKTVRQKKYAIEKNIVDYAIPRYLVKDEFNKIWDKQAEFYPQMKKENLKKEIYDILFYERPAAPYATGKCIYFREEDRLLKAHPLSEMRRIYEEVNNIRILNDMNKRKLTLEERDSIVNELLLKGQNAGKQAIKKLLNLSAQHKISLVDDRVIKAYLYSRPEFANNEHLQNMNENELSSFIEFLAEPKMSKDKNARLYNEDALIEYLKPILKIDDEKEIGNLLTKLPKGRGMLGISATKIILEKLKEDVLTHREITDKLAETDKRFMAEEEIARQNQGKCFQLPYYGEILQTDTAPLPPLMINNNKSLNPDEIRWGKIANPAVHMILNQIRLVVNEIIKIYGKPYDINIELGRDVGMSTKKKKEFENQQKQNEKLNEEAKNYLKEHKIAINNKNILKYKLAKEQGWKDAYNPTQNISSIFTGMEIEHIIPQAKGGTDTYNNLCLVNSNDNSNKGDRYAYEYFEETKTQEEIREILKNARSRTPQKSWRFEADAREKYEESGDKEENTRYLTDTRYVAKMAQRYLRAIVDCSDCDEVMQTRILAVKGGQTAKLRQHWNLYGLEYDLMGLDIPRYVNCPPYWLELDTGEIIEGINKPDIDGKWKFFDKAKNKEWQPKPRIDHRHHAMDAITVACANRGLIQKMAEENDINKIHYPLPLTSVESLADFRRKVISCLKDIKVSHKPNHSKAGQFHKETGRTVLCQNPDDPNSLITVYSRKILQVVKSAKDLTKLLIPETIKNEWHEDIAEHKAKQAKLVQDFELYMNTAEQILIAENEQGVAEGKKETKITEGRILLKAFRIIQDKGLWKGDKFRCYSNSSSMINIPKHGVAYEAQNNHCIDFYQKNGKIGWEVIKRFDANQADFEPQWKKEGGKIIWSVQQGDILELDTPDEWKQYTDKERCLAKVKKFSEGKFCIDYITDARMTSPKDKTLEYMFVNSLEKGLSYYTSHKARKVELTPFGKIKKKHKVLWNGTKTAA

SEQ ID NO: 15061 - protein, 1464 aa, unidentified
  REGION 1..1464: note = Cas Enzyme sequence
MKRILGLDLGSNSIGWGLIEQDFGQREGKIIAAGSRIIPMDQGLLGDFEKGNTVSQTAERTFYRSARKLRQRHLLRRERLHRVLHILGFLPTHYDKQIDFSKRYGKFIGNIEPKIAYNDGKFLFIDSFQEMLADFKKHQPTLFYTKRNGEESKIPYDWTIYYLRKKALSQKISKEELAWIILNFNQKRGYYQLRGEEEVENPNKEVTYYSLMVTEVTAEAPNKKGEIWYSIQLENGWVYRRTSKIPLDDWKGKVRDFIVTTELEEDGSIKRDKEGKEKRSFRAPSEDGWNLLKKKTEQDINTSQKTVGSYIYDHLLQNPNEKIKGKLVRTIERKYYKEELKAILEKQIALQPELFTDQLFADCIRELYSKNAAQQRNLAARDFVHLFVEDIIFYQRPLRSQKSTLANCSLESRSYIDKDSHTRKEASLKVCPKSNPYYQEFRVLQWLQNLKIYEIESDREVTHEFIKTLEDKQQLFDFLMAQKEIDCEELLKYFLSLTYPNAKEKALKSELKKWKDTYRWNYVYDIGEKSSKKYPMNDTRYDLKRYLEKVANFPDDFLSSEVEYLLWHLIYSVTDKVAYEKGLKKFAQKHHLDEDSFVESFKKFKPYPSEYGSFSEKAIRKLLPLMRFGSYWDFNHIDKNTQKRIEDLITGVENEEIRTILREKAEKYQLEKETDFQNLPLWLAQYIAYNRHAEASSLEKWTSVNDLETYLNEFKQHSLRNPIVEQVVTETLRVVRDIWQQYGQGKADFFDEIHIELGRELKKTAKEREELSKQNQKNEDTNLRIKALLAELGEDSTIENVRPYSLMQQELLKLYEEGVFSSSMEIEDDIEKIHKKATPNKAELQRYKLWLEQKYKSPYTGQIISLKRLFTEDYEIEHIIPQSRYYDDSLSNKVICESAVNKLKGNQLGLEFIKNHYGEKVHAAGKEVSIFTEEQYKEFVKNHYANNSGKMKKLLLEDIPEKMVARQMNDTRYISKYISEILSKIVRADERDEGVNSKNVILCTGKITTALKQDWGINDVWNDLILPRFERMNDLTQTSLFTSYNEKYQKYLPTVPMEYSNGFQKKRIDHRHHAMDAIIIACATREHINYINNQHALGKGKNKEEKQKSRIDLRTILCEKKYNDNAEENYNWVFKKPWDTFTQEVRAALEGIVVSFKQNLRVINKATNYYEHWVEENGKLIKKMVKQEGTNWAIRKPLHKETVSGKITLEREKVSKGKILTATRKAIDSTFTEKVIEGITDTGIQKILLNYLKFKKSPEIAFSPEGLEELNKNISLYNDGRPHKAIRKVRIFEQGSKFPLGEVGNKSQKYVEAAKGTNLYFGVYQGKDKRSFATIPLNEVIERQKQGRSSVPEYNEKGDPLLFSLSPNDLVYIPIEGEIIEDIDFRNLSNEQKERIYKAASFTRNECFFIKSSIASLIKNYDAKTKIGELGSQNKLEVTICKGIRIKEVCIKLKVDRLGNISKA

SEQ ID NO: 15062 - protein, 1464 aa, unidentified
  REGION 1..1464: note = Cas Enzyme sequence
MKRVLGLDLGSNSIGWGLIEQDFQQKEGKIIASGSRIIPMDQGLLGDFEKGNTVSQTAERTFYRSTRKLRQRHLLRRERLHRVLHILGFLPPHYDKQIDFSKRYGKFLDNTEPKLAYEEGRFLFMDSFQEMLSDFKSHQPNLFYSKKKGEESKIPYDWTIYYLRKKALSQKISKEELAWIILNFNQKRGYYQLRGEEETENPNKEVAYYSLMVTDVTAEAPNKKGEIWYSIQLENGWVYRRTSKIPLDDWKGKVRDFIVTTELEEDGSIKRDKEGKEKRSFRAPSEDDWNLLKKKTEQDINTSKKTVGTYIYDHLLQNPNEKIKGKLVRTIERKYYKEELKAILEKQIALQPELFTDQLFADSIRELYSKNAAQQRNLAARDFVHLFVEDIIFYQRALRSQKSTIANCSLESRSYIDKDSHTRKEAPLKVCPKSNPYYQEFRVLQWLQNLKIYEIESDQEVTHEFIKTLEDKQQLFEFLMAQKEIDCEELLKYLLNQTYPNAKEKALKSELKKWKDTYRWNYVYDIGEKSSKKYPMNETRYELKRYLEKVANLPDDFLSSEVEYLLWHLIYSVTDKVAYEKGLKKFAQKHHLDEDSFLESFKKFKPYPSEYGSFSEKAIRKLLPLMRFGSYWNFNHIDKNTQKRIHDLITGVENEEIRTILREKAEKYQLEKETDFQDLPLWLAQYIVYNRHAEASSLEKWTSVNDLETYLNEFKQHSLRNPIVEQVVTETLRVVRDIWQQYGQGQANFFDEIHIELGRELKKTAKEREELSKQNQKNEDTNLRIKALLAELGEDSTIENVRPYSLMQQELLKLYEEGVFSSSMEIEDDIEKIHKKATPSKAELQRYKFWLKQKYKSPYTGQIISLKRLFTEDYEIEHIIPQSRYYDDSLSNKVICESAVNKLKGNQLGLEFIKNHYGEKVHAAGKEVSILTEEQYKEFVKNHYANNSGKMKKLLLEDIPEKMVARQMNDTRYISKYISEILSKIVRSGERDEGVNSKNVILCTGKITSALKQDWGVNDVWNDLILPRFERMNALTQSTLFTTYNEKYQKYLPTVPMEYSNGFQKKRIDHRHHAMDAIIIACATREHINYINNQHALEKGKNKEEKQKSRIDLRTILCEKKYSDNAEENYSWIFKKPWDTFTQEVRAALEGIVVSFKQNLRVINKATNYYEHWVEENGKLIKEMVKQEGTNWAIRKPLHKETVSGKITLEREKVSKGKILTATRKAIDSTFTEKVIEGITDTGIQKILLNYLKFKKSPEIAFSPEGLEELNKNISLYNDGKPHKPIRKVRIFEQGSKFPLGEVGNKSQKYVEAAKGTNLYFGVYQGKDKRSFATIPLNEVIERQKQGLSSVPEYNEKGDPLLFSLSPNDLVYVSIEGEIIEDIDFRNLSNEQKERIYKAASFTRNECFFIKSSIASLIKNYDAKTKIGELGSQNKLEVTICKGIRIKEVCIKLKVDRLGNISKA

SEQ ID NO: 15063 - protein, 1051 aa, unidentified
  REGION 1..1051: note = Cas Enzyme sequence
LASPYYVGRAVLHIAKHRGAGFVSASEETEEEILEEGEKSKAKKSSYDMMLHHLKETNSKTIGEFFYNKIISGKGNDKTVRQKKYAIEKNIVDYAIPRYLVKDEFNKIWDKQAEFYPQMKKENLKKEIYDILFYERPAAPYATGKCIYFREEDRLLKAHPLSEMRRIYEEVNNIRILNDMNKRKLTLEERDSIVNELLLKGQNAGKQAIKKLLNLSAQHKISLVDDRVIKAYLYSRPEFANNEHLQNMNENELSSFIEFLAEPKMSKDKNARLYNEDALIEYLKPILKIDDEKEIGNLLTKLPKGRGMLGISATKIILEKLKEDVLTHREITDKLAETDKRFMAEEEIARQNQGKCFQLPYYGEILQTDTAPLPPLMINNNKSLNPDEIRWGKIANPAVHMILNQIRLVVNEIIKIYGKPYDINIELGRDVGMSTKKKKEFENQQKQNEKLNEEAKNYLKEHKIAINNKNILKYKLAKEQGWKDAYNPTQNISSIFTGMEIEHIIPQAKGGTDTYNNLCLVNSNDNLNKGNRYAYEYFEETKTQEEIREILKNARSRTPQKSWRFEADAREKYEESGDKEESTRYLTDTRYVAKMAQRYLRAIVDCSDCDEVMQTRILAVKGGQTAKLRQHWNLYGLEYDLMGLDIPRYVNCPPYWLELDTGEIIEGINKPDIDGKWKFFDKAKNKEWQPKPRIDHRHHAMDAITVACANRGLIQKMAEENDINKIHYPLPLTSVESLADFRRKVISCLKDIKVSHKPNHSKAGQFHKETGRTVLCQNPDDPNSLITVYSRKILQVVKSAKDLTKLLIPETIKNEWHEDIAEHKAKQAKLVQDFELYMNTAEQILIAENEQGVAEGKKETKITEGRILLKAFRIIQDKGLWKGDKFRCYSNSSSMINIPKHGVAYEAQNNHCIDFYQKNGKIGWEVIKRFDANQADFEPQWKKEGGKIIWSVQQGDILELDTPDEWKQYTDKERCLAKVKKFSEGKFCIDYITDARMTSPKDKTLEYMFVNSLEKGLSYYTSHKARKVELTPFGKIKKKHKVLWNGTKTAA

SEQ ID NO: 15064 - protein, 1080 aa, unidentified
  REGION 1..1080: note = Cas Enzyme sequence
SKNASRTGARGVRRQFFRRRLRKKILLKALSEYGMCPLIQSDFEDWKKTKAFPSEKLVAWFALNPYELRHKGLHEKLSLEEIGRLFYHLIQRRGFLSNSRKGGSDDGAIFKGNPKEGKIGIDATLDSLEGKTLGSYLYSIYPKENEPFQNGLERIRNRYTTRKMYVDEFEVLWHAQSKYHASLTAELKALFGGRKLDGYKEDGILFHQRPLRSQKHLVGNCSFEPSKTKCPISAIPVELFRIYQWVNTVEYNGKKLAKTEKDKMIEVLLTSEKDEFKKLRKAIGKESAEFKFNYKDDDKIVGTHTISNLSNKKYFGKRWFDFTDKEQEDIWHVLYFFDSKSNLKEYALKNWNFTEEQAEAIAKFNVKDGYASLSRKAIGNILPFLQQGFVYDIAVALGGIKNALGTEWETLSEDKKSFIIDNVPDIVRAKISGGYIDTIKDLLRKEFGFTDATLKKLYHHSTNIDATTLLDRLPVGKEADKELQSLKNPIVVTALFELRKLVTALIDEYGSIDEIKVEMARDLKLSKMQRNKIRREQKRLEKENDRVKDRLKEEGQRITHDNILLYKLWEECKKTCPYTGQPIPLHKLFTGEIQIEHIHPWSRSLNDSFSNKTLCYADENRRKGDKTPFEFYGDDEGNWSAIKERALKLFSDTKEYPNSYQKFKRFVQIKFDEDFSTRQLNDTRYISKEAKEYLSQICPKVIVSPGQATSNLRQKWGMNNILNDENEKTREDHRHHAVDALVMACTKVSYVQELSKWNRYNRNSELKEFPLPWEGFRREAELAIEKILVSHKRTSKDITVRTHTIEKNGVKYKNVGVAARGQLHKEFVYGKRKAPFSDEAFHIRKPIESLLTEKHIEKVVDTTIRNLIIKKVNEMGGFDKDKIPANTFFIVDDKGVKQPQIFLPNKNGQPVPILKVRIQETINKAKQLKNNSNQFVNPRNNDHVLIYETIDGKLEKDVVSFWEVVERKKQGLDKIKLPIDGKKIIQTFKENDMFILFKIEDEIDWNINNDISDNLYKVQKIAGADYFMEICFRKHNDSRDDKNAKADYVYIKGFGEGKTGWFTFNPIKVKISVSGKILKA

SEQ ID NO: 15065 - protein, 912 aa, unidentified
  REGION 1..912: note = Cas Enzyme sequence
VDEFEKIWEIQAKFNQSLTLDLKEKIGGRKKDGYNSDGVLFHQRPLRSQKHLVGNCTFELNKTKCPISAIPFELFRIHQWINTIEYNGKLLNAEERKKAFDFLILKDKPSFKDIRKAIDKLDAAFKFNYKDEDKIVGTFTISNLSNKKFFGAKWFDFSEKEQEDIWHILYFFEDKSNLKEYAIKNWGFDDEKADVISKFNLKDGYASLSRKAINNILPFLELGEQYDVAVVLGGIKNAFGKSWDNLTDDKKSLILDNVPAIVRSNFKGGFIEHLKKFLVDEFSFSEKQLKKLYHHSINLNTAEILKKLPVNAEADNEIQAIRNPVVITALFEIRKLVNEIIDIYGKPDEIKVELARSLKASKSGRNEERRRQQKLEKENDRVKNEVNYLGKHLSHDNILLYKLWEECKKTCPYTGKSINVTQLFSGEVQIEHIHPWSRSLNDSFMNKTLCFADENRAKGDRTPFEFYGKQGEEKWSEVKNRALKLFSDTAQYPNAYQKFKRFVQQKFDDDFASKNLNDTRYISKEAKNYLTKVCEKVNVAPGQMTANLRMKWGLNSILNLEDNTKTRDDHRHHAVDALVMACSKVSYLQELSKWNRYNRTSELKDFPMPWENFRNDADKAIDAILVSHKKTNNILTVRTHKTEKNGKVYKNVGVAARGQLHKETVFGKRTAPFSEEAFHVRKPIESLTTEKQVVKVVDEAIRKLIFKRVNELGGYDKGKIPANTFFLVDENGVKHLQLFLPNKNGAPVPILKVRMKENFSGAEQLKSEVNQWVNPRNNHHVLIYKDENDNLKEDVVTFWTVVERKRKGFPVYQLPIGGKEIITTLHINDMFLLGLNEEAIDWENPNNEALKESLYRVQKLTSSDYFFRKHKSSTITDDDYKQIRGFGEGKTGWLNFNPIKVKVSVSGKIKKL

SEQ ID NO: 15066 - protein, 1057 aa, unidentified
  REGION 1..1057: note = Cas Enzyme sequence
MKNVIKKTYRLGVDLGSTSLGWCMTELSDQNEPIGIIRMGVRIFPDGRDAKSKEPLAVARRGYRGQRRNLDRYMLRIRGLVEYLISHGFLPEDDQSRQQIFKSDPYYLRQKALDEKLKPEEFARALFHLAKRRGFRSNRKVLSDKKTKYSEAIENLAKALQEKGARTLGEYLYQKRCEMIALGEHLSKPLKFRYTVNPEEPDPIFPTREMTQHEFNMIWDAQAAFDPRYTQTHKEHIHDLIFHQRALQIPPKGKCQLLPDQERAPKAHPLFQEFRIRQDLNNLKALDVYENKAIEITDEQYAALFSMLSTKKEATFEAMRKLLWGKAAGDYKFNLEANDRNKLLGDQAYCAFHSKEHKDLSALWDSWDMDMKNRVIEIVISDLDDTDAITGLSKLGIAEDVAGMLLQVHLPSDYCHLSVKAMQMILPYMRQRIIYSQACSNAGMDHSGEYNGEVFTDGDLPYYGEVLKRETIALIKKTNDPDSDAHGRINNPSVHIALNQLRKVINALCESYGTPQEIVLELGKDIKLGLKEKERLNKLNNQNRKINETVDRFLADSDIPVNSLNRLKAKLWFELGKDAIDRRCVYTGHQISVTDLFTRKIEVDHILPKSRTYDDSTANKILCLRDANMYKAERGPFEAFGESRDGYDWNAIVTRAEALPDNKKWRFQAEAMQRYEDQEELLGRMLNDTRYMSRVAMKYMYYVCGKDHVWTVTGRHTGLLRRKWGLNTALGETEEKERTDHRHHAIDAFVISLTTRSMIKHLADSIRQSKDRFLEKLDPPYPGFDHDEFRALVNRIAVSFKPDHIDPHKLRQRNQTGGSLVEETAYGYIGPAKDKPRYAEYSVRKSIDAIKVKNIPDVIGAEIRKELEDIAAQVTEDDFPSAIKNWARRRNISKVKLKVVAKPETMVPVRDKDGKVFKYLASGENLFADIYIQDPASPTPRWGIEIVNSYNAHTPGFVPQWKKDYPKAKKVMRVFKNDIIALDDENGTRVLKRVRKMTNNKLFLRDTTIASKPESIKDIGEQYPPNKLAACHAVKAGVDVIGRVFDPGGKHANGTGD

SEQ ID NO: 15067 - protein, 1426 aa, unidentified
  REGION 1..1426: note = Cas Enzyme sequence
MTKILAFDPGTNSLGMVCRDTMNDNLMEQITSGVDIIRDNTERDKRGRHSSAASQRRSFRNARTRYRSVKRRKQATLKLLIKHNCCPLDMESLNKWRFDDDEKGYDRTFPVHNEEFMKWINFKFIIDGEEVKSVYRLREILVTKPLDFSKPESWLMLGRAIYSIAVRRGFKSSRLANPEINDEENEEGVDLQKSEEELFSGLDQYMKEHNCKTVGAAFARMERVDKIRIRANNDYKPIRSKLKEEIEEIFKVQKRDTDSELYKGLMSEKKHEGTIFYKNPLKSQKGKVEYCTLEPRRRRCPKSHPANEFNTAWQLLNNIKIKRNGLWENITLDIRHKIFNELFVSKEKHFDFVKIREMLQNEYQIQLEYKESINYSDNKSIHGCPIIYYLQKILGPSWETERIPGTNKHLKHAQRRKKLFNKEDKRSIEEYTEAEGHLTEYTYEDIWHICYESDEKQFVKDLAKNVLCLSPSKVISMGALWEAIQDGYAKLSLCALKKINPFLAKGYKYSDAVMLANLPTIMGDTFFQQNEQEIIGLMDKERAAILSKNRIYDITNKLISDYKSLKLEGFAFAERADHDYILQDDDIENVKKACAENFGKEWDALTDNQQSAITTHVKELYQKFFFSKERDYCKRINLADAVKAALAEKYPFLTKKKLKKLYHHSDNSYYPAAHTNENGILQLGNPARGNQKNPTVLKVLYKIKENVNKLLISGDIDADTIIVIENAREGLNDFNMRWAIEEYGKKREKENKAIEDALTDLAKEFHLTLPKGCVSVARLALYQNRDFTPYNPNEPRRLYDKLCENYKLWLRQGFFDFYTGHPITLAQLFSPDNLVEVDHILPVSKSFDDSISNKVLSSTRYNRTIKGTKLPCELPNYNIDTAEGTAIIHRIQDIERKVKYLENKVTYWKGRSSRAANPESKNWAIKQCHLWQMEYDEWNQLLTNLTTREITPSFRHNQLNDTRIISKYAYHYLKSVFGRVVVQRGETTAVFRKIFGFQEVYEKKDRSRHTHHAIDALTLSLIPYGPRRERMMELWYQIQESHRFEDYDTERQLKNKLDREVSLCGLGNYSPTEIVKYIEKTTLVRNDATNNALTKNIKRFRVRGKVVPLRDKDGNVIYEKTSKGIKRVKAKYVSQGNSIRGAIHDQSFYGKIEKWKNGKNHEIEEVFVIRKKIEFKSGDKGKGFKSWDDLKAQMVDKKLFDKFEEKEKDFKKACDEGIHICIAENGERRMVRVRRVRCIAKKAQPLKKHIFQPRNDNKERFYYVSSHGEAYGIFEYKSRDGALHYESDNLFTLSEKMKTRNLKETPCPRAIKDKKGKEYFHTRTILKDATILIYPLGESIESQYHLDAATISKRLYRVNTIEMQRKRLTLTRHNLVKSWTETNTISDSDFNTLPEGMRMPITKLNYLLLGTDFEILDGRIVHIKKE

SEQ ID NO: 15068 - protein, 1222 aa, unidentified
  REGION 1..1222: note = Cas Enzyme sequence
MEKRILGIDTGTNSLGWAVVDKKEDGTYSLIRRGSLIFQEGVKIEKGIESSKAAERTSHRSLRKQYFRRRLRKIEVLKVLIEFGWCPYLTPEALHQWHVKKEYPMDEAFIAWQRTNDNYDENPYYYRHVCLHEKLDLNEKSGRYMLGRAMYHLAQRRGFLSNRLEQGDDEETGKVKEGISSLSKSMLEADCEYLGDYFYKIYKEQGNTERIRTRYTDREEHYKKEFYAICKRQSLSESQVSKLEKALYFQRPLKSQRQRVGKCTFEPKKARMADSHPTFELFRMLSFVNNIKVKGPYDVELRPLTTEEFERARPMFFRKTKSQFDFEDIAKAIAGKGKYQYIKEIGDRPYKFNYRMTQSVTGCPTIASLISVFGDDYEAAIAERYTLSDGKTPEQMVNDVWNVLYSFSDKSKVKQWGQEKLQMNEDEAEKFAKIRLTHSFVSMSLAAVKKILPWLEQGLIYSHAVLMAKVPDIVGEDVWKSRGESITKELLSLMSNFNPKDVAMTGTLDFCIKDVLKDICDLEPGAVERLYHPSMIETYPDAKKNSQGVYQLGSPKTNAVRNPMAMRSLHQLRKVINALLRDGTINNQTEVHIEYARELNDANKRKAIALWNKNRENLRKKYAEDIRALYKQECGKMIEPTEDDIVKFQLWEEQGHICLYTGESIGIADLIGPNPNYDIEHTIPRSVGGDSTLENMTLCSSKFNRDIKKAKLPSQLPNYDTIISRLEGWREKIEKLRKEMDRVKTHSGMEKSVKDRLIQKRHLLRLELDYFVGKYKRFQMEEVPEGFARRQGAGIGLVGKYAGLYLRSLFHKADDRNKSNVRVVKGATTAEYRKMWGIQDEYEKKSRDNHVHHCIDAITIACIEPGEYNATARYYQQLEEYERSKAVKPSFRKPWPTFTEDIKAIAQEMLVVHSTPDNMPKHARKYVQTSNGRKLAKGDSARGSLHNDTYYGAIEREGEIKYVVRRPISSFEKVSDIESIVDPVVREIVMRAVEKKGLKQAVSEVIYMNEEKGIKINKVRCYVSGSISGKIIDVRNQRDKSLKEYKRRYYVENGDNYVMGIYEGLKGKKVCREYELANMLDASTFYNKKADDSILPQKSVIGVLDLPLKYRLFKGLHVILYEKSREEVDILNTQDLVPRLYVITGLSTSSTTTGGKTYRYGMVSLKHAQEARPSSECKEKKGVYKNGEEYRAKIVMNHNQFDALVEGVDFNISVLGEIVLLK

SEQ ID NO: 15069 - protein, 1426 aa, unidentified; identical to SEQ ID NO: 15067
  REGION 1..1426: note = Cas Enzyme sequence

SEQ ID NO: 15070 - protein, 1104 aa, unidentified
  REGION 1..1104: note = Cas Enzyme sequence
KESGEIKHASIKCIAKSHPLYQEFRLWQFIVNLRIYRKETDVDVTQELLPTEADYVTLFEWLNEKKEIDQKAFFKYPPFGFKKTTSNYRWNYVEDKPYPCNETHAQIIARLGKAHIPKAFLSKEKEETLWHILYSIEDKQEIEKALHSFANKNNLSEEFIEQFKNFPPFKKEYGSYSAKAIKKLLPLMRMGKYWSIENIDNGTRIRINKIIDGEYDENIRERVRQKAINLTDITHFRALPLWLACYLVYDRHSEVKDIVKWKTPKDIDLYLKSFKQHSLRNPIVEQVITETLRTVRDIWQQVGHIDEIHIELGREMKNPADKRARMSQQMIKNENTNLRIKALLTEFLNPEFGIENVRPYSPSQQDLLRIYEEGVLNSILELPEDIGIILGKFNQTDTLKRPTRSEILRYKLWLEQKYRSPYTGEMIPLSKLFTPAYEIEHIIPQSRYFDDSLSNKVICESEINKLKDRSLGYEFIKNHHGEKVELAFDKPVEVLSVEAYEKLVHESYSHNRSKMKKLLMEDIPDQFIERQLNDSRYISKVVKSLLSNIVREENEQEAISKNVIPCTGGITDRLKKDWGINDVWNKIVLPRFIRLNELTESTRFTSINTNNTMIPSMPLELQKGFNKKRIDHRHHAMDAIIIACANRNIVNYLNNVSASKNTKITRRDLQTLLCHKDKTDNNGNYKWVIDKPWETFTQDTLTALQKITVSFKQNLRVINKTTNHYQHYENGKKIVSNQSKGDSWAIRKSMHKETVHGEVNLRMIKTVSFNEALKKPQAIVEMDLKKKILAMLELGYDTKRIKNYFEENKDTWQDINPSKIKVYYFTKETKDRYFAVRKPIDTSFDKKKIKESITDTGIQQIMLRHLETKDNDPTLAFSPDGIDEMNRNILILNKGKKHQPIYKVRVYEKAEKFTVGQKGNKRTKFVEAAKGTNLFFAIYETEEIDKDTKKVIRKRSYSTIPLNVVIERQKQGLSSAPEDENGNLPKYILSPNDLVYVPTQEEINKGEVVMPIDRDRIYKMVDSSGITANFIPASTANLIFALPKATAEIYCNGENCIQNEYGIGSPQSKNQKAITGEMVKEICFPIKVDRLGNIIQVGSCILTN

SEQ ID NO: 15071 - protein, 1536 aa, unidentified
  REGION 1..1536: note = Cas Enzyme sequence
LIIYFIFEKIVNTILVMKKIVGLDLGTNSIGWALINAYIDEYNKEHLYGIEACGSRIIPMDAAILGNFDKGNSISQTADRTSYRGIRRLRERHLLRRERLHRILDLLGFLPKHYSDSLNRYGKFLNDIECKLPWVKDETGSYKFIFQESFKEMLADFTEHHPKLIANNKKVPYDWTIYYLRKKALTQKISKEELAWILLNFNQKRGYYQLRGEEEETPNKLVEYYSLKVEKVEDSGEKKGKDTWYNVHLENGMIYRRTSNIPLDWEGKTKEFIVTTDLEADGSPKKDKEGNIKRSFRAPKDDDWTLIKKKTEADIDKIKMTVGAYIYDTLLQKPDQKIRGKLVRTIERKYYKNELYQILKTQSEFHEELRDKQLYIACLNELYPNNEPRRNSISTRDFCHLFIEDIIFYQRPLKSKKSLIDNCPYEENRYIDKESGEIKHASIKCIAKSHPLYQEFRLWQFIVNLRIYRKETDVDITQELLPTEADYVTLFEWLNEKKEIDQKAFFKYPPFGFKKTTSNYRWNYVEDKPYPCNETHAQIITRLGKAHIPKAFLSKEKEETLWHILYSIEDKQEIEKALHSFANKNNLSEEFIEQFKNFPPFKKEYGSYSAKAIKKLLPLMRMGKYWSIENIDNGTRIRINKIIDGEYDENIRERVRQKAINLTDITHFRALPLWLACYLVYDRHSEVKDIVKWKTPKDIDLYLKSFKQHSLRNPIVEQVITETLRTVRDIWQQVGHIDEIHIELGREMKNPADKRARMSQQMIKNENTNLRIKALLTEFLNPEFGIENVRPYSPSQQDLLRIYEEGVLNSILELPEDIGIILGKFNQTDTLKRPTRSEILRYKLWLEQKYRSPYTGEMIPLSKLFTPAYEIEHIIPQSRYFDDSLSNKVICESEINKLKDRSLGYEFIKNHHGEKVELAFDKPVEVLSVEAYEKLVHESYSHNRSKMKKLLMEDIPDQFIERQLNDSRYISKVVKSLLSNIVREENEQEAISKNVIPCTGGITDRLKKDWGINDVWNKIVLPRFIRLNELTESTRFTSINTNNTMIPSMPLELQKGFNKKRIDHRHHAMDAIIIACANRNIVNYLNNVSASKNTKITRRDLQTLLCHKDKTDNNGNYKWVIDKPWETFTQDTLTALQKITVSFKQNLRVINKTTNHYQHYENGKKIVSNQSKGDSWAIRKSMHKETVHGEVNLRMIKTVSLNEALKKPQAIVEMDLKKKILAMLELGYDTKRIKNYFEENKDTWQDINPSKIKVYYFTKETKDRYFAVRKPIDTSFDKKKIKESITDTGIQQIMLRHLETKDNDPTLAFSPDGIDEMNRNILILNKGKKQHPIYKVRVYEKAEKFTVGQKGNKRTKFVEAAKGTNLFFAIYETEEIDKDTKKVIRKRSYSTIPLNVVIERQKQGLSSAPEDENGNLPKYILSPNDLVYVPTQEEINKGEVVMPIDRDRIYKMVDSSGITANFIPASTANLIFALPKATAEIYCNGENCIQNEYGIGSPQSKNQKAITGEMVKEICFPIKVDRLGNIIQVGLCILTN

SEQ ID NO: 15072 - protein, 1497 aa, unidentified
  REGION 1..1497: note = Cas Enzyme sequence
KFGIDCKDIPMKHNRILGLDLGSNSIGWALIEQDFDNKQGKILGLGSRIIPMDQGILGEFERGNKVSQTAERTGFRGIRRLRERHLLRRERLHRVLHLLGFLPPHYDAQIDFTKRFGKFIGDSEPKLAYNNEGFIFLESFNEMVEDFKKHQPQLFYIKSNGEESKIPYDWTIYYLRKKALQEKISKEELAWIILNFNQKRGYYQLRGEEEEKSTKNVEFYSLEITDVIADTPNNKGEIWYSIHLENGWVYRRASKISLEDWKGKVRDFIVTTELNEDGSIKLDKEGKEKRSFRAPSEDDWNLLKKKTEQNITLSGKTVGEYIYDHLLQNPNQKIKGKLVRTIERKFYKEELKAILEKQVALQPEFFTEELFVDCVRELYKNNEIHQNSLFSKDFVHLFLNDIIFYQRPLRSQKSNISSCSLEYRFCIDKETKQRRKTYLKVISKLNPYYQEFRVLQWLSNLKIYRKEDDKDVTSEFISSIEDKETLYEFLMSEKEVSNKSILEFLLMKSLRYIYPFAKETELKKELKKEITKYRWNYVYEEENDNKKYPMNETGYEIKKRLKEVKNIPDNFLTRDIEYQIWHIIYSVTDKYEFEKALMKFAQKHNLDTESFVENFKRIKPYPSDYGAFSEKAIKKLLPLMRFGKYWNYSNISEPVQARISDIINGVDNESIKTIVREKAEKFQLSQEVDFQGLPLWLAQYIVYGIHSEAADIQRWTSPSDLEEYLKGFKQHSLRNPIVEQVVTETLRVVKDIWEYYGKGEQNFFKEIHIELGRELKKTAEERKRMTREINENEETNLKVKKKLQEFFEDKSAENVRPYSPIQQEKYKLWQEQKERSPYTGQPIPLSKLFTDEYQIEHVIPQSRFFDDSLSNKVICEAAVNAQKGAQLGLEFIKKHGGEIIEIGLNKKVRILNEKEYKELVNELFANNRAKKAKLLMEEIPEKMVERQLNDTRYISKFISQILSNIVRSPQEDDGVNSKNIIPCTGKITAALKQDWGLNDVWNDLILPRFERMNNLTQTELFTTYSEKYQKKIPTVPLEHAKGFQKKRIDHRHHALDALVVACATRSHINYMNNQHALDKHKAKEEKQNARIDLRTVLCEKKYNDNAEDKYNWTFKKPWNTFTQDVRGALEMVVVSFKQNLRVINKATNYYEKWVEERGKMVKKKVKQEGINWAIRKPLHDDLPYGEIKYQTNYLKISENISKRKFIIDEFIRNQVERIYVENHSKNNLTKKYLKEYPVIDEKGKEVVSTDFRIEVIKYRKRKPISILSDRNSRTGITTIEKMLQAINKIADNVLKQELLLHLEQNNNDIDKAFAVEGIERFNSERKTPVYRLPFIEDGEKKIKLGSKGKYVEAAKGTNLFFGIYQGKEKRSYATIPLDEVIERQKQGLTSVPELNEKGEKLLFSLSPNDLVYVPMEGEDTENIDFTNLSKEQRERVYKTVSFTGNQCFFVRQDVATSIVNKMEYSSLNKMEKDIDGIMIKESCIKLKIDRLGNISKV

SEQ ID NO: 15073 - protein, 1052 aa, unidentified
  REGION 1..1052: note = Cas Enzyme sequence
RPLKSQKSSVSNCTLEFRKFKDENGVEHAQYLKVIPKSNPYFQEFRIWQWILNLNIYSKEDDKNVTKDFLNTVEDFENLFEFLNDRKEVDQKALLKHFKLNEKTHRWNFVEDKKYPCNETKAMISSRLEKVANVPSDFLNREIEQKIWHIIYSVNDKIEFEKALRSFALKNNLEENSFIEAFRKFPPFKSEYGSFSEKAIKKLLPLMRLGKYWDYNLIGEQTKNRIQYIITGEYDENIKDKVREKAMHLTDESKFQGLPLWLAQYIVYDRHSEAAMLGKWNSVDDLEEFLKDFKQHSLRNPIVEQVVTETLRVVKDIWQKYGNGAIDFFSEIHIELGREMKLPAAERDRMTRQMMENENTNLRIKSLLAELQNDSSVENVRPYSPVQQEILKIYEDGVLNSDIDVEDDILKISKTAQPSSADLKKYKLWLEQKYKSPYTGQVIPLSKLFTSEYEIEHIIPQSKYFDDSFNNKIICESAVNKLKDNYLGYSFIKNFGGTVVECGLGRKVTVFKVDEYEDFVKKHYAKNRNKRLNLLLEDIPEKMIERQLNDTRYISKYISGVLSNIVRVEDGSDEGVNSKNIVPGNGKITTQLKQDWGLNDVWNDLILPRFERMNLLTNSTHFTAWSENHQKFLPTVPIEYSKGFSKKRIDHRHHAMDALVIACATKDHVNLLNNQSAKSDTKRYDLKKKLMRFEKVVYNDIKTGKKIEREIPKQFLKPWNTFTVDAKSSLEKIIVSFKQNLRVINKATNYYEKYVEKDGVKTKERIQQKGTNWAIRKSLHEETVSGKIDLPWVETSKEEFITATRKPLDTSFNIDKIKKITDTGIQKILKNYLEAKDNNPELAFSPEGIEDLNKNIEKYNDGKPHQPIIKVRVYEKGKGRFALGQTENKVDKYVQGSPNLFFAIYRDENGKKSFESIRLDIVIERMKQMLSPVPEINSNGDELHETLSPLDLVYIPTEEESENINAIGFDTIDKSKLERIYNVNDFSGYTVYFSQNSFAKNIYPKEMDMSWNEKKQKYSGSFDSKTASFNGKSIKESFVKLKIDRLGNISKA

SEQ ID NO: 15074 - protein, 1077 aa, unidentified
  REGION 1..1077: note = Cas Enzyme sequence
LKIGTFRFADYIFYQRPLRSKKSTIANCPLEKRSYIDKETNERKDVPIKVCAKSNPYYQEFRVLQWLQNLRIYEIETDREVTAEFIGTAEDYETLFNFLMSQKEIDNEGLLKYFLLTKNPQIKDKVAKSELKKWLTTYRWNYVYDAADNSSKKYPMNETGYELQRYLQKVEGLPANFLTFDTAYQLWHLLYSVKDKVEFEKALKKFAQKYQLDEASFVDSFKNFKPYPNEYGSFSEKAIKKMLSLMRFGKYWNFKNIDVHTQKRIDDLINGVANEDIRTIIREKTEKYQLNNEICFQGLPLWLAQYIVYNRHAEATNIEKWTSVSDLEAYLEDFKQHSLRNPIVEQVVTETLRVVKDIWQQYGGGQANFFDEIHIELGRELKNTSKERERLSKQNQENENTNLRIKKLLTELKEDASIQNVRPYSLVQQELLKIYEEGVFSSTDEIEEDIQKIRKKAEPTTPEIQRYKLWLEQKYKSPYTGEVISLTKLFTEEYEIEHIIPQSRYYDDSLSNKVICESAVNKLKTNQLGLEFIQNHHGEKVRIAGNKEVTIFTEEQYKEFVKKYYANNLAKQQKLLLNEIPEKMVARQLNDTRYISKYISEILSKIVRSDEKDEGVNSKNVIPCTGKITTALKQDWGLNDVWNELILPRFERMNQLTQTQLFTSYNDRLQKNLPTVPIKYSQGFQKKRIDHRHHAMDALVIACATREHINYMNNQHALDKSKDKKEKQQSRIDLRTILCEKKNNNWQFKKPWRTFTQEAKEALEHIVVSFKQNLRVINKATNYYEKWEEKNGVLVKKKVKQEGTNWAIRKPLHKETVSGKILLDRKIGKDKILTATRKAVDITFTERIISSITDTGIQKILLNYLKYKGSPEVAFSAEGLEELNKNIAQYNDGKKHQPIYKVRIFEEGSKFPLGETGVKATKYVEAAKGTNLFFGVYQGKGKRTYATIPLNEVIERQKQGLPSVPEHNEKGEPLLFSLSPNDLVYVPMEGEATEAIDFSNLSKEQKERIYKTVSFTGNECHFVKSTIASLIKSYDAKSKIGELGSLNKLEVTISGDSRIKEVCIKLKVDRLGNITKA

SEQ ID NO: 15075 - protein, 1370 aa, unidentified
  REGION 1..1370: note = Cas Enzyme sequence
MKLIFGFDLGSTSIGWAVVQEKENDTEASRILKLGVRVNPLTTDEKTNFEKGKPITTNANRRLAHGMRLNLSRYKQRRKELIKSLIRFKFISPDTVLCENGSNTTFETLRLRAKAATEEITLEELSRVLLMINKKRGYKSNRKAQPNDNGAIDNIDIAKKLYQSHLTPGEYVFNNLKQGIQYIPPFYRSDLINEFNKIVDCQTQFYPHLKNIDTGSLLKAKNCDIILDGQDVQRIKQKGSPSEKKRELYCLRAQAATQQIRLEELALVLEKISSEIRNSSGYLGDISDRSKELFINNQTIGQYLMSQLDRNPNNKLKGQVFYRQDYEDEFNRIWETQARFHKELTPERLHIIRDIIIFFQRDLKSQKSNIAICEFEKQKREITVDGKKKIIEFGPKVCPKSSPIFQEFKIWQTINNLKISNIYGEELSLSSDERQILFEELSIRKKLTCAEILKLLHKDSKCSLNYKEIQGNATISAIFDAFKEIILQSGHDNNKFNKASFKDTMLIIEPIFKMLGINTDILSLDCPTDSPSLKTCPIYQLWHLLYSYAGDNSKTGDSSLIKKLQRRYGFSKEYASIMSKISFDNDYGNLSAKAIMRILPHLRNGLQYSDACNAAGYNHSKRSLTKQDILNKVLVSQIDLLPRNSLRQPVVEKILNQLINITNALISTYGNPDEIRIELARELKKSADERAKLNSANNANEKENNSIRKLLQERFGIQNPSRNDIVRYKLYKELEHTGFKTLYSQSLITDDILFSKEIEIEHIIPQARLFDDSLSNKTLEFHNINQNKSNQTAYDYILSEFGEDYAVQYKKRIDDLLKNGKISRTKHKYLLMSETEIPTDFINRDIRETQYISRKAMEILEPATRKVVASSGAITARLREDWQLVDVMKELNWEKYKALNLTETIQDKDGRRFYKIKDWTKRNDHRHHAMDALTVAFTKPSFIQFLNNLNARSDKGNAIYAIQQKELHRNKDGKLCFNPPLPLDEFRAEAKRQLNDIFVSHKAKNKVATRNSYMTKNGKGTKIVELTPRGQLFNETTYGCVKQYETKLESVNSSFDTDKIMTVADKSYRQALMKRIEEFDGNASLAFSRKNSITKNPIYVDDSHSDTVPVKVKTVVPKPVFTQRIAVDIKLDKTKIAQILDAKIRRILTNRFYEFGEDPQKAFSNIDENPIWLNKEKGIAIKKVTIKTGISGVPIRHKRNNMGRPILNSDGNKIPSDFVVPGNNHHIAIYKDADGNIKEQAVPFYIATNRVIHKQPAVDRNFNADKGWKFLFSIKKNEYFVFPNEKTGFNPAEIDLLNPDNNKIISPNLFRVQKISSSNYHFRHHLETKVDDNNALKGTTWIRIRSLPALENIIKVRVNNIGQIVAVGEY

SEQ ID NO: 15076 - protein, 1421 aa, unidentified
  REGION 1..1421: note = Cas Enzyme sequence
MFSQRSQAPYCDLLKILPQIWHFSTTFPTFFQKKLLPCKQKNNNIENTRLVMKLIFGFDLGSTSIGWAVVQEKENDTEASRILKLGVRVNPLTTDEKTNFEKGKPITTNANRRLAHGMRLNLSRYKQRRKELIKSLIRFKFISPDTVLCENGSNTTFETLRLRAKAATEEITLEELSRVLLMINKKRGYKSNRKAQPNDNGAIDNIDIAKKLYQSHLTPGEYVFNNLKQGIQYIPPFYRSDLINEFNKIVDCQTQFYPHLKNIDTGSLLKAKNCDIILDGQDVQRIKQKGSPSEKKRELYCLRAQAATQQIRLEELALVLEKISSEIRNSSGYLGDISDRSKELFINNQTIGQYLMSQLDRNPNNKLKGQVFYRQDYEDEFNRIWETQARFHKELTPERLHIIRDIIIFFQRDLKSQKSNIAICEFEKQKREITVDGKKKIIEFGPKVCPKSSPIFQEFKIWQTINNLKISNIYGEELSLSSDERQILFEELSIRKKLTCAEILKLLHKDSKCSLNYKEIQGNATISAIFDAFKEIILQSGHDNNNFNKASFKDTMLIIEPIFKMLGINTDILSLDCPTDSHSLKTCPIYQLWHLLYSYAGDNSKTGDSSLIKKLQRRYGFSKEYASIMSKISFDNDYGNLSAKAIMRILPHLRNGLQYSDACNAAGYNHSKRSLTKQDILNKVLVSQIDLLPRNSLRQPVVEKILNQLINITNALISTYGNPDEIRIELARELKKSADERAKLNSANNANEKENNSIRKLLQERFGIQNPSRNDIVRYKLYKELEHTGFKTLYSRSLITDDILFSKEIEIEHIIPQARLFDDSLSNKTLEFHNINQNKSNQTAYDYILSEFGEDYAVQYKKRIDDLLKNGKISRTKHKYLLMSETEIPTDFINRDIRETQYISRRAMEILEPATRKVVASSGAITARLREDWQLVDVMKELNWEKYKALNLTETIQDKDGRRIYKIKDWTKRNDHRHHAMDALTVAFTKPSFIQFLNNLNARSDKGNAIYAIQQKELHRNKDGKLCFNPPLPLDEFRAEAKRQLNDIFVSHKAKNKVATRNSYMTKNGKGTKIVELTPRGQLFNETTYGCVKQYETKLESVNSSFDTDKIMTVADKSYRQALMKRIEEFDGNASLAFSRKNSITKNPIYVDDSHSDTVPVKVKTVVPKPVFTQRIAVDIKLDKTKIAQILDAKIRRILTDRFYEFGEDPQKAFSNIDENPIWLNKEKGIAIKKVTIKTGISGVPIRHKRNNMGRPILNSDGNKIPSDFVVPGNNHHIAIYKDADGNIKEQAVPFYIATNRVIHKQPAVDRNFNADKGWKFLFSIKKNEYFVFPNEKTGFNPAEIDLLNPDNNKIISPNLFRVQKISSSNYHFRHHLETKVDDNNALKGTTWIRIRSLPALENIIKVRVNNIGQIVAVGEY

SEQ ID NO: 15077 - protein, 1375 aa, unidentified
  REGION 1..1375: note = Cas Enzyme sequence
MNKLHFNYKQEKHFCQEWRKINMEKKYYLGLDIGTNSVGWAVTDENYDLCKFNGKKMWGIRLFEDAKTAAERRAKRSNRRRMARTKQRIDLLQELCEKGIFEKDPTFFIRLNESSLHLEDKSTSEKYPLFVDKEYTDVDYHREYPTVYHLRKELIENPEPHDPRLVYLACCHIIKSRGHFLVNGSISDAKDLSFICENMINSFNAASDYKISIQDMTALETILADRKMAKSVKAKQIIPLFECIPCEDKEQQKCCKAIITNLSKLIVGLKGDISKIFNESFEEIKSFKFAETKYEDEILPTMEEIYPDHAEIIEKIKSIYDWSILDEILDGEEYLSFAKVKAYEKHKKNLHDLKILIKKYCDDETYQSFFNGMNEKNKYSNYIGSIRKNGHTYKVEKCKSPEDFYKELLKLLSSINPDQEDESLFEQIKFETENQTLLPLLRTKENGTIPNQVHMQELIKILDNASKYLDFLNEKDEYGTIAEKIISIAKFRIPYYVGPLSRRHKEEGSNSWMVRKEEGRIYPWNFGDKVDVEKSNKEFIQRMTNKCTYLIGEDVLPKNSLLYSKYMVLNELNNLKIRGKKISIKLKQQIYNDLFCTKARVTGKNILDYLKKEDPELAAEDLSGFDIDFKSSLTSYLDFKKQVIGDNIEKDHYKEMIEEIIKWKTIYNEDSKMMKRMITREFPETLNQDQIKKICHLKYNGWGNFSETFLNGIKGANKETGECYTIIEALWKTNYNLMQLLSKQFSFKEEIDQINAEKTGTIGKISYENLVKDLVVSPANKRAIWQTIQITEEIKKVMKCEPERIFIEMARGGEKKKKRTVSRKTRLQELYTGCKDDTRNWMKEIGDREEREFSSRKLYLYYTQMGKCMYTGEEIDVDLLMTANSKWDIDHIYPQSKIKDDSLDNMVLVRKDINNHVKRNHIVPSNIQRKMTPYWKMLLQKGLISKKKYERLTRSTDFTDEELSGFIERQLVETRQSSKAVAELLTRLYKNSEVVYVKAGLVSDFRHDNELLKCRRINDYHHAKDAFLNIVVGNVYRTKFTANPRQWIKKNRNTNYSIRRVFDYDVKQGNTIIWYGNKNETSKHTIDQIRHTMSRNDILYTEYTYCEKGKLFDETLAKKGNAKAVPLKKNLDPLKYGGYTSIKTSAFAFIEFDDKKKERKTHIVEIPIYVANIAKREPEAVIKYLEEQKGYVNVVVKKYPIKKNSLLKIDGYLARLRGGDSSIITLKNAVQLVLDKKSYEIIRKVEKYLDHNSKYEANSKLEKFNENDLNIIYNELCLKLRNSIYQKRPVHQLETLEQGIDNFKSLESLKDKAKIINELLVMFRCDAKTGMDLRLIGGSSNSGRMRISKSRLTSKSLKLINQSVTGLFETEEELV

SEQ ID NO: 15078 - protein, 1020 aa, unidentified
  REGION 1..1020: note = Cas Enzyme sequence
MRVLGIDGGIASVGWALLDLDHDASALTIVAAGVRTFDAPETAKERTPTNAVRRLHRGQRRVIRRRRQRMNQIRRLFHEAGLLPNAASDALGQKGLNPWRLRAEALERPLTGTELAVVLGHIARHRGFKSNAKRDAAANAADETSKMKKAIAATQERLQGYRTVGQMFDADPAFRDRKRNRGDFTRSILRADQESEVRKIFAEQRRRGSRLASEALEEDFSRTAFFQRPLQDSEHMVGSCPFEPKENRTARRSYAFEMFRLLSRLATISLSAAGQDVRLDSGQINRIAEDFGKTKGISYKAVRRTLDLDTRTRFVGVSEKDEKNDIVARHGSAAEGTATLREAVGPSGWRLLMHNPVLRDRIAEVLSFREDPASIRAGLAEAGLKDPLLDAVMQGVERGTFSQFTRAGHISAKTARKLLEPLRRGLDYRAACDEVGYDHDARTAVSLEDVRNPVARKAVTEMLKQVRAIKEAHGLPDYIHVELARDIGKSAEERDKITKGIEDQNKKRSKSRQDLEELFERRLVGDELLRFELWKEQNGWCLYTGGQIKPAWIASGDNVVQIDHILPWSRFGDDSFTNKTLCLASANQGKKNRTPFEWYEEEGLDWPLFASRVEACKEMKGRKKGGFYLRKNAKEVEETFRNRNLGDTRYATRLLLDMLARLYPKDGKVHVLARPGQLTAKLRRAWGLDDLKKDDKGNRIDDDRHHALDAIVVAATTQAMLQRLTIAVQEARRQGLPRGFDFTQAPPPAAGFREVVRATVGHVFVSRADRHRTRGEAHAATIKQVRTVDGVDVVYERKSVEKLTLPDLKNIPVPEPYGKIADPAKLRNEMVEELRRWIEADKPKDAPPRSPKGDVIRKVRVATKDKVAVSVRGGAADRGEMARVDVFAKADKRGTAEYYLVPIYPHQIADEASNPKPPNHYIVQSKPERPLDESHRFLFSLYSHSLLEVVKSDGLVIRGYFKGMDRSTGAIAIADPENPRALNRGIGVKTLVRFKKLNVDRLGNVTEVRNEVRTWHGVAC

SEQ ID NO: 15079 - protein, 1060 aa, unidentified
  REGION 1..1060: note = Cas Enzyme sequence
MIKENLRFGIDLGIGSCGWAVLDEPVGKRTEGRILATGSWMFDVPQTDKEQKPTNQVRRESRLLRRVLRRRRGRMNAVRHLLHDNGLLPSADRDALKCDKGQRAIDPWEVRARALDRPVSPREFGVALGHIAKRRGFQSAAKGAMANKASEDQKMLAAMERTQERITRYRTPGEMLARDPEYSARRRNRDDVYDRTLCRSDIEAEVRTLFSAQRRFGQSFATSELESKFSEIAFFQRKMQDVENLVGRCLFEPEERRAPKSAPSFERFRLLSRLTTLRIDAADGPRKLTPDEIARAAADPGRTAKLSYRHVKKLCGLAEDSRFVGVKKEDEDQDVAVRKGNAMPGTAALRKALGEKAWAEAAKWPAELDEIARVVVFRKSEDSVRKGLNCLEIPVTWRDTILAAWTDGAFSRLTGAGHISAKAARKLLPHLASGTVYSEACQKSGYDHTASGLSARNQVINKVGFNSLVAEMGESIANPVAQKALTEGLKQLWAMRNRFGVPGAICIELARDVGHGVETRRKIESGIERVTRQRERERQEAAEQLNVETESISGDTLLRYRLWKEQRGRCLYTDKAIPPGAIAAHNNSVQVDHILPWSRFGDDSFNNKALCFAGANQQKRNRTPYEWINADRDGEAWDRFARRIETNTEMRGFKKRNFLLRNAHEAERQFRTRNLNDTRYAARLLAEAAKMLYPHGERQEKGGRRRVFTRPGSLTAALRHAWGLESLKKHNGKRVPDDRHHALDALVVAAVDEGQVQRLTRAFQHWEETGQARPLGRVEEPWPGFREMAKDTILGGDRRSGIFVARPERRRARGAGHDATIRQEVKRAGKIIVYERKKVADLKKTDLDRIKDPDRNESIVNTLRAWIEADKPSNALPLSPHGDPIRRVRLRSKSKPAIPVRGGTADRGEMVRVDVFTKPTHRTGREEFYLVPIYRHQVAAKADWPEPPMCYVVSGKDETEWPMLNAEHEFRFSLYQRSFLSLTKGNGERINGYFKGLDRSTGAVNLFAAHDPNTVYRSIGVKRLSELKKHQVDRFGNLSEVRKEARTWHGAVCTFPAPPA

SEQ ID NO: 15080 - protein, 1060 aa, unidentified; identical to SEQ ID NO: 15079
  REGION 1..1060: note = Cas Enzyme sequence

SEQ ID NO: 15081 - protein, 1025 aa, unidentified
  REGION 1..1025: note = Cas Enzyme sequence
MRIFGIDGGIASIGWAVLDITDDTASIVAAGVRMFDAPETDKERTPTNAVRRLHRGQRRVIRRRRQRMAALRMMFQQHGLLTEAHRDALKQPGLDPWRLRAEGLERPLSGLEMAVVLGHIARHRGFRSNAKREAGANAADETSKMKKAIAATQERLGQWQTVGLMFARDPNYTDRKHNRGLNFDRSIQRSDHEDEVRTLFATQRRLGNALATEELQVAYADKAFSQLPLQDSEHLLAACPFEPDQKRTARRCYAFEKFRLLSRLATLRLTVRGQEQPPLSAEQISLAAADFGHQKSLSYRWLRKTLDLDTGVRFAGVAEKDEKNDFVARSGAAVEGTYALREVLGDAGWRVLMHNPVMRDRIGEVLTFREDPGSIRRGLEEAGVAGLILDALMDGVATGKFHAFTRAGHISAKAARALIPPLARGLVYSDACAEVGYDHAKRVEVKLEDVRNPVARKAVTEMLKQVRALVHEYGLPEFIHVELARDIGKGVEERDKITKGIEDRNKERDKARKRLEEDILGRPASLEELIRYELWKEQNGFCLYTGDYIEPGWIAAGDNRVQVDHILPWSRFGDDSFVNKTLCLARANQAKLGRTPYEWFEAEGLDWPLFAARVEGCKEMKGRKKGGFYLRKNAVEVEERFRNRNLGDTRYATRLLLDLLARMYPRDGQLHVLARPGQLTAKLRRAWGLDDLKKDAEGNRLEDDRHHALDAIVVAATSQSMLLRLTKAAQEAERQGAPRGFDFEHVPLPAGGFRDVVRDVVKDVFVSRAERRRARGEAHAATIKQVREIDGAQVVFERKAIERLTPADLDNIPIPEPYGNIGDPGKLRDETVAELRRWIEAGKPKDALPHSPKGDVIRKVRVANKDKVAVEVRGGTADRGDMARVDVFAKADRRGRKQYHVVPIYPHQIADRDAFPQPPDRAVIAFKLEADWTKVDPTFDFQFSLYQNSFVEVAKPDGEIIRGYFKGMDRQGAQIHLALHSSQRSLIRGIGSKTLLAFHKFAVDRLGRMSEIEHEKRTWHGEACT

SEQ ID NO: 15082 - protein, 1053 aa, unidentified
  REGION 1..1053: note = Cas Enzyme sequence
MIDEQLTFGIDLGIGSCGWAVLRHPALLGEAGRIEGLGSWCFDVPETAQDRVPTNQVRRSNRLLRRVIRRRRKRMIDIRRLFHAHKLLPAADCDALKQPGLDPWQLRAKGLDAPLQPAELAVALAHIAKRRGFKSAAKRKAANATSDDTKMLAALNATQERLARYRTVGEMFARDPDFAARRRNRDGLFDRTTRREDLTHEVGRLFAAQRRLGQNFASVDLEEAFTAIAFRQLPMQDSEQLVGTCVFEPQEKRTARLAPSFERFRLLTRLVNLRVRTAGGERSLSPDELARATADLGKTAKITVKKIRGLIGLTADECFTTIKPEDEERDIALRTGEATAGTWALRKALGEALWAEASARPDQLDAVAHALSFFETNQTIAARLREIGLHPDVLDALLTALDAAAFARFKGSGNLSTKACRKLIPYLEQGHRYDEACRFAGYDHAASAMSGREQVTSKALFNRLVDDVGHNIANPVARKALTEGLKQLWAMRNRWGLPGSIHIELTRDVGNSIEKRREIKNQIEKNTKQRDRERDEVRGHLDITDVDSDTLLRYRLWKEQGGKCVYTGENIVVSQVIATDNSVQVDHILPWSRFGDDSFNNKTLCLASANQRKKGQTPYEWFTRDQSPDAWAVYTQRVETNHSLRGFKKRNYLLKNADEVAEKFRSRNLNDTRYASKLLAEAVKLFYPKGERQEKGGRRRVLTRPGALTAALRQAWGLESLKKVDGKRVEDARHHAIDALTVAAVGEAEVQRLTKSFQTWEQQGLGRPLRHVDPPWPGFRSHVLTAYDGILVARPERRRARGEAHMATIRQLLERDGETTTTERVAVLALGLDKGRFVEAKALKQLERIKDPERNAKTAEAIRAWISAGRPMDKDSLPRSPAGHVMTKIRLMSSTKPAVMVRHGTADRGNFVRIDVFTKPNAKGLDEYYFVPIYPHQIHFENPPNFYVSRGSIELPLTRDHKFKMSIFNRSFVEIEKQDGRIISGYLASFNRSVTAIKIAHHNTMALIEQSSGAKTLKRFSKYNLDRFGARAETKSEVREWHGVACTSPSPPD

SEQ ID NO: 15083 - protein, 1093 aa, unidentified
  REGION 1..1093: note = Cas Enzyme sequence
MHWRLALDLGTNSIGWSALRLDKDGSISRFLDMGVRIFSDSRDTKSGMPLNEERRICRQMRRQRERKIRRKQAMKAFCIQHGLLPVDKETRQLISSWNPYKLRKDALERPLDPYELGRIFMQFAGHRGFRSIRKEQNKTKSAEVSGMKAGIEKLSTVLNAKTLGQWLYDQQQKGEPVRFRPTLEGTQIIYPFYPSRDMYEQEFERIRQNQMASFPKLNWERVHWLIFFQRPLKQPERGKCQFYTDEERGYKALPSAHRFRILQEINNLAFYDADNGLTEIPVKMKKRLYTLLEQNKSIRFDTMRSLLGNSTIGTFNLENGKRDRLSGNETSVEFRKKTLWGPLWDNLSWEDQDAIIESLITENDESALQSLLQKYNVPPENIQNILGYNFPTGTTMLSARFMRDCAKVMIEQQLPYHEATQKLGFHHSKEEQPILRYSLPYYGQVLTALVQGAHGTPPDNLLFPNNQAKCEYIYGKIANPTVHVALNQVRKLVNTLIRRFGRPEEIILEVGRELKLSKAKKMEIFKEQTENQKKNERAESELKQLGLIAPSKEDIKKYLLWEELAPTGIARCCPYCGKPIAGNQLFGNEIEIEHILPYSKTLLNTRDNLTVAHRHCNQIKGERTPYEAFSSNPKGYNWEQIVERAQRLPYKKRIKFSPEALKNFQDLFLQRQLTDNAYISRSAKQYLAVICNMNRIWVSTGRLTSMLRGEWGLNTILNRSHDTWYKNRSDHRHHALDALVIGLCDRGLINKMARLNSGRGYARLAIPEFPIERESIHNKIETMAVSLKLDHGRDGKIFRETAMGKIRRIRKISPSELEEKEIKTIIPPKIKEHVQAICTNKKFKDVKEQIVKQFTHFYIVQEYWVSTTPITELSESDIKEGRIVDPIIRKKLQDFYKEHNGDKDELKKILQKFSEMTQIKAVRYTPKDQIPIPIPSAPYKAYMPLDYYRVDIWEIPQRKKSRKDKPSEYHGVFISRAMAYLDEKPDKPHPAARFIMSLYKGDIVQLEARDPNISFREFACIAGYSATQNKVDIQPLSAAGSIAEWAKNTNKQFVSRFWPEECKGQNFKSINSLFSEFIVKPVKITVDGRIFSR

SEQ ID NO: 15084 - protein, 1355 aa, unidentified
  REGION 1..1355: note = Cas Enzyme sequence
MKNKKYYLGLDIGSDSVGYAVTDEEYNLLKLHGEPAWGATLFDAPASKAERRGYRTARRRLERRKQRVQLVRELFAEEIAKVDGRFYIRQQESALFREDAGDAYSIFNDPDYTDREYYAEYPTIHHLIFELMKNPAPHDVRLVYLACAWLVAHRGHFLSNISKDNMDSFRDFNLVYKSFISFFTDNGYDVPWNECDEKELGNILKNKIRVTDKKKELTDLLYGGKKPSSEATEDFPFSRAAIIGLFAGSKVRPKDLFQNSDYENLEGITLDMDDENFINLSTELGDDYELIADMRAVYDWIVLADILGNYSCISEAKAAVYEQHRKDLRFLKDVIAKYRPEKYSEVFRAADKDNYVAYAYHTDEVSGSNLKRKDKEAFSKYILGIVKNISPDASDKQNFDDMITRLEDRTFMPKQKDGDNRVIPQQLYAYELDAILKNAAQYLPFLNETDEDGLSVADKISSVFSFRVPYFVGPLNSNSPRAWLARKSGKIYPWNFEKMVDLDASEQNFIEQLTNTCTYIPGEPVLPKDSLLYHKFSVLNEINNLCINEKRISVELKQEIYNNVFMCRRKVTHKQLISYLVANGYVEKGKENTVTGVDININSNLAPQISFKRLIESRVLSEQDVERIIERASYSEDKTRLAAWLKREYPNVNDADRKYICSLRIHDFGRLSRRFLSGVEGVRKETGEVMTVISALWETQYNLMEIVADADRFTFKDELKTIRDDYYSEHPQTLDNRLDDMYVSDAVRRPIHRTLDIIKDVVKAFGEPEKIFVETTRDASGKKKGERTTSRKEQILELYKKCGSEDVRLLQEQLEAMGEAANTKLQSEKLFLYYMQLGRCMYTNQPIKLEALGTKLYDIDHIYPQCFVKDDSIINNKVLVLSEANGAKGNVYPINSDIRKNMHSIWESYKAHGLISEEKFKRLIRTTPFTEEEKYSFINRQLTETSQSTKAVATLLNEFYPDTEIVYSKAGPVSDFRKEFEIYKSRLFNDLHHAVDAYLNIVVGNVYHMKFTRRWFNVNSNYSMKAKTIFTHPVICGGQTVWDGAHMLEKVKTTAAKNNAHITKFATFKNGGLFDQNPISAKEGLTPLKKGLPTEKYGGYNKAGSMFFIPVRYRVGKKTDIIIMPVELLCGKKFLEDAAFAKEYTFDRLGRLLKRTVDEFSFPLGMRPWKVNTVLSLDGFRVCITGGANGGKSIITQTLTQFAANKDWAFYLKKLEEFNKKNSKNPNYIYDEKYDKISAEKNLELYDLYIDKLENSIFSKRVNCPTEILKKGRDKFIALGIKEQAQALLNIHQVFGRISSGCDLSAVGGTSRSAATIGLSSTVSNWKKRYKDVRIIDSSASGLWEKRSCNLLDLL

SEQ ID NO: 15085 - protein, 1049 aa, unidentified
  REGION 1..1049: note = Cas Enzyme sequence
MAKKAPIRYRLGIDLGSKSLGWAVLRLDTEDKPDYLIRIGTRIFSDGRKSNDKKGASLAVDRRMARQQRRRRDRILRRKARLLELLRSLGLFPAPGEASQALKSRNPYELRARGLSAPLSAYDLGRAIFHLNQRRGFRSGRKSDSKNEEKGEIATAVTALTEKLQEKGFRTVGEYLYDRLQQGTGTRARRIGDGAKAIYEFYPNRAMVEHEFDLLWTSQSIHHPAICTPENASRIKGVLLFQRPLRPVRPGRCSLEPSEDRAPLALPSVQNFRIHQELSNLRLREPHSRTERGLTGAERSTLVALMAVKATISFAGIKKALALSRATTFNLEGLKREELLGNLSAAELGHADAMAEKWSALTLDEQDALVVQLLDERIPDDELLRRLQSDYGLEPSRAERVLNTKFPDGFGRVSLKAIRVLLPHLMEGLTYDKAAVAAGYGLTNTDGDGSLDLLPYYGAVLQRHVAFGTGNLNDSDEVREGKIANPSVHIALNQVRRVVNKLIDRYGKPTEVVLELTRDIKLGWKRAREIEKEQKHRQDENEALKEELKTLKNVGLSSDSILRLRLFRELAVGDGLTARCVYSGETISLTRLFSGEVEVDHILPYSQTLDDSIANKVLCTTSANRVKGNQSPFQAFGHSPSGYDWSAILDRAASLKRNRRRRFDEDALSRFQEEGGFLARQLTDTAYMSRVAREYLSFVCPPNKVWVTTGQLTWMLRGKWGLNKLISDGEDKNRLDQRHHAIDATVIACVDRSLVHRVARAAEASVDRRAGRLIESLDYPWPTFRDGLEHALTKMVVSYRPNHSPVGALHNDTAYGQAGTAMEPVGHLVKGDVKSYVRVLSLVGEKSENFLEHVIDQSIGQRLAKIADSAGSDKKAYQAMLEKFVADTGVKRVRWQETLSVIPLVDDRSGTPTKFVKADGNYCIEIFKGPNGKWSSEMIPTFTANQPRYMAFMKSPDYRRRTFSGYELVMRLIVNDMVKVGNGGASVLYRVQKLSAGRIVLAHHLGSGDLTCSDFSLKGVKTSLSLSAERLRKAHGKRVFVDEIGRVFG

SEQ ID NO: 15086 - protein, 1382 aa, unidentified
  REGION 1..1382: note = Cas Enzyme sequence
MKRILGLDLGTASVGWAVVNEAENSEEQSSITALGSRVVLLSADEKNNFLTGKSVSATATRTAKRGARRNLQRYKLRREWLKDTLVSAGIINENTCLNDSNSKELFATYISRAKAVTEQIALEDFAKVLFMINKKRGYKSNRKTDNTESEDGQIIDGLDLAKKLKARNITPGQYLLELFKENKKNKAVFYRSDLQEEVNRIWAFQSQFYPEILDNTLLSAITNKSKKAVIGLFKGIKNVEIADVKTKERTEKALTWRSEALHKQLEIGEVAYAIAEVMGAISQSSARLALLSDNSKHLEFEGLTIGQYLLKLLRNNPNSSLKNINFYRKDYEDEFNSIWNKQALFYPQLTESLRSTIFNSIFMQRNLKSCKALLANCELEFAEKKITLPDGSCQTRTIYSKVCPKSSPYFQEFQIWQSLSNIRIIDKENTHLTKSQELSYDQKVMLLPELMILSELKANKIIEILFGKKSNYTINMPSIKGNKTNETIFNALLEIVELTGHSIDNIVKTDANQQIEAVKSIFESLGYKTDFITFDSTIEGKDGLNQPYYKLWHLLYSYCGDNSKTGNEALIRKIEELTGLEKEEAKVLANCTFENDYASLSTKAIRKLLPHLQSNLDYSEACEAAGYNHSKRSRTKEDIKNKVYKDKLDLLPRNSLRNPIVEKILNQMIHVINQTSEAYGKPDEIRIEMAREIKKNKIQREKLANQLRQNTAELERIKDILRKDFKLSHISHNDILRYRLYEELSLNGYKTLYSNTYIERQQILDPTVTIEHIVPKALAFDDSFSNKTLEIQPVNGEKSNQTAFDFISKKYGSEALEQYINRVNNLFENGKISKTKRDNLLRKQEDIPSDFLNRDLRNTEYIAKKALEILEDYVPRVTPTIGEITKTLREDWQLVNIMRELNWEKYNSLGLTSFYYDRNGTKIGLIHNWTKRNDHRHHAMDALTIAFTKPSIIQYLNNLKSQNDKGSSIYAIQAKETYIDETRKRLIKPPYNIKQFRNDAKQMLDNIFVSHKAKNKVVTPNTIVTKKKRKAGKETKAEEKRTFLTPRGALSNETVYRKICNYETKEITINSKLTYEIALTIAKKKEREAVLERLAQHNNNPTTAFKNYNKNPIMLQTSVGEKPLISVKIVNYKELFVKRSEINEKLDIKRVLDAKVRARLTDRLKEYNNDPKAAFANLEENPIWLNEEKGIALKHVTTIERVVGLPIRPKRNINGEIMKDEQGQPLKSHYVATGGNHHVAIYEDEEGKWHEKVVSFNEAASRSIQKLPITDKDFNKELGWVFQFTMKQNEMFVFPDKEAGFDPLAIDLKDPANKSLISKHLYRIQKISSGDYYFRHHLETNVEENKEVKGITWKRITSLSPLQGIIKVRINHIGQIIDIGEY

SEQ ID NO: 15087 - protein, 1364 aa, unidentified
  REGION 1..1364: note = Cas Enzyme sequence
MGKKYGIGLDIGTSSIGWSVVDENGHIIRVKGQTGLGTRLFEEGQTAEERRGFRTTRRRLSRRRWRLRLLREIFDEPISSIDPNFFARQKESNLSAKDERFQTPYRLFDDLEDKEFYATYPTIYHLRWALMTEHRKFDIREIYLAIHHIVKYRGNFLRHGAPNTFKPGKLNFSERFGELNELWQLIFDEEESILPTENLDGISQLVLDTSRSRADRQKEMVKQLVALPTSSKAYKSVYTELAKAILGLKTKLYVLMGKDIAKADQKTWTFSLADVEDNLPNIEDELDIRDHELLEKLIDFQAAIQLIEIIPSGQHFSQGMVESYDRHAEHLQWLKEYAKQQSDKKRKAIYLAYDHYIDGGENGKAEIADDFYKELNKELKDDHSELAGKISHEIALEHFMPKQRTKDNGVIPYQIHQQELDLIINNQKQYYPFLGTENPVESHRRDHPYKLDELVCFRVPYYVGPMITSEKQAQTAAGQFAWMVRKTPDDSSEITPWNFEDKVDRIESANVFIQRMKTTDTYLIGEDVLPLESLIYQKFMVLNELNNVRVNDHRLSPSQKQRLFEELFKERNTVSRKSLQERLCTYGDVAELPVISGLADPKKFNSGLTTYRYLKNVFPEEIDQENRQADIEKIINWSTVFEDKEIFREKLSAIDWLTDKQRDQLVNKRYRGWGRLSKRLLTGIRDEQGKSIMDQLWETQNNFMQIVNQPDISAQIEKINATGMAKQDVFNTINELYTSPQNKKAIRQVLAVVKDIQTANHGVAPNWIYLEAARGAEQNPQRTRQRQRQLEDLFADRAKEIVSATVNSELKTQIASKKRMTDRYMLYFLQNGLDMYTGEKLNIDDLSGYDIDHILPQSLVKDDSLDNRVLVHQRINRNKGDVFASEKYGERMHGRWEIWHAAGLISDRKLKHLLMRPSEISKYATGFINRQLVETRQVIKLVTDILNSQYDSEQTKLVSVKAGLSHQLREELNLPKLRDLNDYHHAFDAFLAARIGTYLLKRYPNLERFFVYGQFQISKIDLRRFNFIHDLIGQKKTENSDSENRVIYDQETGEVLWNRDNEVKYFLKILSWKHLLVTQEVFENHGALFNQTIYKAKDDQRKKLIVTKQNRPTEIYGGYSSRNIAYLAIVRVHDKKGDYLRVMGVPISLLTQLRAARERGVEQEKSVLKQCLVPEFTMASGKTTDFDVVLTHVYLNQKIRDVVFGQEHEFGLRTNAYYRNFQQLVISLEVQRKIDSYDVTGEELLVAFDKICEQVMKYFPLYDRNEFRKKLVAGRNDFKGFPMDNVLDDKGKIIQVGKREIISRVLIGLHANGTTKGLKELGMGSNFGTLQVKAGIKLSMDAELIYESPTGLYRKKIKVADISK

SEQ ID NO: 15088 - protein, 1151 aa, unidentified
  REGION 1..1151: note = Cas Enzyme sequence
MRGKRYRIGIDVGLNSVGLAAVEVSDENSPVRLLNAQSVIHDGGVDPQKNKEAITRKNMSGVARRTRRMRRRKRERLHKLDMLLGKFGYPVIEPESLDKPFEEWHVRAELATRYIEDDELRRESISIALRHMARHRGWRNPYRQVDSLISDNPYSKQYGELKEKAKAYNDDATAAEEESTPAQLVVAMLDAGYAEAPRLRWRTGSKKPDAEGYLLVRLMQEDNANELKQIFRVQRVPADEWKPLFRSVFYAVSPKGSAEQRVGQDPLAPEQARALKASLAFQEYRIANVITNLRIKDASAELRKLTVDEKQSIYDQLVSPSSEDITWSDLCDFLGFKRSQLKGVGSLTEDGEERISSRPPRLTSVQRIYESDNKIRKPLVAWWKSASDNEHEAMIRLLSNTVDIDKVREDVAYASAIEFIDGLDDDALTKLDSVDLPSGRAAYSVETLQKLTRQMLTTDDDLHEARKTLFNVTDSWRPPADPIGEPLGNPSVDRVLKNVNRYLMNCQQRWGNPVSVNIEHVRSSFSSVAFARKDKREYEKNNEKRSIFRSSLSEQLRADEQMEKVRESDLRRLEAIQRQNGQCLYCGRTITFRTCEMDHIVPRKGVGSTNTRTNFAAVCAECNRMKSNTPFAIWARSEDAQTRGVSLAEAKKRVTMFTFNPKSYAPREVKAFKQAVIARLQQTEDDAAIDNRSIESVAWMADELHRRIDWYFNAKQYVNSASIDDAEAETMKTTVSVFQGRVTASARRAAGIEGKIHFIGQQSKTRLDRRHHAVDASVIAMMNTAAAQTLMERESLRESQRLIGLMPGERSWKEYPYEGTSRYESFHLWLDNMDVLLELLNDALDNDRIAVMQSQRYVLGNSIAHDATIHPLEKVPLGSAMSADLIRRASTPALWCALTRLPDYDEKEGLPEDSHREIRVHDTRYSADDEMGFFASQAAQIAVQEGSADIGSAIHHARVYRCWKTNAKGVRKYFYGMIRVFQTDLLRACHDDLFTVPLPPQSISMRYGEPRVVQALQSGNAQYLGSLVVGDEIEMDFSSLDVDGQIGEYLQFFSQFSGGNLAWKHWVVDGFFNQTQLRIRPRYLAAEGLAKAFSDDVVPDGVQKIVTKQGWLPPVNTASKTAVRIVRRNAFGEPRLSSAHHMPCSWQWRHE

SEQ ID NO: 15089 - protein, 1104 aa, unidentified
  REGION 1..1104: note = Cas Enzyme sequence
MSRSLTFSFDIGYASIGWAVIASASHDDADPSVCGCGTVLFPKDDCQAFKRREYRRLRRNIRSRRVRIERIGRLLVQAQIITPEMKETSGHPAPFYLASEALKGHRTLAPIELWHVLRWYAHNRGYDNNASWSNSLSEDGGNGEDTERVKHAQDLMDKHGTATMAETICRELKLEEGKADAPMEVSTPAYKNLNTAFPRLIVEKEVRRILELSAPLIPGLTAEIIELISQHHPLTTEQRGVLLQYGIKLARRYRGSLLFGQLIPRFDNRIISRCPVTWAQVYEAELKKGNSEQSARERAEKLSKVPTANCPEFYEYRMARILCNIRADGEPLSAEIRRELMNQARQEGKLTKASLEKAISSRLGKETETNVSNYFTLHPDSEEALYLNPAVEVLQRSGIGQILSPSVYRIAANRLRRGKSVTPNYLLNLLKSRGESGEALEKKIEKESKKKEADYADTPLKPKYATGRAPYARTVLKKVVEEILDGEDPTRPARGEAHPDGELKAHDGCLYCLLDTDSSVNQHQKERRLDTMTNNHLVRHRMLILDRLLKDLIQDFADGQKDRISRVCVEVGKELTTFSAMDSKKIQRELTLRQKSHTDAVNRLKRKLPGKALSANLIRKCRIAMDMNWTCPFTGATYGDHELENLELEHIVPHSFRQSNALSSLVLTWPGVNRMKGQRTGYDFVEQEQENPVPDKPNLHICSLNNYRELVEKLDDKKGHEDDRRRKKKRKALLMVRGLSHKHQSQNHEAMKEIGMTEGMMTQSSHLMKLACKSIKTSLPDAHIDMIPGAVTAEVRKAWDVFGVFKELCPEAADPVNGRIIKEDLRSLTHLHHALDACVLGLISEIIPADRKNVLRRAIIKRRLDQKMKQDFLELRKKRYYKLREKDGQTGASLVDLPNGIKENIREKLMEQRVIQHVPADMGGALLKETMQRVLSVDGSGEDAMVSLSKKKDGKKEKNQVKASKLVGVFPEGPSKLKALKAAIEIDGNYGVALDPKPVVIRHIKVFKRIMALKEQNGGKPVRILKKGMLIHLTSSKDPKHAGVWRIVSIKDGKVGVKLDLQRAHCAAPTNKKNECNWREVDLISLLRKYQMKRYPTSYTGTPR

SEQ ID NO: 15090 - protein, 1097 aa, unidentified
  REGION 1..1097: note = Cas Enzyme sequence
SERCRKSLFGVGPRRPGGANRETKKRLVALDRLLSEEFGWPLPNLEEYPDPYEPWHVRARLLDSYIADDAKRKEMLSIAMRHIARHRGWRNPYMKPASLASLPYPSEFLTNLNQDVSRAIGRKFASDATQGQLVDVFILGSSSLATTPELQVLEESEKDNSKNKPRDIVLGRVRGDKGVIEGKLHQSDNAEEIRRICATQKISQDQVERLIEAVFKAKDPREVGAANKLVGHDKLPGQGKYIRAERAHPAFQKFNIVATLTNLRINEAGSKRTLSPKELQTLTNYLSNVGPNDEVTWFDVAEKLKINRSDLQGTARASYDGQAALKYPPIDVTSVSIKKSKVKALKDWWKQASEDQRGQLIDYLPNSGRSDTPQTDHELDDLTKLTQSFSKKDLEELEKISLPAGRAAYSVNSLTKLTQLMLEEGIDLHEARKRLFNIGDDWKPTPEPINSPVGNPAVDRVLKQVARWIDAATERWGIPVSVNIEHVRGGLVSEKVVRELIRDNEARHKKNMEVAEEIAKRLGLSGRALRSHTVKYFALRRQNCQCLYCGTKISFETAEMDHIVPRSNGGSNNKSSNLAAVCRTCNASKSNIPFAVWVSSGKAGPGVSLEGTKERVNSLLLTKTDLQKEDDSLVEIYSKKEGEKFKKEIIARLESKKPEEEFDGRSLESVAWMAVELHERILGYYESLLKDSGQKVPRVGVYRGAITAEARKASGFENRVELLGGKGKTRLDRRHHAMDALVIALMNQSVSKLLSWRMQLRDSQRISGMPETWKEFHGFNRNDYRHWDAWAKAMRIAVELFNDALEKDDVHFSENKRLGISLAKAHDDTIKSLCSYVLGGAFSAELIDRAETPALWTALTKQPDFDVKNGLPEDPTRCITVNGKQFGPTDEVNFFASGAPAIKVRGGFAGIGDTIHHARIYRIDGKKTTYAMVRVFQTDLRRMKHKDLFTEPLKPSAISMRTASKTIRKAFADGTATQIGWLVEGDEIRIETDRYPSNDIGVLLRKYPEASSWRVCSFKTPTKVRLRPNLISKEGLSEKYFDADTLKAGRKIIDYPGWIVAINALLEKGMVTVIRRNTLGEERWVSRAHLPVSVDLS

SEQ ID NO: 15091 - protein, 1089 aa, unidentified
  REGION 1..1089: note = Cas Enzyme sequence
LGGRPPGAGGANRETKKRLVALDRLLSEEFGWPLPNLEEYPDPYEPWHVRARLLDSYIADDAKRKEMLSIAMRHIARHRGWRNPYMKPASLASLPYPSEFLTNLNQDVSRAIGRKFASDATQGQLVDAFILGSSSLATTPELQVLEESEKDNSKNKPRDIVLGRVRGDKGVIEGKLHQSDNAEEIRRICATQKISQDQVERLIEAVFKAKDPREVGAANKLVGHDKLPGQGKYIRAERAHPAFQKFNIVATLTNLRINEAGSKRTLSSKELQTLTNYLSNVGPNDEVTWFDVAEKLKINRSDLQGTARASYDGQAALKYPPIDVTSVSIKKSKVKALKDWWKQASEDQRGQLIDYLPNSGRSDTPQTDHELDDLTKLTQSFSKKDLEELEKISLPAGRAAYSVNSLTKLTQLMLEEGIDLHEARKRLFNIGDDWKPTPEPINSPVGNPAVDRVLKQVVRWIDAATERWGIPVSVNIEHVRGGLVSEKVVRELIRDNEARHKKNMEVAEEIAKRLGLSGRALRSHTVKYFALRRQNCQCLYCGTKISFETAEMDHIVPRSNGGSNNKSSNLAAVCRTCNASKSNIPFAVWVSSGKAGPGVSLEGTKERVNSLLLTKTDLQKEDDSLVEIYSKKEGEKFKKEIIARLESKKPEEEFDGRSLESVAWMAVELHERILGYYESLLKDSGQKVPRVGVYRGAITAEARKASGFENRVELLGGKGKTRLDRRHHAMDALVIALMNQSVSKLLSWRMQLRDSQRISGMPETWKEFHGFNRNDYRHWDAWAKAMRIAVELFNDALEKDDVHFSENKRLGISLAKAHDDTIKSLCSYVLGGAFSAELIDRAETPALWTALTKQPDFDVKNGLPEDPTRCITVNGKQFGPTDEVNFFASGAPAIKVRGGFAGIGDTIHHARIYRIDGKKTTYAMVRVFQTDLRRMKHKDLFTEPLKPSAISMRTASKTIRKAFADGTATQIGWLVEGDEIRIETDRYPSNDIGVLLRKYPEASSWRVCSFKTPTKVRLRPNLISKEGLSEKYFDTDTLKAGRKIIDYPGWIVAINALLEKGMVTVIRRNTLGEERWVSRAHLPVSVDLS

SEQ ID NO: 15092 - protein, 1153 aa, unidentified
  REGION 1..1153: note = Cas Enzyme sequence
MAVTLPKDDVRYKVGIDVGLNSIGFCAVEVDDDDQPIRLLNSLVFRHDAGIDPASRKDALTRKNVSGVARRNRRANRETKKRLVALDRLLSEEFGWPLPNLEEYPDPYEPWHVRARLLDSYIADDAKRKEMLSIAMRHIARHRGWRNPYMKPASLASLPYPSEFLTNLNQDVSRAIGRKFASDATQGQLVDAFILGSSSLATTPELQVLEESEKDNSKNKPRDIVLGRVRGDKGVIEGKLHQSDNAEEIRRICATQKISQDQVERLIEAVFKAKDPREVGAANKLVGHDKLPGQGKYIRAERAHPAFQKFNIVATLTNLRINEAGSKRTLSSKELQTLTNYLSNVGPNDEVTWFDVAEKLKINRSDLQGTARASYDGQAALKYPPIDVTSVSIKKSKVKALKDWWKQASEDQRGQLIDYLPNSGRSDTPQTDHELDDLTKLTQSFSKKDLEELEKISLPAGRAAYSVNSLTKLTQLMLEEGIDLHEARKRLFNIGDDWKPTPEPINSPVGNPAVDRVLKQVARWIDAATERWGIPVSVNIEHVRGGLVSEKVVRELIRDNEARHKKNMEVAEEIAKRLGLSGRALRSHTVKYFALRRQNCQCLYCGTKISFETAEMDHIVPRSNGGSNNKSSNLAAVCRTCNASKSNIPFAVWVSSGKAGPGVSLEGTKERVNSLLLTKTDLQKEDDSLVEIYSKKEGEKFKKEIIARLESKKPEEEFDGRSLESVAWMAVELHERILGYYESLLKDSGQKVPRVGVYRGAITAEARKASGFENRVELLGGKGKTRLDRRHHAMDALVIALMNQSVSKLLSWRMQLRDSQRISGMPETWKEFHGFNRNDYRHWDAWAKAMRIAVELFNDALEKDDVHFSENKRLGISLAKAHDDTIKSLCSYVLGGAFSAELIDRAETPALWTALTKQPDFDVKNGLPEDPTRCITVNGKQFGPTDEVNFFASGAPAIKVRGGFAGIGDTIHHARIYRIDGKKNTYAMVRVFQTDLRRMKHKDLFTEPLKPSAISMRTASKTIRKAFADGTATQIGWLVEGDEIRIETDRYPSNDIGVLLRKYPEASSWRVCSFKTPTKVRLRPNLISKEGLSEKYFDADTLKAGRKIIDYPGWIVAINALLEKGMVTVIRRNTLGEERWVSRAHLPVSVDLS

SEQ ID NO: 15093 - protein, 1056 aa, unidentified
  REGION 1..1056: note = Cas Enzyme sequence
MAAVAPPSFRPGLTLGIDLGTNSLGTALVRTDLDLIEFMGVRVFPAGVEGNLEEGKEESRAAKRRQARLARRQTQRRQRRMYKVFHLLQRMGLLPAGNRVEVLDRLQHELEQRYPETTVLPWFLRARALEHALAPHELGRALYHLAQRRGFLSNRVGGKEDDKERSEVKATIKGLAEAIEAAGKRTLGEYMASLGAREKLRNSAESSGHYTHRSMFEHEFALIWDSQRVHHPEILTENRRAALHHAMFHQRPLKDQSYLVGQCELEPAEKRAPLRLLAAQRFRVLGFVNNLRLRLDDGNERKLTPNERAVLLDLCEKREKLTIAKARSEIGISKGQKFTIEEGGEKNVPVNLTATRLRAALGQTWDGLTPLQKDDLVEDVGDGKRNPTDEGLERCGRDKWGLPQEIAEALGKVRLPDAYGRYSLRALVALLPAIEEGLTVEDAIRALYAGARKSAEPLPLLPPVRDEKMKTLLGEIRSPAVQRSLTELRKTVNAIIRRYGLPEKIHIELARDLKKSKKERQKQTEINRDREKLRQEATGELRKHDVVRFANPRNSDIEKYLLATEARWQCPYTSKKYGVTDVFGDHPQVDVEHIIPRSRSLDDSYLNKTLAYRSANMEKGNRTPREWLFESDQEQYDRMIGVVSGFDPRFEVGKKLRRFSMELSDPDSLLKEFTERQLQDTRYASKLACRYLGVLYGGTSDASGNQRVFASAGQVTAKLRRAWDLDRILSPDKPEKSRDDHRHHAIDALTVALSSTTLIRALATAAGEADRLFRRKIILPVPWVGFGEQARSAVENIQPSHRPMRKLSGPLHKETFYSRPRKHAVGTDRKGKPIEEECVHYRVPVTSLSSAKSFESIVDSRVRAAVEERAAQLGGGGNRFEKNWPELVTRKGQTVPIKRVRIRKVEGVVSIGKNGRERFVIPGSNHHAEILAELDANGRVKRYLCETVTMLEAVERKRQSVPVVNRDHGPGYKFHCTLSEGDLVEARGPGDEASRIWKVRTVRESQQLALTPALDARPKAVVQKDGMWSPSVNPLFRGGARKVLITPLGEVIPAND

SEQ ID NO: 15094 - protein, 1034 aa, unidentified
  REGION 1..1034: note = Cas Enzyme sequence
VESESKGDFILGIDLGSNSLGTALVSPSTSAIVHLGVRIFPAGVEGDLDKGKEESRSAKRRGARLARRQTRRRARRMYKVFRYLQTWGMLAEGPQQEVIFALQQKLERRYPETQILPYFLRAEALKRPLDVDEIARVLYHLAQRRGFLSNRAAGAKEDPKERSVVKSDIKGLKAEIDSKGFRTLGEYLASLNPHESRIRGRYTHRSMYEEEFKAIWDAQAQNHPDLLNSFRREKLQRALFHQRPLKDQSDLIGDCELAPGEKRAPLRSLLSQQVRVLGFVNNLRLRRDDGNQRTLTEPEREALLDLCSKSPKLTFGKVRTELKLGKLKFTIEEGGEKNVPCDLTSSRLRDAIGVAWDGLTPEQREDLVEDVGDPGRFVTEEEMEKCARGKWGLDAETAQRLAEVHLPDGYGRFSLAALRKLVPWLQQGLTVEEAKDNEFPDHRKAADPLPLLPPVSEVLGEVRNPAVLRALSELRKTVNAIIRRFGKPAFVRVELARDLKRGKQERLRDSNRNREREKIREEAVAELRKHDANRFANPKRSDVEKYMLAKEANQRCPYTGQVYGFTDVFGEHPSVDVEHIIPYSRCLDNSFVNKTLAFRPANAEKGNRTPHEWLHEGDPERYDRMVDIVKHFDSRFQTAPKLARFTMALTDPDSLLDEFSQRQLQETRYASKLAAKYLGALYGGVNDADGTKRVSTSAGQITAILRKAWDINRILSLSPFKSREDHRHHAIDAVSVALTSQQTVQQLSRAAEDAYRVRKHHLTLQSPWENFNADLRSAVEEIQVSHRPTRRLSGPLHEETIYGAPRKTAAGKTAVHYRVPVVTLSTEKDFSQIVDPTVRGAVVAKAQELGGGGPKFEKNWPQLRTRKGALIPIRRVRISKVTGTQVIGKPGRERSVIPGSNHHAVIYAELNLKGETARYRSCTVTMLEAYERQRQGVAVVQRDHGPGTVFRCTLSEGDLLEAKRPGTEPAAIWYVRSVKSNEKIVMSPSRDARRKDEIIASRDLWEIAANVAFKQCGARKVLVNHLGEVIPAND

SEQ ID NO: 15095 - protein, 1216 aa, unidentified
  REGION 1..1216: note = Cas Enzyme sequence
KSDLQAEFDKIWSVQSAFYPEQLDAATKANIIGKNKKQTWAILAKQCNLVGIKRPSNKEELTLQNYTWRADAVTKRLSLEEIAIVLQEINGELVVSSGYLGKISDHSKELLFNHQTVGQYLMAQLDKSPNVSLKNIIFYRQDYIDEFETIWSKQAEFHPELTDDLKREIRDEVIFYQRRLKSQKGLVGFCEFEQKQISVEKNGQTKEITIGYKQIPKSSPLFQEFKIWHTLNNVQVSLLGVRSRKPKYIGANLFSDLSVNEDLYNNGSRFLTKEEKEVLARELSVKEKLSKTEVLKLLFKDYKSLDLNYREIQGNSTGAKFYSAYAKIIELSGHKPINFKDPVDDITDEVSSVFHSLGWHTDFLKFDSSLPLESQSYYRLWHLLYSFESDNTPTGNGKLKDKIVELCGIDREYADIIADITFDSDYGNLSAKAIKGILPYMKDGLIYDKACEKAGYRHSASSLTKDEIETKELKDHLSILPKNSLRNPVVEKVLNQMVNVVNQLIDTYGRPDEIRVELARELKKNAKERRELTESIAKATNDMADYKEILQKEFGLQHVSRNDIIRYRLYKELKGNGYHTLYSKTYIPKKELFGKNFDIEHIIPQARLFDDSFSNKTLELKSVNIEKGDKTAYDYVSATNIGGGVSEYVARCENLFPPHSAKLRKLLMREQDIPEGFIDRDLRNTQYIAKKALSMLSEVCRRVSSTTGAITDQLRQDWQLVDVMKELNWEKYKAAGLVEYFTDRDGRVIGKIKEWTKRNDHRHHAMDALTVAFTKPIFVQYFNNKNASTKPNSNEYAIKAKYVQNGKVISPIPLNKFRAEAERQLQDILISLQAKNKVATRNQNKTKTATSGYNVRQQLTPRGQLHNETIYGSHLEYICTEDKVNASFDEQKIMTVANQEIRNALLKRFIENGRDAKKAFTGKNALDKNPIPVNLSDGPTTVPTKVKTVTLQQVYTIRKPISENLPIDKVVDAGIRELLKKRVEEYGSAKAAFSNLDKDPIWINKEKGICVKRVAIWAAVNPLAIRDKRDKDGNLIVNEHGAHVPNDFVCPSSNHHVAIYRKPMTDKQGLPILDSDGLPKQELVEQVVSFIEAVARVNQGQPPIARDFKSNEGWTLLFTMKPNEYFVFPNEETGFNPNDVDLMDPRNYALISPNLFRVQKLSSKDYYFRHHLETTVDNNKTLHGKTWKRICSVTGLEGIVKVRVNHLGQIVAVGEY

SEQ ID NO: 15096 - protein, 1245 aa, unidentified
  REGION 1..1245: note = Cas Enzyme sequence
MTISLGLDIGSNSVGSAWVDADKKTIHLGVSIFPAGVDEQENKRGSPKNQDRREKRSQRRTIHRRAKRKRRLTQFLIERELLPSDPDELQKLFNCDPWQLRRKALHEALPPYEFGRTILHLAQRRGAVGVETDPDDPEEGKVKEGMDRLSAMMNEADAETVGQFMADLIDERRQSNGAVTWNDPIRNRQYRIPEKEILFAGRELIREEFRLIAERQRSFKDSSLAAILTDELIKELDDPSETGTWRHRGLLFGQRRTYWDTGTLGRCDLEPTERCVPIADMHAGYFRVVETVNNIRITERGEDERALNPKERDQVIAALRSQKTASVSAIRKALGIHKKAVKDFYTLNIERDKDREINTDWFYHAIVPDVFNEERWNSMDEKAQDSVNRALLKFDPDNRQHEKKLREGAKTWWGLDADAVDRLINAWKDRPKLEKRLKLSRTAIRNLLPYMNEFDEENERWPTQIEARVRFAEDRENDATDEQRDRYRLGVQVLSKNDRQYLRKHKELIPPAPMLSNPVVRKAIHEVRRHILHWRRKFDRMPDRIVIEYVRSATQPGKVRQATLDRNRKREDKRKKIIEQFKLHRLTSNQQRSAIERILLLRQQKGLCAYTGKTISEQAAADGRDVESDHIVPKSRSQDNGFNNKVLVTREANRGKGKKTVKEWMTPEQFTAMEQRLAYLEKGESPSDYFTKKDCGRKWENLHRDAPTTANLLASQLTDTAYAAKQVGQWLSEVLYEGERDGRRRVFTTKGSYTSILRNDWGLSESDLDRQWHDIYEPGEAEGDNRSRRTRKEKNKDRADHVHHAIDAVCIALTSHDRIKDLARFSEEQEIARADLGHWPKRRALPPPWPALPRNPTEDQLRTATAEFRQQVAAAADQLTVSHRPVKRRLVGSFHEETHYGPVLEPLPPHRTEKFDTLFTNRINAEGLTPNHLRVPNGWDDLSNQLDDDDVSSGEKVAIRQELAGMPDHSPGKSGIVRDRTLRDRLRKCLKDNSVDPDEFTKNQIKQLVKDGKLTMKSGVPIKGVVLLRTNTDPVIIARKKLNPTTGKMVRDPNPRTARVYIGGNNHHVEIREHTKKRKGETVAEWAGKVVKTFYAAKRNADRLKALKDAGVPSSKKLRQMSKEERKRFAPIVADVNQRFPVVDRSDNDAGNFVMSLAEGEMIFARRWNPKNKQPVGSSGYFVVCKCDPNGSIHFAPHWDARSASEQDRWSVTPSNLKKCGEEPGKPPYKVRVSPLGEVRRLERD

SEQ ID NO: 15097 - protein, 1108 aa, unidentified
  REGION 1..1108: note = Cas Enzyme sequence
MSEIGVSTQPYVLGLDLGSASLGWALVGIDAMERPSSLIRAGVRIFEPGVDGSALDIQQGKDQSKAVDRREARLRRRQLRRRVARQRELFGVLQGAGLLPTGDTQGTGIGSEQRHRILNNLDVTLSNRHRNGTDQEIFAQMPLYALRKKALYEPLALDELGRVFFHLSQRRGFQSNRKDVKKKTKDSEDQGQVKSAIHELEQAIEAAGAQTLGEYLAGLDPHEQKVRRQWTGRKMFEKEFQMIWDKQKEYHTDLLTPELHDRIWNLLFFQRPVAAQKHLVGKCELEPDKRRAPWAALLAQQFRLLQKVNDLRLIEEDGNELPLNEDGRAAVFDLLENHGTQSFAKIKQHLGLPKTAQFNLERGAGKSPQLKGNLTAQSMRKVFGERWKEFSAGKQNQIIENWRNSEKDEELKREAMEHLGLDEAGANALVNEKAPGDYCSLSLVALGKILPLMRAGKSFKEAETEIYGNRFSGAAVHSLIPVLRPNRKHFRNGTPPPQDPLMASIANGLRNPAVERSITEMRKVVNAIVREYGKPCEIRIELARELKKPRSKRLDETARNRKREAENKALAERMHNECGTPQNPSRNDLEKAKLWVEQQGECPYTGRSLPFSRLFDDNNGFDVDHILPRSRHPDDSYQNKVLCWGDTNRMVKRNQTPYEAFAEQDPENWHQILARVARWKNPGKSRKFEIRSTDELADFSSRQLNDTRYTSLLAARLLSTLYGGRDLAENGRKRQIIFASTGAVTATLRRNWGFEQILRNMIPPEPTESTGKPRTDHRHHAIDAIVIALTRNDVIQSMARASALEPWQPGTRSWRHVPQPWRTPDFFCSVEEQVREMLTSHRPEHKVSGELHQGSNYARPYMYKGKSIVHSRTLVSELKVEQIEADDVIVDRAVRDILRAKLKEIGGTLKGSDNVKAFEKPENTPYILTPAGKRIPIRKVRIRETKNPLLVGAGSNERYVASGGIHHVDLFVTRDEKRRETWDSKVIQTTEMYDRFPKHDRRPGRPHTESKNFSRLRQNDDDDESRFLFSLMKSDTIQLEQDGHRQIFKVKKFEATGKMTFIPINNAMPDKLQYSTGAAWSKMPATLKSMSPQKVVVDLLGRVHPAND

SEQ ID NO: 15098 - protein, 1125 aa, unidentified
  REGION 1..1125: note = Cas Enzyme sequence
VEKVNGKPDPVALTFGFDIGIASVGWAVLAPNRIVALGVRAFDKAETAKEGDSLNLVRRTARLMRRRLRRRAWRLIKLVRLLKHQGVIADNHLFRPEHPCPVSPWQLRLEALDRRLNSEEWARVIYHLCKHRGFHWTSRAEEKQAEQDKKGEGGKVKQGLAGTAKLMKEKGYRSAAEMVLSEFPDAQRNKQGDYTKALARTLLGDELAMLFRRQRELGNPHAASALEAAVLGSGDKKSGLFWVQKPALAGSDLLEMLGKCTFEKTEYRAPKASFTAERHVWLTRLNNLRVFVDGEPRPLTEQERRIALPLPYQQAGDLTYKQLRGALVKTGCLPDTFRFVGLTYPSAAQLADAKAKDPETAALIKLPAWQALRLTLKRAGLETEWESVAGAAIDGRPELLDQIAWVLSVFKDDAEVAAELRKLPLSNADKMIEALLDLRFDRFHALSLKALRNIVPHMESGLRYDEATEKAGYHHSQLFKAGAGEHKTLPSFYARRDQDGRMVFSEDMDVPRNPVVLRALNQARKVLNALVRTYGSPQQVRIEMARDLSRPLDERRKIKAEQDEYRDRNEQDKGRFAELFGQPPSGVEFEKWRLYREQQCKCAYSIEPIDVHRLLEPGYVEIDHALPYSRSYDDSKNNKVLVLAAENRNKGNRTPYEYLGGADDSPRWRQFVGFVESNKAYRLAKRTRLLRKNFGEDEAKEFRERNLNDTRYICRFFKTYVERYLKLAEGSESQRCVVVSGQLTAFLRARWGLLKIREESDRHHALDAAVVAACTHGMVKRLSDYARRRELEHVSAGFVDLQTGEIVDSAAYAQLERHFPAPWPNFRHELESRLKIDDLALLRAEMERLGTYPIEALDALRPLFVSRAPQRRNGGAAHKDTIYAQPEKLKAQGSVTQRIPLASVSLKKLEQVDSFVDQLIDPHRNQKLYAAIRDRLKAHGGKGDKAFPLDNPLRKPDREGNPTGPIVRAVTVVIDKLSGIPVRGGIAKNDAMLRVDVFTKAGKFHLVPVYVHHRVKGLPNRAIVALKDEDEWTLIDDSFAFCFSLYPNDLVQVNLKKESLMGYYAGCDRSTGAINLWAHDRNQKVGKEGLIRGIGVKLAISVAKFHVDSLGNTFPAPPENRRGLA

SEQ ID NO: 15099 - protein, 1128 aa, unidentified
  REGION 1..1128: note = Cas Enzyme sequence
MVTSSENIPGIRYRVGIDVGLRSIGFCAIEVDRDDQPVKLLNSMVFIHDAGVDPNENKAAKSRKLTAGVARRTRRLYRTRHQRLVNLDRVLSKEFGWPLPDLMAFKDPREPWHVRSKLLEGYIADDDKRKAALSIALRHIARHRGWRNPYAKVESLLQPAEPSDFLKGLNERISESLGRSFPADATPGQLVDAYLAHPDYVKKAGTPKLRGPKGILAGKLHQSDNAEEIRRICEAQQIDPADRDRLIRAVFQAKSPKGSAKERGLVGYDELPGQGKHVRAEKAHPAFQKFRIVSVLANLRVREGRAERPLTPEELQGLTDFLLVAGLKQEVTWQDLADNLGIERSDLRGTAKASFDGSPVLRNPPTDVTTEKILACKVKWLKEWWKDADDEQRGYFVDAFSNSGGSEDSSDVNDEVAELLEQATEDDQLEFEKISLPQGRAAYSLDSLRRLTDRMLRDGVDLHTARRLEFNVGDDWKPAVEPIGAPTGNPAVDRVLKQVSRWLHAATERWGEPTVINIEHARDGLGSERVARELMRENDRRRSANAAAVAEMAAQLKLSGRVRRSDQIRYFALQRQNNECLYCGTEITFTTAEMDHIVPRADGSSTNDRSNLAAVCRTCNHKKGAVPFAAWASSDRANTGVSLKGALDRVKFWVRDNGMSPKQFKQLQREVSARLKSRKPDEEFDGRSMESVAWMAVELRTRIEGFYRTRDEESVPSVGVYRGQLTAEARKSSGFESRVNLIGGRGKTRFDRRHHAMDALVIALMNPSVSRTLALRVNMRDAQRIAGLEETWKNFYGKPGEASNRFESWRESMLRGVELFNIALSDNAIPFVENIRLRVGSSVIHDATVHSFCPPKTPDGEQIITKGYGEQHRLGDALPVELIDRAETPALWAALTRCPDFDPKKGLPVNPNRTISVNGTRVGPTELLNFFGSSAACLKVRGGYVELGSSIHHARIYRIDGKKTAYAMVRVFQVDLLRLKDQDLFTTPLKPSTISMRTAEPKIRQALADGTATQIGWLVEGDELQIDTSKYSGGFIGEVLERYPEATSWRVAGFPHPAKLRLRPYLLSAEGLDKEASKDMTDLLDGQGWRPAVNVVFSPGTVQITRRNALGELRSSEYSSLPITRVMR

SEQ ID NO: 15100 - protein, 1138 aa, unidentified
  REGION 1..1138: note = Cas Enzyme sequence
MTTSSENIPSIRYRVGIDVGLRSIGFCAIEVDRNDQPVKLLNSMVFIHDAGVDPNENKAAKSRKLTAGVARRTRRLYRTRHQRLVNLDRVLSKEFGWPLPDLMAFKDPREPWHVRSRLLEGYIADDNERKAALSIALRHMARHRGWRNPYAKVETLLQPAEPSDFLKGLKKRISESLGRSFPADATPGQLVDAYLAHPDYAKKAGTPKLRGPEGILAGKLHQSDNAEEIRRICEVQQIDPADRDRLIRAVFQAKSPKGSAKERGLVGHDELPGQAKHVRAEKAHPAFQRFRIVSVLANLRIREGRAERSLTPEELQGLTDFLLLAGLKQEVTWQDLADNLGIERSDLRGTARASFDGSPVLRNPPTDVTTEKIMACKVKWLKEWWKDADDEQRGYFVDAFSNSGGSEDSSDVNDEVAELLEQATEDDQLEFEKISLPQGRAAYSLDSLRRLTDRMLRDGVDLHTARRLEFNVGDDWKPAVEPIGAPTGNPAVDRVLKQVGRWLHAATERWGEPTVINIEHARDGLGSERVARELMRENDRRRSANAAAVAEMAAQLKLSGRVRRSDQIRYFALQRQNNECLYCGTEITFTTAEMDHIVPRADGSSTNDRSNLAAVCRTCNHKKGAVPFAAWASSDRANTGVSLKGALDRVKFWVRDNGMSPKQFKQLQREVSARLKSRKPDEEFDGRSMESVAWMAVELRTRIEGFYRTRDEESVPSVGVYRGQLTAEARKSSGFESRVNLIGGRGKTRFDRRHHAMDALVIALMNPSVSRTLALRVNMRDAQRIAGLEETWKNFYGKPGEASNCFESWRESMLRGVELFNIALSDNAIPFVENIRLRAGSSVIHDATVHSFCPPKTPDGEQIITKGYGEQHRLGDALPVELIDRAETPALWTALTRCPDFDPKKGLPENLNRTISVNGTRVGPMELLNFFGSSAACLKVRGGYVELGSSIHHARIYRIDGKKTAYAMVRVFQVDLLRLKDQDLFTTPLKPSTISMRTAEPKIRQALADGTATQIGWLVEGDELQIDTSKYSGGFIGEVLERYPEATSWRVAGMPSSSKLRIKPLLLSKEGFVDEKQAERLGLEATSEAVRKTVDTPGWWPAVNVIFGYGTVRVVRRNCLGEERWRSSASLPVSMMLE

SEQ ID NO: 15101 - protein, 1138 aa, unidentified
  REGION 1..1138: note = Cas Enzyme sequence
MTTSSENIPSIRYRVGIDVGLKSIGFCAVEVDRNDQPVKLLNSMVFIHDAGVDPNEKKAAKTRKLTAGVARRTRRLYRTRHQRLVNLDRVLSKEFGWPLPDLTAFKDPRKPWYVRSRLLEGYIADDDQRKAALSIALRHMARHRGWRNPYAKVESLLQPAEPSDFLKGLNERISTSLGRSFPADATPGQLVDAYLAHPDYVKAPGTPKLRGPEGILAGKLHQSDNAEEIRRICEVQQIDPADRDRLIRAVFQAKSPKGSAKERGLVGHDELPGQGKHVRAEKAHPAFQKFRIVSVLANLRVREGRAERPLTPEELQGLTDFLLVAGLKQEVAWQDLADNLGIERSDLRGTAKASFDGSPVLRNPPTDVTTEKILACKVKWLKEWWKDADDEQRGYFVDAFSNSGGSEDSNDVNDEVAELLEQATEDDQLEFEKISLPQGRAAYSLDSLRRLTERMLRDGVDLHTARRLEFNVGDDWKPAVEPIAAPTGNPAVDRVLKQVSRWLHTATERWGEPTVINIEHARDGLGSQRVARELMRENDRRRSANAAAVAEMATQLKLAGRVRRSDQIRYFALQRQNSQCLYCGTEITFTTAEMDHIVPRADGSSTNDRSNLAAVCRTCNHKKGAIPFAEWAASDQANAGVSLKGALERVKFWVRDNGMSPKQFKQLQREVSARLKSRKPDEEFDGRSMESVAWMAVELRTRIEGFYRTRDEESVPSVGVYRGQLTAEARKASGFESRVNLIGGRGKTRFDRRHHAMDALVIALMNPSVSRTLALRVNMRDAQRIAGLEETWKNFYGKPGEASQRFESWRESMLRGVELFNIALSDNAIPFVENIRLRVGSSVIHDATVHSFCPPKTPDGEQIITKGYGEQHRLGDALPVELIDRAETPALWTALTRCPDFDPKKGLPENPNRTISVNGTRVGPTELLNFFGSSAACLKVRGGYVELGSSIHHARIYRIDGKKTAYAMVRVFQVDLLRLKDQDLFTTPLKPSTISMRTAEPKIRQALADGTATQIGWLVEGDELQIDTSKYSGGFIGEVLERYPEATSWRVAGMPSSSKLRIKPLLLSKEGFVDEKQAERLGVEATSEAVRKTVDTPGWWPAVNVIFGYGTVRVVRRNCLGEERWRSSASLPVSMMLE

SEQ ID NO: 15102 - protein, 1128 aa, unidentified
  REGION 1..1128: note = Cas Enzyme sequence
MTTSSENIPSIRYRVGIDVGLKSIGFCAVEVDRNDQPVKLLNSMVFIHDAGVDPNENKAAKSRKLTAGVARRTRRLYRTRHQRLVNLDRVLSKEFGWPLPDLTAFKDPREPWHVRSRLLEGYIADDNERKAALSIALRHMARHRGWRNPYAKVESLLQPAEPSDFLKGLKKRISESLGRSFPADATPGQLVDAYLAHPDYVKKAGTPKLRGPKGILAGKLHQSDNAEEIRRICEVQQIDPADCDRLIRAVFQAKSPKGSAKERGLVGHDELPGQGKHVRAEKAHPAFQKFRIVSVLANLRIREGREERPLTAEQMSGLLDFIQDVSLKQEITWQDLADNLGIERSDLRGTAKASFDGSPVLRNPPTDVTTEKIMACKVKWLKEWWKDADDEQRGYFVDAFSNSGGSEDSNDVNDEVAELLEQATEDDQLEFEKISLPQGRAAYSLDSLRRLTERMLRDGVDLHTARRLEFNVGDDWKPAVEPIAAPTGNPAVDRVLKQVSRWLHTATERWGEPTVINIEHARDALGSEYVARLLMKENDRRRSANAAAVADMAAKLKLSGRVRRSDQIRYFALQRQNNECLYCGTGITFTTAEMDHIVPRADGSSTNDRSNLAAVCRTCNHKKGAIPFAAWASSDQANAGVSLKGALERVKFWVRDNGMSPKQFKQLQREVSARLKSRKPDEEFDGRSMESVAWMAVELRTRIEGFYRTRGEESVPSVGVYRGQLTAEARKASGFESRVNLIGGRGKTRFDRRHHAMDALVIALMNPSVSRTLALRVNMRDAQRIAGLEETWKNFYGKPGEASNRFESWRESMLRGVELFNIALSDNAIPFVENIRLRVGSSVIHDATVHSFCPPKTPDGEQIITKGYGEQHRLGDALPVELIDRAETPALWTALTRCPDFDPKKGLPENPNRTISVNGTRVGPMELLNFFGSSAACLKVRGGYVELGSSIHHARIYRIDGKKTAYAMVRVFQVDLLRLKDQDLFTTPLKPSTISMRTAEPKIRQALADGTATQIGWLVEGDELQIDTSKYSGGFIGEVLERYPEVTSWRVAGFPHPAKLRLRPYLLSAEGLDKEASKDMTDLLDGQGWRPAVNVVFSPGTVQITRRNALGELRSSEFSSLPITRVMR

SEQ ID NO: 15103 - protein, 1128 aa, unidentified
  REGION 1..1128: note = Cas Enzyme sequence
MVTSSENITGIRYRVGIDVGLRSIGFCAIEVDRDDQPVKLLNSMVFIHDAGVDPNENKAAKSRKLTAGVARRTRRLYRTRHQRLVNLDRVLSKEFGWPLPDLMAFKDPREPWHVRSKLLEGYIADDDKRKAALSIALRHIARHRGWRNPYAKVESLLQPAEPSDFLKGLNERISESLGRSFPADATPGQLVDAYLAHPDYVKKAGTPKLRGPKGILAGKLHQSDNAEEIRRICEAQQIDPADRDRLIRAVFQAKSPKGSAKERGLVGYDELPGQGKHVRAEKAHPAFQKFRIVSVLANLRVREGRAERPLTPEELQGLTDFLLVAGLKQEVTWQDLADNLGIERSDLRGTAKASFDGSPVLRNPPTDVTTEKILACKVKWLKEWWKDADDEQRGYFVDAFSNSGGSEDSSDVNDEVAALLEQATEDDQLEFEKISLPQGRAAYSLDSLRRLTDRMLRDGVDLHTARRLEFNVGDDWKPAVEPIGAPTGNPAVDRVLKQVSRWLHAATERWGEPTVINIEHARDGLGSERVARELMRENDRRRSANAAAVAEMAAQLKLSGRVRRSDQIRYFALQRQNNECLYCGTEITFTTAEMDHIVPRADGSSTNDRSNLAAVCRTCNHKKGAVPFAAWASSDRANTGVSLKGALDRVKFWVRDNGMSPKQFKQLQREVSARLKSRKPDEEFDGRSMESVAWMAVELRTRIEGFYRTRDEESVPSVGVYRGQLTAEARKSSGFESRVNLIGGRGKTRFDRRHHAMDALVIALMNPSVSRTLALRVNMRDAQRIAGLEETWKNFYGKPGEASQRFESWRESMLRGVELFNIALSDNVIPFVENIRLRVGSSVIHDATVHSFCPPKTPDGEQIITKGYGEQHRLGDALPVELIDRAETPALWTALTRCPDFDPKKGLPENLNRTISVNGTRVGPTELLNFFGSSAACLKVRGGYVELGSSIHHARIYRIDGKKTAYAMVRVFQVDLLRLKDQDLFTTPLKPSTISMRTAEPKIRQALADGTATQIGWLVEGDELQIDTSKYSGGFIGEVLERYPEATSWRVAGFPHPAKLRLRPYLLSAEGLDKEASKDMTDLLDGQGWRPAVNVVFSPGTVQITRRNALGELRSSEYSSLPITRVMR

SEQ ID NO: 15104 - protein, 1138 aa, unidentified
  REGION 1..1138: note = Cas Enzyme sequence
MTTSSENIPSIRYRVGIDVGLKSIGFCAVEVDRNDQPVKLLNSMVFIHDAGVDPNENKAAKSRKLTAGVARRTRRLYRTRHQRLVNLDRVLSKEFGWPLPDLTAFKDPREPWHVRSKLLEGYIADDDKRKAALSIALRHMARHRGWRNPYAKVESLLQPAEPSDFLQGLNERISESLGRTFPDDATPGQLVDAYLAHPNYVKKPGAPKLRGPEGIVKGKLHQSDNAEEIRRICEVQQIDPADRDRLIRAVFQAKSPKGSAKERGLVGHDELPGQGKHVRAEKAHPAFQKFRIVSVLANLRIREGREERPLTAEQMSGLLDFIRDVSLKQEITWQDLADNLGIERSDLRGTAKASFDGSPVLRNPPTDVTTEKIMACKVKWLKEWWKDADDEQRGYFVDAFSNSGGSEDSGDVNDEVAELLEQATEDDQLEFEKISLPQGRAAYSLDSLRRLTDRMLRDGVDLHTARRLEFNVGDDWKPAVEPIGAPTGNPAVDRVLKQVSRWLHTATERWGEPMVINIEHARDGLGSERVARELMRENDRRRSANAAAVAEMAAQLKLSGRVRRSDQIRYFALQRQNNECLYCGTEITFTTAEMDHIVPRADGSSTNDRSNLAAVCRTCNHKKGAIPFAAWASSDQANAGVSLKGALERVKFWVRDNGMSPKQFKQLQREVSARLESRKPDEEFDGRSMESVAWMAVELRTRIEGFYRMRDEESVPSVGVYRGQLTAEARKASGFESRVNLIGGRGKTRFDRRHHAMDALVIALMNPSVSRTLALRVNMRDAQRLAGLEETWKNFYGKPGEASQRFESWRESMLRGVELFNIALSDNAIPFVENIRLRVGSSVIHDATVHSFCPPKTPDGEQLITKGYGEQHRLGDALPVELIDRAETPALWTALTRCPDFDPKKGLPENPNRTISVNGTRVGPTELLNFFGSSAACLKVRGGYVELGSSIHHARIYRIDGKKTAYAMVRVFQVDLLRLKDRDLFTTPLKPSTISMRTAEPKIRQALADGTATQIGWLVEGDELQIDTSKYSGGFIGEVLERYPEATSWRVAGMPSSSKLRIKPLLLSKEGFVDEKQAERLGVEATSEAVRKTVDTPGWWPAVNVIFGAGTVRVVRRNCLGEERWQSLGSLPVTMMLE

SEQ ID NO: 15105 - protein, 1128 aa, unidentified
  REGION 1..1128: note = Cas Enzyme sequence
MSTSSENIPGIRYRVGIDVGLKSIGFCAVEVDRHDQPIKLLNSMVFVHDAGVDPNENKAAKSRKLTAGVARRTRRLYRTRHQRLVNLDRVLSKEFGWPLPDLTAFKDPREPWHVRSRLLEGYIADEDQRKAALSIALRHMARHRGWRNPYAKVESLLQPAEPSDFLKGLNDRISKSLGKVFPADATPGQLVDAYLAHPDYVRKAGTPKLRGPQGILAGKLHQSDNAEEIRRICEVQQIDPADCDRLIRAVFRAKSPKGSAKERGLVGHDELPGQGKHVRAEKAHPAFQRFRIVSVLANLRIREGRAERPLTPEELQGLTDFLLIAGLKQEVTWQDLANNLGIERSDLRGTAKASFDGSPVLRNPPTDVTTEKILACKVKWLKEWWKDADDEQRGYFVDAFSNSGGSEDSADVNDEVVELLEQATEDDQLEFEKISLPQGRAAYSLDSLRRLTDRMLRDGVDLHTARRLEFNVGDDWKPAVEPIGAPTGNPAVDRVLKQVSRWLHATTERWGEPTVINIEHARDGLGSERVARELMRENDRRRSANAAAVAEMAAQLKLSGRVRRSDQIRYFALQRQNNECLYCGTGITFTTAEMDHIVPRADGSSTNDRSNLAAVCRTCNHKKGAIPFGAWASSDQANAGVSLRGALERVKFWVRDNGMSPKQFKQLQREVSARLKSRKPDEEFDGRSMESVAWMAVELRTRIEGFYRTRDEESVPSVGVYRGQLTAEARKASGFESRVNLIGGRGKTRFDRRHHAMDALVIALMNPSVSRTLALRVNMRDAQRLAGLKETWKNFYGKPGEASQRFESWRESMLRGVELFNIALSDNAIPFVENIRLRVGSSVIHDATVHSFCPPKTPDGEQIITKGYGEQHRLGDALPVELIDRADTPALWTALTCCPEFDPKKGLPENPNRTISVNGTRVGPTELLNFFGSSAACLKVRGGYVELGSSIHHARIYRIDGKKTAYAMVRVFQVDLLRLKDQDLFTTPLKPSTISMRTAEPKIRQALADGTAIQIGWLVEGDELQIDTSKYSGGFIGEVLERYPEATSWRVAGFPHPAKLRLRPYLLSAEGLDKEASKEMTDLLDGQGWRPAVNVVFSPGTVQITRRNALGELRSSEFSSLPITRVMR

SEQ ID NO: 15106 - protein, 1213 aa, unidentified
  REGION 1..1213: note = Cas Enzyme sequence
MLMSKHVLGLDLGVGSIGWCLIALDAQGDPAEILGMGSRVVPLTNLGDDKAFSKGEAFTANQKRTARRTMRRGFARYQLRRYRLRRELEKVGMLPDAALIQLPLLELWELRERAATAGRRLTLPELGRVLCHINQKRGYRHVKSDAAAIVGDEGEKKKDSNSAYLAGIRANDEKLQDEHKTVGQYFAEQLRQNQSESPTGSISYRIKDQIFSRQRYIDEYDQIMAAQRVHYPDILTDAFIRMLRDEVIFMQRPLKSCKHLVSLCEFEKQERVMRVQQDDGKGGRQLVERRVKFGPKVAPKSSPLFQLCRIYEAVNNIRLTRPDGSPRDITPEERDKLVAYLQTYEAPKPPKRKPAKAKPVKLAHPKLDLDKLKELLCIEEELLADKLLEEGLKGDATRIALSIILQPYPQYHHLLDMELETRMMTVQLTDEETGEVTEREVAVVTDSYVRKPLYRLWHILYSIEEREAMRRALITQLGMKEEDLDGGLLDQLYRLDFVKPGYGNKSAKFICKLLPQLQQGLGYSEACAAVGYRHSNSPTSEEITERTLLEKIPLLQRNELRQPLVEKILNQMINLVNALKAEYGIDEVRVELARELKMSREERERMARNNKDREERNKEVAAKIRECGLYPTKPRIQKYMLWKEAGRQCLYCGRSIEEEQCLREGGMEVEHIIPKSVLYDDSYGNKTCACRRCNKEKGNRTALEYIRAEGREAEYMKRINDLLKEKKISYSKHQRLRWLKEDIPSDFLERQLRLTQYISRQAMAILQQGIRRVSASEGGVTARLRSLWGYDDILHTLNLDRYDSMGETECVSREGETTEKLRIKDWSKRKDHRHHAIDALVVASTRQGYIQRLNRVSSESEREAMSGEIEMQKVTKTDKLSLLERWLTQRPHFSVRAVSDKVAEILISYRPGRRVVTRGRNIYRKKTADGREVTCVQRGVLVPRGELMEASLYGKIISQGRERIVKRYPLHDLKGEVVDPRLHELITAYNQELKSRERGVPIPPLYMDKDKRQEVRSVRCYVDKPSVSSAIPIRFDERGTAITFVQSGNNHHLAVYRTPQGVLEESIVSFWDAVDRARYGIPLVITHPREVMEQVLQRGDIPESVLKSLPPSDWMFVESLQQDEMVAIGLSDEELQSAIEAQDYRKLSEHLYRVQSLSSNYYVFRYHLETSVKDRKNTSGRIPKFHRVRNLPDYEKRNVRKVRVDLLGRISLL

SEQ ID NO: 15107 - protein, 1181 aa, unidentified
  REGION 1..1181: note = Cas Enzyme sequence
MNKKVLGLDLGVSSIGWSLITLDEGGHPAEILGMGSRIVPLTSDNKKKGSYFKDFENGEAATKNQYRTMKRSARRGLDRYQQRRAKLSRLLSEFGLGFPRPLMSLSPLDLWGLRADAATEGKVISLAELGRVLYHLNQKRGYRHSKSDESSKQDTEYVAAVKTRYAELRNESLTIGQYMYRYLSSSAEERADALSCVHYRVKDQVYPREAYMEEFDRIMAVQQKAYPEVLTSVVLQKLRDCIFFQRPLKSCKHLVSYCEFVRKTKEVQIPVVGADGTTSYKTKIVDIGPKVAPVSSPLAEVCRLWESINNIRIYYPDGAVYPLSLEHKQAFFNKLQESKSLNFSDAKKIIGAKAKDKLWCNELLKSGIKGNRTTATLRKLIEDYPQYKALLRFDLKQEDSCRVDLSTGEVLPLISVSYLNEPLYKLWHILYSVAEREAMGNALRKQLGVEQGDLDKGLLDACMKIDFTQQGYCNKSAKFMCKLLPYLQQGYMYSEAADLAGYKHSDSKTKEELEHRELKPRIELLPKNSLRQPIVEKVLNQMINLVNALKDKYGEIDEVRVELARELKMGREERKKYSTRNRENEDDNKRVAKVISEFCTPTKTRIQKYKLWEEANHACIYCGKEITKPSLFSDGEAEIEHIIPRSVLYDDSMSNKTCACRSCNKAKNNRAAMDWVLTQTEEFQNEYFKRLEELAKKRLSNGKRQRLMTLLKDIPEDFIERHLRLTQYISRKATEILKDGIRYVWSSEGSVTSTLRHLWGYDKILEDLNFERYKSMGETQTILVKRGSAEQEVERIKDWNKRKDHRHHAIDALVVACTRQSYIQRLNRLSSEEDRQSMQSELGSLYAPSKEERMQLLDKWLTAQPHFSIQAVRDYVRGILVSFRPDRRTYTKSRNKVKIKGRVSLQTGILTPRGALSEETIYGAIHVDGGKEIVCKCRLENLQAKDVPDIVDKGIQRIIKARLEAYNNDATKAFAEPLYSDAAQTKQIRSVRCFSRCVYKNMIPLRRNDAGEEIAFVAPGSNHHVAFYRDSEGRLQEAVVSFYQAIERAKYQLPMIIKDPRAVVEEARELNVPDSVLSALPQSSWTFVESMQKNEMFLMGLSDDEIARAIKEADRATFNDHLYRVQKFSSKDYYFRYHLEIQLDDIKGGSIPKFYRVSFSKYLELNPRKVRVDLLGNLSLM

SEQ ID NO: 15108 - protein, 936 aa, unidentified
  REGION 1..936: note = Cas Enzyme sequence
IRFGLMPPDDGDRKRLERLDAYELRARALDESLTSHELGRALFHLNQRRGFKSNRKIERAPDDDSGVVRSAISDLRQRIDCSKARTLGEYLYRRRKKGKRVRREYVDRSMYEEEFSAIIGSQRSRNPALTDDAIEELRSIIFFQRPLRPVRPGRCTLNPDDERAPWALPLAQKFRIYQELANLEIVYPDYSRERLSKDQRNRVLEKLFTQKQVSFSGMRKHLKLDRRCRFNLESNKRKHLLGDQTAAILSKDDFFGEGWFQMDADRREKIVDILLEEESEDALIERAIQDWGLSAEAAERLAHVPLPDGYARVGRIAMRKIVPIIRDQGLTYADAAKEAGYDHSDFRPKELLPELPYYGEVLGRHVGGDTGNPNDSVEKQFGRIANPTVHIGLNQVRKLVNAIIATYGRPDEIVVELARDLKLSRKAKTDLEREQRKQTETNERIAAELEKLGQPVTGANIRKWKLWEELSENPLDRRCLFSGKQISVQMLFSNQVEIEHLLPFARTLDDSMANKTLSTIQANREKRNRSPFEAFGAHPVLGYSYDEILARSTNLPRNKRWRFAEDAMKRFGEESGFLARQLADTSYLSKVSREYLSHVCADVRMNPGRLTAILRRKWGLNKFLSVGDFKNRDDHRQHAIDAAIVGVADRGLLQRMSRANEDWRDRIIAPLPWNSFRSDVGEAIDSIYVSHKPDHGVRGQGATSGALHNDTAYGIVSGPDSKGCYQVVHRKRLTELSAKEVEKVADETLRSLLRRVFEEGGGSKPARFLAQVAQETGADSVRIIETMSDVITIRDECGRPYKALKGDSNEYAEIFELPSGRWKGEVISTYSAHQPNFRPEWRMNEPGARLKMRIFKDDMVAIDDGGERRVLRVVKMTKSNKRITFADHFEGGALKARDADRDDPFSYFATSFAKLSDYSARRVSIDVIGRLEDPGV

SEQ ID NO: 15109 - protein, 1397 aa, unidentified
  REGION 1..1397: note = Cas Enzyme sequence
MWNPKKGDYENSLFEPCSVISYGNQLRYFYYKQIDFFCQEWRRTKMNKKYYLGLDIGTNSVGWAVTDENYNLYKYAGKRMWGIRLFEAADTAAERRMKRSNRRRLSRKKQRIDLLQELFSEEIVKKDLTFFIRLNESRLHFEDKSTGEKYPLFVDKEYTDIDYHKQYPTMYHLRKELIENPEPHDIRLVYLACHHILKNRGHFLINGSISDVKNLSFVCGEMIKEFNSVSEYEISLTDIRELERILSDKKTAKSVKAKQVAQLFECTPAEDKEQQKCAKIIITNLSKLIVGLKGDISKMFHQPLEEISTKSFKFTEAKYEDEIMPAIEENYPDYASVIDRIKGVYDWSVLVEILDGEDYLSFAKVKAYEKHGKNLHILKNVMKKYCKDEVYQAFFNGINEKNGYGNYIGAIRKNGHTYKMDRCKSEEDFYKGLQKTLSMIVPDQEDEELLEKLKTEVENQTLLPLARSKENGTIPNQVHLQELMKILDNAKGYLDFLKKEDEYGTIAEKIISIAKFRIPYYVGPLSRRHKGEGSNSWMIRKEEGRIYPWNFGDKVDVEQSNKEFIERMTNKCTYLIGEDVLPKNSLLYSKYMVLNELNNLKIRGNKISVELKQRIYKDLFCTMAKVTGKRILEYLKMEDPEIVQEDISGFDIDFKSALTSYLDFKKQVVGNEIEKDHYKEIIEEIIKWKTIYDDDSKMMRRMIEREYPEVFDKEQIKKICQLKYSGWGNFSDRFLNGVRGADKETGESYTIIEALWKTNYNLMQLLSKQFSFKEEIDQINAEKAGDVGKINYKNTVKDLIVSPSNKRAIWQTIQIAEEIKKVMKCEPERIFIEMARGGEKEKKRTVSRKTRLQELYAGCKDDTRNWMKEIGDREEREFNSRKLYLYYTQMGKCMYTGDEIDVDALMKGNSNWDIDHIYPQSRIKDDSLDNMVLVRKDVNNKKRNKILSPKIREDMKQYWKMLYQKELISKKKYDRLTRTTDFTDEELSGFIERQLVETRQSSKAVAELLQRLYKDSEVVYVKAGLVSDFRHDNDLLKSRRVNDYHHAKDAFLNIVVGNVYHARFTSNPRKWIKDNRDSNYSIRRVFNYDVKQGDKIVWHGSENGGHSIDHIKKTMSRNDILYTEYTYCEKGQLFNETLAKKGNEKAIALKKNLDPVKYGGYTTPKTSAFAFIEFDGKKKERKNHIVGIPVYVVNIAKREPDAVKKYLEERKGYSNVVIKKYPIKKNSLIKMDGYLARLRGANETDIILKNAVQLILNKDLYEIVRKIEKYLEYNSQYQADAKFEGFTMKDLNMIYEELYLKLKESIFQKRPAQQMKTLEKGKEAFISIDNLGEKAKVINEIITMFRCDATTVANLKAINGSQNAGSMKVKKNTLTSKSLKVVHQSITGLFETEEELV

SEQ ID NO: 15110 - protein, 1089 aa, unidentified
  REGION 1..1089: note = Cas Enzyme sequence
MKWRLGLDLGTNSIGWAVLKLQSGNPTDLVDMGVRIFSNGRESAAENKVGAPLNETRRLARQMRRQRDRKVRRKKAMLNYLVSIGYFPEDEAERKAIALLDPYELRSAALERPLENRELGRILMQLSVRRGFQSNRKENQNNPSSDTEHKAMYNGINRLRDNLDGKTLGQWLWNNRQNGLDVRFRPDIEKSSTIYSFYPDRAMYEDEFARIRNFQETYHKDINWDRVHWLIFFQRPLKRPERGYCQFYEEEHRAYKAEPSAQRFRILQELNNLKYYDPDVGWSDIPDEIKPRLYYLLDNQSNLSFNRIRNEFGDDFHFKFNLENEKRKTLAGNSTSCEMRKPGYFGQLWDMFSWQEQDQIIEFLVTEDDVKLIAGFLGKYGIDKNQIDKISGSNLVTGTTMLSSHFMRNCSRIMLEKNIRYDAAVEELGLHHSATKLPETKRCLPYYGQILTSYTMPIRSGQNSNLEESKYGRIPNPTVHIALNQTKKVINALIRRFGHPEEIIVEVGRELKLSDRVKSTIFKKQAENQARNERISEVLEKDYGIINSRDFIKKYKLWEELAPEGLSRRCPYCGNQISARQLFSADVEIEHILPYSKTLLDSYDNLTVAHRACNQFKGDRSPYEAFNSSPPGYDWVTIQELSQNLPRKKQYKFAPNALNQYINNGPGFLASQATDNAYISKAVKDYLAVICEKNKIWTTTGSLTYLLRGKWGINTLLNANHDTWFKNRTDHRHHALDALVIGLCDRHLISEAARINAGHDYGSILAPECPVPRAIIDDKLRHMIVSLKPNHKKEGKLFAETALGKRTILRRIPSSELRKEEVDSITPTKIRNYVQQLVKKEGFTKAIKGLSINYQYFMVNRNEWITRAPLVALSKGDIDNICDPSLRQSVIEWTKNITDKPALKESLQRFSEQNLIKSVRYAPKDQVPCQIQSCKNKAYMPADYFRVDIWRIPDKNNCFIYRGVFLPRVQVSKELDTKKPHASAKKVMSLYKGDVIEVSNATLKVLCRVAGYSTTQNKIDIQPIESGEAISIWRANTKKELIHSYWDADIGGHNYKSINVIFSSYVVRLVFVSPDGTLRYINKNGTKNC

SEQ ID NO: 15111 - protein, 999 aa, unidentified
  REGION 1..999: note = Cas Enzyme sequence
ADRVESALRQLHDIINEHRKEPGALALRKVNRCPLAGILFEGPAPKCESSKDRHIRRFKLLEFLATRTFVTKDGKRELANMEMFRWLLDDLLETDIRALASNGQIQRSRLAKDDFKKAFLAKHDPTGETKLARDNQSHNGEYFTQLIDLLWPKLSELGGRASLSGRSAEALFDYATKEGFDAAHMAALLKDKRFERGGKRMSFYEIRQTAAAGFGIYEQVEFLLGRWTKDAKPGDKPAVPGKLRQIFAQLIKDGILPPDKAAPDYVIVETIGDIPRNKEQAKEIQKEQTARREFKERLRERFKDFETGDMSREETNKRLLLYDQQRGMCPYTSAPLGDNPLAHDLEIDHVFPRSRGGISEMVNLVLTHRKTNGNKGERTPYEAFGGESNSLQWREIRDRVLKMQWNGQKREFFLRVESSPPDWANMTRMAQLARQLRFEVARWLEITDNDAELRRRVGTPTGYQTSVCRGAWSDKLPEDFSPKKNRNNLRHHLWDAAILSHIPPGNGLNHVRCHGIFWNETDHSGDIKMLALPGLGPDLKKFEEETRGQCLVEKIQPAHSKKSRFDQWVYSPPDQNGVMWARHPIDKLADDTNLLEQLRAAGIDEKQLPTSRFHEWQEKRQAQFFTREEALSAVESLALPPQHQIPSPIFEEWWSDRLKGDKRRITEKSLRALLAKARVPKALVTDQQLGGVLINRGNPGPLTRKDGTIIRGVRGPSKKKMTPMAVVPHRNRKGETIGFKLATESFIRAEIWTTEKRDKKGVIVKAKDGRPEREYHRRLIPHPRGLKNLSLRILKCTGKRLTWERPLTDAEIIELGLKENAEVNRLHRAYEKAVKQHEKQAAMSKLAEGELTLPKPDTTAKPTPPVISLRKIYTGLPPHAKRLTNANGADISRVSKGDLLYVALGKVPGAEKGHGKFCKRGQAASGGSYWFRVSAIKASGEIELHLAEFKLPRIEDDKKATDQQEWLIKIWEQRPSSEDDVAWLLEQSRAHDQPSHSVK

SEQ ID NO: 15112 - protein, 1289 aa, unidentified
  REGION 1..1289: note = Cas Enzyme sequence
MSTVEYKLKSLPTQPFDWKNEAFYKNSIVLGIDIGIKYIGVWLRHGPIPIYYKTFEYFLPKAGSLKKRRQARALRHCRKNQKQRDNRLRLFCLKYGLPTKPFETENHAPFKLRLDAVTPGKGLKSGEALVVCLRHIIRLRGFDYHLMEDEEATFPWGDDLDADKAIGWAEVAPCPAEYAEVLREIVKQAEWKPRKNKQGELVDKKVAFEKALAGAVARCTPQYIPDILRQNLTNAPKHARPKARDQKLPRELVKAHLADVWNGLWKNRPFPKGDETKEKALAELIGRVNPKTGIYDRIDEACVIDYHRKTAKQRQAHAEKKRKDCIYSIWPVLGINRKQKCGSASDPDIRVFYLLEFLAARGLQCRKSDSHDRRDPITADAELIESLVKYVRKDAEETQKKRDAQGKLLPIARTGKPELGKKFKALCKRFKVELSPRTKPKKGREYGDYSKANDAYFTQLNDLVQPKLSKLNKRASMCAESANALFKIATNNGSTYDSALIKGNLQPYFRFKLDPASGSGIYPQVEFLLGRRSKQNKVVVPGVLRRIFSELKNQGKLEKENPDYVVVEVIRHAPKTQKERDEIIEENRERRKSKNEIIHRYARFGLSSNSGDEKIKRAFLHYQQGGKDGKAICPYTGESLSENPLDPTLEMDHIYPREWGGISEMFNLALTTHDTNKNRKGCKSPWQAFRSSWAEVQDAVSKMEWNPQKKEFLLNQEMDENNPPKWENFTRQAQIARQLREEVIHWLGFKTIADDTIRNNAISKYIGTPSGNLTSVCRESWSDKLPEFMRGKKDRYNLRNHLYDAAVLSYVPPGTGLNQRFYGGIFEDKFDPRGNWIGMKVADEYQSICLDLAQFDRTHQSECLVAAPRQSKSKQARFDTTIYNSPFVKITNLAHDIERRIMRKLARQNQIARYNHKMKYLNEIDLAEKVQKQALVEFDQCFRNPDFTERVYSESELPSDAVSAWFNSDRTAALKYGTLPPLTHIRRRLWVRERVTDLAKTALKDKKRNAHDVFVEYFRKAGIGGDKLPDDKIKNWLDVFNAENITNDGANDRNAQPAEPLRVHGTPIHSIPTLALKVGQPHSRSIHKNRNGEDIGCKIGGEVNWRLELWEKHEPEGKRILQKRVIPHPRNLALLRSRGIRWRDKYPGEKISWREKFCGKLEKHSKLVKIKDAAGLQHPAFIRKGDVLRVPLNSNGDICGRGELTPETKYYWYQVTKILSTKRIGMELLEFNAPKEPTTKEIESDKRKPLSDAEKWLVKIRTQEPQDTGLLLHILEVTHAYDQSPDPVK

SEQ ID NO: 15113 - protein, 1331 aa, unidentified
  REGION 1..1331: note = Cas Enzyme sequence
MQEIMGKNIKYNIGLDVGTNSVGWAVIDDNNDLVRFKRKNMWGVRLFETGETAVNTRLHRGQRRRYHRRRERIILLRQLLESMVLEVDETFFLRLDESFLDFKDRTNIEDKYGLFCDKDFNDKDFYNKYRTVYHLRNSLINCNEKIDPRFIYLALHNIIKYRGNFLYERQSFSNDGEIIEDTIYKIIVMMNEKLELKVPEEQEINNMQKVLVDKSLSKKEKQERLINILLLEKNSKKIIKEITNACMGYKADLAIIFNDESINTDDKRIKVEFSDPNYDDNESTIIDLLGDNYEFIELLKKVYSFMTLHEILLGSNYISEAMISKYDKHKKDLSILKRLVKKQYKQYYSNLFRKEKVNKKILKNYVNYIKNKCDKKDLYKTIKDILKTKELELSNNKDYIYCIEEMEKDNFLNRQKSRLNGVIPYQLHKKELEMIIDNQSKFYPELAKNRDRIIKILEFKIPYYVGPLNTNSPFAWVERKGNEKIYPWNFDEVVNIDVTAEKFITKMTNYCTYLPDKKVIPKNSLLYSKYEVLSELKQIKINGKFLDIKDINNIINDLFLRFKKVKEKQLIDWLVKEQYPDISINNLEITGYQKDKEFASSLKSYIDFNKIIGEINSSNYSMIEEIIYWITIFQDKKILRRKIKSTYNLDIKIINNIVSLNYSGWSRLSKELLIDIKTQWNDGSKKNIMEILEQTNKFFMQIIYNKDYSFKKIIEESQVSLDGDKIKYDNVKELHGSSSIKRGIWQTIKVVDEIIKIKGYAPKNIFIEFAREDQKSKRTNSRYKKLKNIYDNLDKDTEIYNKQIIKDLKVNEKQMDSDRVFLYFLQNGKCMYTGESLSLDKLSNYQVDHIIPQSFIKDDSLDNRVLVTQKANQEKLDKYPLDYKVRKKMRVMWMNLFKNGLISAKKYYNLTTQTINEGTQQRFINRQLVETRQISKHVANLFKSSYVNSNIITIKADLVSNFKQQYEIYKNRNVNDLHHAKDAYLVATLGNYVIRRFPKLEKEYIYGDFIKYKKSIEDRAKSTKQTSKEKNGFVIATMANDSFDPITGDIIWSKNKSISHIKKVMNYRDCIITKKLEIGTGQFFNINLVTGKDGLVSRKANLDAKKYGGYDGIKMAYFVAIEYTHKNKRKKKVVGIPINEAYLISNDNKLISYLKKAEYKDVKILCNKILKNQLIIEDGRLEYIASQNEIHNAKQLIMESIYEEVIAKANNGFYKTEDLKQDAHSKLDDLYEYLIHKYGKEYHLFSSVKDKLIQMEDEFKKMSFENKIEFINQILNVTRANSLTANLSNFTYNGKKLGGRIGRKNSYSIDLNKTIFIHQSVTGLFEKRYKL

SEQ ID NO: 15114 - protein, 1057 aa, unidentified
  REGION 1..1057: note = Cas Enzyme sequence
MIPPKVATKRWKEDPFYTEAVVLGLDIGIEGIGVAVRKGPEVIFRRTFMVSLPESAALQGRRLMRSARRCRKQRRRRDFLLRMFCEKHLEGAWSPITKRVLEHRLRAVEGKLGSPHALVQCLRHIIARRGYSYHLKSDGAFLWGDSPKFPDAKRWLQAAYCDDQVSLLLQQQAEELPWTDAQKEEFAELCRDAVRNSAGRSIEETLKHHLSKDSLKERPPFRGNAWPREHVQAHFEKICRRHPEFFGGEEKLGKLLPRLLAILNHERKNAEERAAHARGKAGKCDFAPVLLGKEDLKRGFQGDLPIRLLNLFEFLSTRRVATSDGLLHHAPPSWIYQQIAFAEADAGAVAENQPRPSTSITDLKKSLLEVINEALGLSGKQALKWEKGSSLNEDFFKQLKDLLCLRRSRFETRAGISSEAAAHIIDPLIKRHAERVSAISDQLAEYRRLRLDRIRSIITSPQVEFLLGRDGNVDGRLQRIFALPHVREKLDKKQKPDFVVIEVVGGAARNTLEAAEIRKDQLERRKEREQLAEKYGISEADARGETMLRVALYEQQRGLCPYSGEPLGSPTANGLQIDHIFPREQGGTSERRNLVLTHARYNTSKGKKLPYEAAQAGDLPLDWKQICALTATMRFGNAGKEGQLSKRDIFNLKDSSKCPDWGNLTRQSQIARELRDAAAQWLGIKGDAGKMAKQIGTPTGLHTAICRRAWRGSIPRKNRADLTHHLWDAITVSFIPPAKGLNTIEYGGIFHHVTEKSAAVTEMTALPVCPDLSLLDQQTTECLVEHPRQSSSKKQRFDKSIYGKRSDGTFVIRKPLVKGEAPANDERSLYEALKASGIPEDKIPTPKKLRSWLDSDSTDKLRLKDKTVVESLPTKASKTGTPMTQLAHRNREGEPMGIRVAGEANWRLEVWKVSDGQRTTYHTRVIPHPRAMKIFKATHGANAWKRKQAATGETWQKTISGSLPPFAKKVGHFEKGMTVRVPLTRDGEISHSFADAYTVRNFRVTSLMSNGQVKMVMADVKPAEAGSAAWAISDLPKECYMRAPSAADKLAMLLLGA

SEQ ID NO: 15115 - protein, 1226 aa, unidentified
  REGION 1..1226: note = Cas Enzyme sequence
MKRVLGIDLGTNSLGWGIIENQRIIDCGVLVFDQGIPLVKGIESANSPAAERTAFRAARRLKYRRRLRKYHTLKILIENNMCPLSLPELKDWIRKGNFPVDNAAFIGWLNSTCESNPYYFRAKAASEKVSPFELGRALYHIAIRRGFKSSKKDQSSSNAKETSELKNSIKQLEEKLLFTGQTLGQYLYELVKTDSKIRGHIKCGRVEHYIPEFETICRVQNISGELKKKLYDALFLQRPLRSKRYLVGKCSLEQKYPRALIAHPLFEKYRMLSFVNTIKVQIDDEPERFLDSEERQTAITAFMVETKNLKFKKIKTALVKKHFKNRSVGFNYRDDQSCTFSALIYQLQKILGCDDLFAWKRNYLDVKKHEKCMDYQAVFDGLKYFKIDFDGDPAAFRKFAVERLGLTEDSAEEFMKIDIPDGYAKYSLYAIRKIVPFLEAGYIEPYAVFLAKVPDILGKHVFESRKEEILADFQQCLEDYTWEKQNLDYRERKHILSLSARFKQLLEEKWKCSPEKIAKLYEFKEQSNYTDHISEGVLPHIELGMIYNPMVHRSLTVLRRLVNSLRLAGKIDADTEIHIELARNVNDKTTRMAIQEMQKSNEKLREQARAEFAEYGITPTDEQILRWRLWKEQNGICIYTGRKISSGEIFTNEFSSLDIEHTIPRSAGGESNLENLTLCDSTYNRSTKKDKLPSECPNYDAPVGDLKISIREGLMLSGFEEALENAEKAFAEASHKLKAVPASSPNRASVRQRQIVAYEKRKYWRLKLLSFEMGREEATGNFSRRQLVATGVMSRHALQFLRSTYPDVYANNGTVTAFARKEWGLQSQFEKKERADHIHHVIDALVIAAIDRESLNKIAHAHHEGDVYRDGRSVVKIASPWQSFAQDVYFAVENVLVKRLVSHNETKQAKRNRVYLATPVKGQDGAMIRHFPGTGDTVRGQLHDQTYYGRILDSAQEVRTVLRTVLDSKNFSSIESLRKIVDKGVREAIIEQLELRMADGTPFAEALDSGVCMKTKNGTFDGPAIKKVRIFRDDISPLTIKRQTYSGAAEYKNYYYAETAKGGNFMIALYRNPQTPAGQKVYDYELISLWQWAEEHRREDYIPPQNRTDKGEFIGIVNPGVSVLFYKDSPEELKTMSQEQLAKRLYIVTEFKKGGRICLRWHREARSKKDAETAMKETFNAQALSKIEWENPAFLLCLSGKTYQNHTLFAGIDFNISVDGEITFVD

SEQ ID NO: 15116 - protein, 1227 aa, unidentified
  REGION 1..1227: note = Cas Enzyme sequence
VKRVLGIDLGTNSLGWAIIESNKIIDCGVLIFDQGIPLVKGIEAANSPAAERTAFRAARRLKYRRRLRKYHTLKILIENGMCPLTIAELHGWIKQGKFPINNEDFINWLNSTNDNNPYYFRAKAASEKVPPLELGRAFYHIAIRRGFKSSKKDQTSGNAKETSELKNEIKHLETKLLASGQTLGQYLFELAQSDSKIRKNIKCGRVEHYIPEFNKICSTQEISGELKQKLYEALFSQRPLRSKRFLVGKCSLENKRQRALIAHPLFEKYRMLSFVNTIKVKIDGEAQRFLTSEEKKTALSAFMIKAATFKFEKIHKILVKTHFSNRSVEFNYRDDHTCSSSALTYQLQNLLGCDDLFSWKHNYLDVKNRKKTMDYQAVFDGLKYFNTDFDDDNPAAFRRFATERIGLSQEKADVFINITIPEGYAKYSLYAIRKINPFLEDGFIEPHAVFLAKVPDILGGTIFAASKEEILADFKQCADDYNWEKQNLEPREKRHIISLTERFKQLLEEKWKCPPDKVAQLYEFKEQSNYSDNTATGILPHIELGMIYNPMVHRSLTILRRLVNDLRKSEKIDEKTEIHIELARSVNDKNTRMAIAEMQRHNENLRKQAKAEFAEYGIEPTDEQILRWRLWNEQNRVCIYTGRKILESEIFTNSFSSLDIEHTIPRSAGGENNLENLTLCDSVYNREVKIGKLPSECPNYNNPIDQTRFSIKDGLKTADFYAKREAAEKAYAEITGKLKKIPSSSPARAKIRQQSIVLAEKRKYWREKLLAFDIAREELSGDFSRRQLVATGVMSRHALQFLKSTYPNVYANNGTVTAFTRKEWGLQDQYEKKERTDHTHHVIDAIVIAALDRESLAKIANAYHEAEVYHGGQKVLHLAYPWQSFPNDAHAAVENVFVKRLTSHNETKQAKRNKVYLASPIRHKDGSIVKHVRGAGDTVRGMLHDQTYYGKIMDNKQNIRTVLRTSLDSGKFKNMSSLDSIVDKGVREAIIDQISTRMAAGATFENALAAGVYMKTKDGFYNGPAIKKVRIFRDDIHPLIIKPQTYSSSKEYKNSYYAETAKGGNFMIALYRDPQTPATQRIYNYELISLWQWAKEHRSPDYIPPQKRTDKGEFIGTINPGVTVLFYRDKPDELKTMSKIQLSNRMYIVTEFKKDGKICLRWHREARAKQDAEKAMKNLYNVDSLSYIEWDSSVPLLRISKKTYQNHTLFEGIDFEISSTGEIIFKE

SEQ ID NO: 15117 - protein, 1017 aa, unidentified
  REGION 1..1017: note = Cas Enzyme sequence
MSQLTLGLDLGIASIGWALVSENGNKRNLLNWGSRIFQPGMDDDIASGKGVSRCAERRLKRALREQYHRRKERKTQLIESLIAGGLLKNTPNAEFFAEIDKRLLESLPQNMRWQTAHLIPYFFRKQALDRQLKPEEIARAIFHLAQRRGYLSNRKQEVKDEDSGVVKNGINELAQALKDSGARTLGEYFCSVDPEVERIRCRYTSREMYVDEFRKICQAQRATISEELEKQLYRAIFYQRPLKSCKNLIGRCRIYPELPRCSFVKEEAQLFRIYTTVRNLRVESAGTIRSLTDAEFQKCVDFLDSYSPLFKKNGKIQLSKLQKAIGLSKEEKFTLADEEKEIYGNELKNILFRAFGENAGKLSISEKEKFFNDLSSIIKEDVLRKRLHNYWHLSEEKIDDVCGIALPDQYCAFSQKALQEILPELAAGIDLGTILKLESPDFRKEELDILPLVDKSGIELRNPVVHRVLTELRRLINAVIKRYGKPDIIRIELARDLKATNKEREKITRQNREREKIRAEIVEEIIKECGIKNPKRNDILKVMLARECNFVCPYSGKHFSMSDLFNGQLEVEHIIPYSRSFDDSFANKTLCLREYNARKSNRTPYEAFSGSNEYSAMLARVADFKGIYAERKLELFEQPEVVAEDFLSRNLNDTRYASKLAMQYLSLLYGGIVDKTGKQRIFATSGSCTALIRRAWGGNFLLGEGEKVRDDHRHHAIDALTIALTTPELVRWAAGMNVEQRKQMYESKDFVDNGLFHQAQEQLDAVVVSHHVVNKMRGELHNATLYSKDFGAGERHSRVALDKLSVKDLSNIVDEAVQKIILDKLGVSNIAEVSDSMLKIFKEPANFPVMKDKKGNVVNIIKKVRVKENKRTISIGKGDGKREVANGENYILAIFARLDENGNEIAWEGEIVSLLDAVLRHQKGLPPFEKNRPGMKFKFSLQKGDIVTWEKDGKLIPCIIRGISLPQFYCVPINDARMQKELKAAKAWYTPTLSAARCGKMQKYTMDIFGNLRRAND

SEQ ID NO: 15118 - protein, 1034 aa, unidentified
  REGION 1..1034: note = Cas Enzyme sequence
MDIFYLYTSFKCRKDTVMSQLTLGLDLGIASIGWALVSENGNKRNLLNWGSRIFQPGMDDDIASGKGVSRCAERRLKRALREQYHRRKERKTQLIESLIAGGLLKNTPNAEFFAEIDKRLLESLPQNMRWQTAHLIPYFFRKQALDRQLKPEEIARAIFHLAQRRGYLSNRKQEVKDEDSGVVKNGINELAQALKDSGARTLGEYFCSVDPEVERIRCRYTSREMYVDEFRKICQAQRATISEELEKQLYRAIFYQRPLKSCKNLIGRCRIYPELPRCSFVKEEAQLFRIYTTVRNLRVESAGTIRSLTDAEFQKCVDFLDSYSPLFKKNGKIQLSKLQKAIGLSKEEKFTLADEEKEIYGNELKNILFRAFGENAGKLSISEKEKFFNDLSSIIKEDVLRKRLHNYWHLSEEKIDDVCGIALPDQYCAFSQKALQEILPELAAGIDLGTILKLESPDFCKEELDILPLVDKSGIELRNPVVHRVLTELRRLINAVIKRYGKPDIIRIELARDLKATNKEREKITRQNREREKIRAEIVEEIIKECGIKNPKRNDILKVMLARECNFVCPYSGKHFSMSDLFNGQLEVEHIIPYSRSFDDSFANKTLCLREYNARKSNRTPYEAFSGSNEYSAMLARVADFKGIYAERKLELFEQPEVVAEDFLSRNLNDTRYASKLAMQYLSLLYGGIVDKTGKQRIFATSGSCTALIRRAWGGNFLLGEGEKVRDDHRHHAIDALTIALTTPELVRWAAGMNVEQRKQMYESKDFVDNGLFHQAQEQLDAVVVSHHVVNKMRGELHNATLYSKDFGAGERHSRVALDKLSVKDLSNIVDEAVQKIILDKLGVSNIAEVSDSMLKIFKEPANFPVMKDKKGNVVNIIKKVRVKENKRTISIGKGDGKREVANGENYILAIFARLDENGNEIAWEGEIVSLLDAVLRHQKGLPPFEKNRPGMKFKFSLQKGDIVTWEKDGKLIPCIIRGISLPQFYCVPINDARMQKELKAAKAWYTPTLSAARCGKMQKYTMDIFGNLRRAND

SEQ ID NO: 15119 - protein, 1026 aa, unidentified
  REGION 1..1026: note = Cas Enzyme sequence
MGMITLGLDLGITSIGWAVLNEDCDNRNLVAWGSRIFDAGVEGTENEISAGKGVSKRAERRIKKALREQYARRRERKKQLLDILISNGFLPEHVDSDFFTSIDKKLLMLFPKEERPRLGHVLPYLYRKIALDRVLEKYELGRTIYHLAQRRGYLSNRKQELKDQETTGAVKNGINELKQAIQNSGARTLGEYFSMVDPETERIRSRYTERSMFQDEFRMICNAQRKHISKELEEDLYNAIFFQRKLKSCKGLIGKCRIYPERSRCSFSRNEAQLFRIYTTVNNLRIEKGGSVRSLTEDERSNVIEILCSYSPIFNKNGKVALSKLQKAAGLAKGEKFNLGDGEKEIYGNELNVILYRAFGENAEKMKITEREKFFNDLLSIEKNDVLLKRLTGYWNLSQEKAEEVACIGLPDDYCAYSLKALQEMLVDLQSGVSLSDWLKNNNHTQVLYQEFDKLPLFDACGIELRNPIVHRVLTELRRVVNSIIERYGKPDRIHLELARDLKASNKEREQMTIRNRMREKEREKIAQLIAEEAGLEKVSRNDILKVMLADECDFTCPYSGKRFSMTELLHGGLVHIEHIIPYSVSFDDSFANKTLCLNKLNSQKDNRTPYEAFGDTQAYLEMLERVKHFKGGDAERKLELFKLREVQQEEFMERNLNDTRYASKLAMQYLAMLFGGIVDKNGKRRIFAIAGGCTAMIRRAWGGNFLLGEGEKVRTDHRHHAIDAMTIALTTPQLVQKVAKMSSEYRKKFNESSAELIDNKFFNQAKSMMEQCSVSHHIVNKMRGALHKETFYSKDYGNGQSLRHERVSLDMLTAKDVQNIVDPVIKKLILGKLHLDSDKDVTDSSLKIFKDPANYPVMRRRDGSSVNTIRKVRIARTVNARTIGKGDGRREVANGANYVLAIFAKLNEQGEETEWVGEVVSLLDVVQRKQKSLPPFEKKRAGLKFKFSLQKGDIVKIYKDGDEKLCIIRGISLPQFSCCPITDARKQQDLKAAKCWFTPTVSAAYNWKMQKYNINVFGELQVAND

SEQ ID NO: 15120 - protein, 982 aa, unidentified
  REGION 1..982: note = Cas Enzyme sequence
ENEISAGKGVSRCANRRLKKALRTQYFRRRKRKKDLIDLLIANGLLPENVDSAFFAEIDKKLLMLFPVAERKHIGHVLPYFYRKAALDRVLEKYELGRALYHLAQRRGYLSNRKQELKEQDAAGVVKTRINELKQAISESGARTLGEYFTMVDPEVERIRSRYTERSMYQDEFRKICQTQREHISAELEEKLYKAVFHQLPLKSCKGLIGKCRLYPEHRRCSMEKHEAQLFRIYTSVNNLRITCKNQIRSLTEDERLKVIEILNGYSDIFTKSGKVTLAKLQKAAGLAKGEKFNLGDDEKEIYGNELNNILYRAFGDKAAEMQQAEQDKFFNDLRSIEKSHVLIKRLINYWQISEEKAEDIASIALPDNYCAYSLKALQEMLPDLAAGVTLPQWLKLNNHTQIADKEFELLPLLDDCSFELRNPIVHRVLTEMRRVVNSIVERYGKPDRIHVELARDLKATNKEREQITIRNRKREKERLAIAERIAKEAGLEKISRNDILKVMLADECDFTCPYSGEHFSMSDLLHGGLVHIEHIIPYSRSFDDSFANKTLCINKLNAQKSNNTPYEAFGGSAEYSEMLERVRHFKGPYAERKLELFELQKVEPAEFLERNLNDTRYASKLAMQYLAMLYGGMVDKTGKRRIYAIAGGCTALIRRAWGGNYLLGEGEKVRDDHRHHAIDAMTIALTTPGLVQEVAKMSPERRREFNDATQKFIDSSFYQQAHAMLDDCAVSHHVVNKMRGALHKETIYSKDYSNGENIRHERVELKALTAKDIKQIVDPAIKNIILDKLGVANDYEVTDAMLKIFGDEANYPAMLDRNGNPVNTIKKVRIARTVNTRTVGKGDGKREVANGANYILAIFAKLNEKGEETGWEGEVISLMDAVQKKQRNEPLFEKNRPGMKFKFSLQKGDIVKFTKDGEEILGIIRGVSLPQFYCCPIKDARKVQDLKADHCWFTPTISAAFNWKMQKYNMNVFGELQIAND

SEQ ID NO: 15121 - protein, 1026 aa, unidentified
  REGION 1..1026: note = Cas Enzyme sequence
MGMLTLGLDLGISSVGWALLKEDYSGRELVAWGSRIFEAGVEGSDNEISTGKGVSRCAERRLKKALRTQYLRRRTRKKELIDLLIANGLLPENVDSEFFTEIDNRLLMLISKEERARLGHVLPYLYRKMALDRVLDKHELGRALYHLAQRRGYLSNRKQDLKDQETTGIVKSKINELKLAIEESGARTLGEYFSMVDPEEERIRTRYTERAMYQDEFRKICQTQRKHISEELEAKLFKAIFFQRKLKSCKGLVGKCRVYPERRRCSLATMEAQLFRIYDTVSNLRVVCKGQVRSLTDDERLKAVEVLNGFSDLCNKQGKVALSKLQKAIGLGKGEKFSLGDDEKEIYANELHNILYRAFGDKAALLDDQTKERFFNDLRSIEKNEVLHKRLTEYWQLSEEKAAEVSSIALPDKYSAFSLKALREMLPDLQNGVRLSDWLRLNNHTLIADKEFDLLPLFEKSGIELRNPIVHRVLIEMRRVVNSIVERYGKPDRIHVELARDLKATNEERQKIDARNKQREKERAAITRRIIEETGLEKISRNDILKVMLADECDFTCPYSGKRFSMSELLNGGLVHIEHIIPYSRSFDDSFANKTLCINKLNAQKSNNTPYEAFGNSADYPEMLERVRHFKGIYAERKLELFKLDKVEPSDFLERNLNDTRYASKLAMQYLAMLYGGVVDKAGKRRVFAIAGGCTALIRRAWGGNYLLGEGEKVRDDHRHHAVDAMTIALTTPALVQEVARMTPERRREFEKKTQHFIDSNFYQQAKAMLEDCAVSHHVVNKMRGALHKETIYSQDYSNGDSIRHERVELNALSAKDIKQIVDPAVKNIILDKLGVANDYEVTDAMLKIFGDKANYPQMLDRNGNAVNTIKKVRISRRVQTRTIGKGDGKREVANGANYILAIFAKLNAQGEEIGWEGEVITLMDAVQKKQRKEPLFEKNRPGMKFKFSLQKGDIVKITKDGEEQLCIIRGVSLPQFSCCPIKDARKQQDLKVAHCWYTPTTTAAFNWKMQKYNMNVFGELQIAHD

SEQ ID NO: 15122 - protein, 958 aa, unidentified
  REGION 1..958: note = Cas Enzyme sequence
RRRKRKKDLLDLLIANGLLPENVDSAFFCRIDNRLLMLMPKEERARLGHVLPYLFRKMALDRVLEKHELGRALYHLAQRRGYLSNRKQELKDQDETGKVKSGINALKQAMAAAGARTLGEYFSMVDPEVERIRSRYTERAMYQDEFRKICQAQRKHISAELEEKLFRAIFSQRKLKSCKGLVGKCRIYPERRRCSMATMEAQLFRIYDTVSKLRITCKSQVRSLTEDERLKAVEVLNGFNDLCNRKGKVALSELQKAVGLGKGEKFSLGDDDKEIYANELHNILYRAFGDKAATVSGQDREKFFNDLRSIEKNEVLHKRLTDYWQLSEEKAAEVSAIALPDKYSAFSLKALQEMLPDMAGGVRLSDWLKLNNHTFAADKEFDLLPMVDDKECKFELRNPIVHRVLTEMRRVVNSVVERYGKPDRIHVELARDLKATNEERRKIDERNKRREKERQAIAQRIIKETGLEKISRNDILKVMLADECDFTCPYSGKRFSMSELLDGGLVHIEHIIPYSRSFDDSFANKTLCINKLNAQKSNNTPYEAFGNSADYTDMLERVRHFKGVYAERKLELFKLDKVEPSDFMERNLNDTRYASKLAMQYLAMLYGGVVDKTGKRRVFAIAGGCTALIRRAWGGNYLLGEGEKVRDDHRHHAIDAMTIALTTPALIQEVARMTPERRREFSDKTQKFIDSNFYQQAKAMLDNCAVSHHVVNKMRGALHKETIYSKDYSDGQKIRHTRVGLKDLTPEDVKKIVDPAIKNIILDAVGAADEDSVSKEMLKIFGDEANYPQMLDRNGNAVNTIKKVRIARKVQTRTIGNGDGKREVATDANYILAIFAKLNAQGEETGWVGEVVTLMDAVQKKQRKEPLFEKNRPGMKFKFSLQKGDIVKTIQDGKEQLGVIRAFSSEIRIEYCSITDARIKKDIQAADAWNRQRISTCFKVKMQKYNMNVFGELQIAND

SEQ ID NO: 15123 - protein, 1027 aa, unidentified
  REGION 1..1027: note = Cas Enzyme sequence
MFTLGLDLGISSVGWALLREDCSKRELVAWGSRIFEPGVEGTENDIAVGKGVSRCAERRLKKALRTQYSRRRKRKKDLLDLLIANGLLPENVDSAFFCRIDNRLLMLMPKEERARLGHVLPYLFRKMALDRVLEKHELGRALYHLAQRRGYLSNRKQELKDQDETGKVKSGINALKQAMAAAGARTLGEYFSMVDPEVERIRSRYTERAMYQDEFRKICQAQRKHISAELEEKLFRAIFSQRKLKSCKGLVGKCRIYPERRRCSMATMEAQLFRIYDTVSKLRITCKSQVRSLTEDERLKAVEVLNGFNDLCNRKGKVALSELQKAVGLGKGEKFSLGDDDKEIYANELHNILYRAFGDKAATVSGQDREKFFNDLRSIEKNEVLHKRLTDYWQLSEEKAAEVSAIALPDKYSAFSLKALQEMLPDMAGGVRLSDWLKLNNHTLAADKEFDRLPLVDDDEVGFELRNPIVHRVLTEMRRVVNSIVERYGKPDKIHVELARDLKATNEERRKIDERNKKREKEREAIAKRIIAETGLEKISRNDILKVMLADECDFTCPYSGERFSMSELLDGGLVHIEHIIPYSRSFDDSFANKTLCVNKLNAQKSNNTPYEAFGNSADYPEMLERVRHFKGVYAERKLELFKLDKVEPSDFMERNLNDTRYASKLAMQYLAMLYGGIVDKNGKRRVYAIAGGCTALIRRAWGGNYLLGEGEKVRDDHRHHAVDAMTIALTTPALVQEVARMTPERRREFEKKTQHFIDSNFYQQAKSMLDDCAVSHHVVNKMRGALHKETIYSKDYSNGGAIRHKRIELKKLTKDHIANIVDPAVKNIILDKLGVANDYEVTNAMLKIFGDEGNYPQMLDRNGNAVNTIKKVRIACGVQTRTIGNGDGKREVATDDNYILAIFAKLNAQGEEIGWVGEVVTLMDAVQKKQRKEPLFEKNRPGMKFKFSLQKGDIVKTIQDGKAQLGVIRAFSSEIRIEYCSITDARIKKDIQAADAWNRQRISTCFKVKMQKYNMNVFGELQIAND

SEQ ID NO: 15124 - protein, 1226 aa, unidentified
  REGION 1..1226: note = Cas Enzyme sequence
MQKVLGIDLGTNSLGWGIVESNTVKDCGVLVFEQGIPQEKGREAALSPAAERTAFRAARRLKFRRRLRKYHTLKILIAQGMCPLALDELNRWIRQGVFPRGNENFIHWLNSTKERNPYYFRAHAATEKIPLPDLGRAFFHIALRRGFKSSKKDQEKEGSPEMQSSEMKGKIRELKLKLESSGITLGQYLYERFQCEKKIRKEIRCGRKEHYEPEFERICDVQEIDPEVRKTLHTAIFMQRPLRSQKHRVGKCPLEKRHSRCLISHPLFERYRMLSFINSIKVKTSGDKEFRFLTDAERRLAETVFMVSVPSFKVERILHKLFPEIGKKNYEGPRPEMNYRPDHTVASASVTHQLSKILKCDDLFAWRHSYVTRHGKEAVMDVQALFDGLYYFSHIYDEDDDDKAALKFASERVGLSEDAAAALIKIKIPDGYARYSLCAIRKIMPFLEMGYVERHAVFLAKLPDIMGECFENRKEELLHDFQQCVNDYVWEKENLSRREHVQGRLLSLTERLRNMLEEKWKIMPPEFEKLYSYQENSNYQDCSKEGILPRIELGMIYNPVVHRSLTVLRHLVNHLRRCGKIDADTEIHVELTREVNDKNHRLAYLDWQKKNEGERAQAVKAFEEYGISNPTETQILRWCLWEEQEHRCLYTGRKIEAGEIFSPTADSVDIEHTIPRSRGGDNSRENLTLCDSQFNRHEKVGKLPSECDNYHQPNGILENLKSCILPKLEEAEVAYNKASAAARKATGIQRANARKKMLYLRFALDYWRTKVKTFKLAADEINEDFTLRQLSATGVMTRHALQFLKSVYPRVFANSGKITKFARESWGVQNQDEAKDRSDHIHHAVDAIVVAALNRKTLARISAAYHECEELMQGRGALKIAYPWESFPEDVRNAVNQILVRHIVQRNEMKQTKRNGVFLTSPVKLSDGRVIRRVPAAGDTVRGALHNQTWYGCIRQNGAEKFVVRKPFDSNEFKQLKDLEKIVDPGVKNALLEQIRNSGMDFKTAMQQEFRMKTKTGKFDGPVIRRVRIFCSMQEPLKIKEQTYCSEKAYKNYYYAETAKGSNFMVALYRKPEIPGTEKTYEYRLVSLWNWAKEHRQSGFVPYEQREKNLDFIGFIAPGTMALFYEKSPEELHALPKSELQKRLYKITEFEKDGERLRLHLRWHREAREKGKAAEAMEIMQMKSSVVSYDIPAFLLRISQKSYQNHLLFDGIDFEFTADGEIIFRE

SEQ ID NO: 15125 - protein, 1528 aa, unidentified
  REGION 1..1528: note = Cas Enzyme sequence
MAKILGLDLGTNSIGWAVVEKMGENEKGKILSCGSRIFPEGVENLGQGEREKSLNAQRRESRQTRRGFFRHRLRRIKLLDTLIELQMCPLSIDELKNWKLYDKTKGKSGKQFPHSVAFIQWLKQNPYELRTRALSDNLSLDELGRIFYHLIQRRGFLSSRKEKDTGAIFKGKDDKVGIEETMKKIGNETLGKYLHSILPKHGEPYKTITDEAGKELRVRNRYTLRDMYIAEFKQIWDKQAAQLGLQNKVKRVERQLILKGNLKSKKNQHRLNYLLQKYGNENITMKGNTISISYQKPLEEFFAGKIYTENETLKHKSKDSLLFFQRPLRSQKGLLSKCSFEGKKYFDKKSDKWFVSGPTPCPVSHPVYEEYRAMQFINNIEYGSEKRLDDFQRKNLLDLFNSKKANFEFSEIAKELKMNSEKFNFDMKSKVPANKTTAQIKPLFDEKTWSQNKEQIWHCFYTYNDSDKLIEKLQKDFGLKIKDFDKDFDKVDGISIEEGYSSVSIRAINNILPFLHKGYKFSMAVILGGVRNAFRDTIDGEAYDRWENFAHKHTDIEKNICKIAGDKNNKEGEAIERIKKYLIENFSFELESKCFKKLYHHSQDIEVKELKQKVGKVENLRNPVVQQTLNELKRLVNKILTEFRQKYPDFKFDRINVELGRDLKNGKIKRQQIQKVINENTELNEKAREKLTEFGLSHTRDNIQKFLLYDEIQKRNGIAICPYTNKTIGLNDLLGRDNKFQIEHIVPLSTSLDDSFGNKTLCDAKFNGMKGNLTPYEFYQKNQDAAIWGAKTWDEIRERAFKLLPYNKAKRFSMEKIAEKSNFIERQLNDTRYISRKAKEILSEICTDVRVLPGTLTAELRHLWGLNNILQPAETLSFSGIEIDSREPVRHWVEFDENNTPVGFYPLQNKRPQLKENQTFICGHIFKNQFSDRSINNIIETHNKADGKYWLPIRILGSPIDIVNVYAPKPETDESKIVLKGKINNKKFENDSIALKPFADAANGMYWGVFDIAKITFVLPEKNAKPKSNSKQVVLYGDVKSGVFKSYIFSCKAMQPEGNIWAIIDLNFDKPQYINYFMPRPEIDNQSVVIEGTVNTEGIFTSDTDYNFHFETTQPAGKYRALFNFDFDILDLAPVVNLPPTIDNKHSIMEGSIWVDKQGEIKFDPKKNREDQRHHAIDAVAIAVSEQSYLQKLSSYSANKAEKMRNNPHDKPEFDEPWVGFANDVKKAANEILISYRKSDKVLTKIKKRIVKNNVKRISIGAAPADQLHKEFVYGKRQAPTEKEVSFHIRKSLTDLKTNKHVDKIADNTIRTIIEQHLKDKFSIDISKPYKIPNNAFFDNGKPLVFLPNKKGEPVPIKKVRLCENIGNAVKLKNTEVWAENKADNVELNQYVNPRNNHHVALYKDKNGNMIEKIVTFWEAVALQKKSLPVINTNSVDGYEFVVSLQINDMFLIGLKDVLDIEFYSKSELLKHLYRVQKLSSMYYTFRHHLASTLDNQEQEIRIQSFKAWLETSPIKVEIDILGNIKPI

SEQ ID NO: 15126 - protein, 1046 aa, unidentified
  REGION 1..1046: note = Cas Enzyme sequence
MILGLDLGTNSIGWSLLEADEKARPVGLIDCGSRIFQAGMEDMESPSPVSRAAARRDKRMIRRQIARRRRRMEKLQNILKKNGLLPAEQETGEAIKRIDVEAMKELRKARPADLPSADALAHVLPYYLRARALDRKVEPYVLGRIIYHLAHRRGFLSNRKNQGKDTEEGQVKESIAELRVKMSEAGARTLGEYFSGLKPEENRIRAQWTARDMYENEFNMICNAQSHLISSDLKKELFNAIFFQRKLKSQKDLIGECQLEDGHKRCPWYRDEAQTFRICQNLNNLRVIEDGSRERELNGNEWQVLYEALEGLNGDLDKHGNLTMAKAKSLIGVSRKSRFSIEEGGEKTLKGHQVNARLSKVFGERWRSMPIEHRELVIHDLNSIEKEDTLARRAVKVWDLHIDKARELSEMILPDDYCNLSSKAITKLLPDMKEGMPYATAVKKHYPHCFESSEVFDELPMVEEAMGDLRNPAVTRTLTQMRKVVNSIIRKHGLPDIVRVEVARDLKRSNKEKKRAVSNMRDNEKRREAAKKFIFEQAGVENPSREDVTRVLLAVECDWECPYTGRAFSVNNLLGESQFDIEHIIPFSRSLDNSFGNKTLCWHDENRNVKKNMTPFEAYAGDEEKYSRILAAVKKFKGGSAKRKLELFELQDTAELEDFSSRHLNDTRYISKTAMKYLGMLYGGINDADGKKRIQALSGGVTALVRRACGMNFILGSGEKTRSDHRHHAVDAIAIAMTSPAMVKRISDLAGKLEKEEFHYRFRMSFKEPLIPANWPGLQDEMREAIDNIIVSHYVPVRTRGPLHEETIYGKDIQGVNQKGKAGAYKHVRKTLNAMNMKEAMDIVDSAIRNTVLQKMEELGVNDPAKAFANPENLPVLRDREGKPVNTIKSAKFRRKQDTVTVANGDRARNVLLGNNHHMEIIEFTDKKGNAKWEGDIVSLLEAKCRVKDGEPIVKRDFGEGKIFKFSIKCGDIVELEQEPGKRELFIIRTVPQSRQISFVRLTDSRKQADIKQSKEWFTAMPNSLKDKNCRKVTVTPLGEVRRAND

SEQ ID NO: 15127 - protein, 1020 aa, unidentified
  REGION 1..1020: note = Cas Enzyme sequence
MKQRILGLDLGINSVGWAIVDDDNDAQVDLLDWGSRIFAPGLAATTEEIVSGKGESRCAERRLKRAQRIAYRRRRQHKDELTRVLSGSGLLPEQVSPDFFLQIDRAFLAGLPEDEQKRAAHVVPYLLRAAALDRPLEPMQLGRALYHLGQRRGYKSNRKQEAKDSEAGVVLSQIAELKEAIRNSGARTLGEYFSTLDPEQRRIRTRYTERGMFEEEFRKICAAQRPLISEALERALYHAIFFQRKLKSCKHLIGFCRLEPEQRRCSFQDPLAQRFRILQEVNHLRVDGRGVLRPLTEEERQKVLTVLDGLSGELNAQGTIALSALGRLAGLRRGEKFTLGDEDKKVYGNELHAILFRVFGARAAAMKEEERQAFFHHLACMEKDDALRRILRTRWGLSEEAAEKAAHISLPDDYCGFSRKALKQLLPDLESGIALSTVIKLKYPEQFQASERVLEFLPPLDETGLQLRNPVVHRTLTEMRQVVNAVIRKYGKPDLIRLELARDLKNSSKDRENIARRNRLREKERERIAREIAQEAGVEKPSRRDILKVMLAEECDYTCPYTGRRFSMRDLLHGGLVHIEHIVPYSRSMDDSFINKTLSCRDANAEKGNRLPFEAFSPEAYREILERVRRFKGPFAEAKLERFKLQKAESRDFIERNLNDTRYASKLATEYLALLYGGRWDRNGVLRLQCSAGGCTAVVRRAWGGNYLLGEGEKERGDFRHHAIDALTVAVVSPAIVKAVAEMPKETVRKAIEEKQPLIVNSLYTQARAKLDAAGISHHTINRARGAFHKETIYSKSHGGDLRHVRRRLDTLEPKTVAEIVDVAIRRAVEEKLAELKMTDPRKAFKDGGNLPVLRDRQGRFVNTIRSVRVRQNVKTRSIGEGDRKREVANGANLVLAIYARHDADGREIGWDGEVVTVLDARLRLQRNEPVFPKVKEGNPLKFTLRKGDVVRWSKDGQEYLCVIRGISLPQFSCMPINDARDVKTLKAAGLWFTPTLSAAFRGKMEKFHTTPLGELRRAN

SEQ ID NO: 15128 - protein, 1123 aa, unidentified
  REGION 1..1123: note = Cas Enzyme sequence
YYKSQDAKNVRYLINYNLNTTVSGCPTSANLKNIFGDDWKNILFNYKTVNKKEEIKNRNVNYHDLWNILSTFTTNDKLKEFAIEKLKLDNNSAIKFSKISLKKDYASLSLAAIKKILPYLEKGLIYSHAVFMANAEKVVDENIWKNETEKNKLQEAIKQVIENNTLDNQITQVINGLIKNCKNSDNNFTYNEQSKDSYKDDVKNALQNFYGKKSWKELENNNKILENSCEIFFKQLKKKSGTGDFIKSKRTDEKVIDLLLGKNETGEIYCSDETRIDKLYHPSDIERFKSITIKDESGNKFKGLGSPATSSVRNPMAMRSLFQLRKLINNLILEGKIDQDTKINIELARNLNDANKRAAIKKYQEERKKIREFYKERIQEMYSDKTKQQIEPTDDDILKFQFWLEQDTIHLPPVTEQEVLKYQLWDEQHHRCIYTGKTIGITDFIGSNPIFDIEHTIPRSVSYDNSQINKTLCYNKYNRDEKINKLPIDCVNYESGKSITFKDGETVNCPAIAYGIVERWERKFKELDDKIAQLVKNTKHASTKEKKDKIIQNRHYFKMHRDYWKGKYERFTMKDVPQGFKNSQKIDIGIISKYAREYLSSVFKNKNGKSNVYSVKGEMTAEFRKAWGLQESFINEFGKKDYKPKDRSNHIHHCIDAITIACMDKNKYDTLAHAWALEEKREYNNAKKELENSKPWKTFKTDVEKIVDEVFIVHHTPDNVKKQSKKKLRKRGKIVSNAIYKKDNNEKYILNEKGKKIIEKYIYEKDKQGNKIPVFGKLLNEQEIKNKIKDTDYFILQTTEENKYYEFVKYKKDKNGNKKGEIVYKKAAIIQQGDTVRGSLHKDTFYGIIARNKSGIIKKDKEGKIKPQYVIRKTLLQTSLNPLKESDIKNIVDKEVQTKIEDAIKIEGSFKEAMNNSIWMNEEKQILIKKVRCYQSVKGAFELKPHRDLSEHKHKHQYVVANDDNYILALYEGLDTKNKKIRTFEVLNNKKSGEYYKLSNKDFSKQYPIVEEIKKGLMLKAELKKGTMVMFYKENQNEIWELDIKDRNKRLYEIRGFRADDGRITFRFHLEARPDKELKSVSKFNFNKPEAKLIISPSNFNFLIENIDFKITPTGKITKIKKQ

SEQ ID NO: 15129 - protein, 1417 aa, unidentified
  REGION 1..1417: note = Cas Enzyme sequence
MSNLTLGIDLGSNSIGWAIRDTSEDDNQIIDYGVLTFEKGVASEKGNEFPKVQKRTESRGKRRNYQAEKYRKYQLLEFLIENNMCPLTIGELDRWRKYTKGKKRAYPQSDAFVQWLRFDFDGDGIPDFHLFGKDKHESYYIFRTSAIDEEHKVVFQNNPHILGRILYQLVQRRGFRGRDEEEAKTMLQGSEKTGTAGRNEIADYIDEYKTLGAALYHYQKEKGGRIRQRYNLRKDYEEELKEICRVHSIKAEDYQKLWKAIIWQRPLRTQKGLVGICIYERNKKRAPISHPLYEEYRTWIFINNLKIEPPVGVDRETYLKEKIYPMFYKSANEFELKSILNQLRKDGAKIESKFKDKTKVISARLLKSFQDTFGEDWKEKYGWNNIHHRDAKPGKKTLEGYTFEDVWHVLNTFDGQENLKQFALEKLKLDEEKAEKFSKIKLNQGYATLSLSAIKKILPFLQKGFLYSQAVYLANLYKVLGADKITDDLLTYFAKEVERIIQNNKQQKIVDNIVNALIATELSDENRYSIEIDRELDDSEKRLISKKIIEVFGEKSWGELGREEQAEITAYVSRNFKDFLKKSVLSKRNVFIAQPRLHEQIWDFIVETYQVPNENKKYLWHPSEQENYVAASEYQHYKLKDKDVYIAEKKIESFLAKNPDAAYQGRSIKLLGSPEPISRGFKNPMALKTLYKLKQLINYLLQNGKIEEDTRIVIEIARELNDANKRKAIEKWNNDREKENDLFRKKIKEVNEESNTNFNENDKTLLRKIRLWEEQGKMCLYTGKMIKASDVFNGLLYDIEHTVPASISFDSELKNLTLADTSYNRNIKGRLFPTQLPNYHDAVTINGVVYPPIIKTMERVFGKRTVTIETDKKGNQKTVVTWKKIEDLEDLYKTWKRNASFASAKDRKDYCIQQYHYIKMDLDYLKAKLHTFTLEEYKAGWKNSQLRDTQIVTKYALPYLKTVFRKVAVEKAEVVNAFKELYQVKPPFDKKNRKVHSHHAIDAAILTLIPPFFERDKILQRYNEEKDKRTGKVYHEQPKDWKDFSASKILFVENEIFINNLSENKTTLSTYKQVRKRGKIEYIRYKDVNGKWQFKLDDNGNKIPKIAQGDTIRGQLHGESLYGAIKQPVRDENESILFDDNGKMKLHEDIYVVIRKPLIYKKDANSPGFKTLEEVEKVIVDKHLFQMIKKQVEQSDFKTALINGVYMFDKEGNRINQIRRIRCKENLKYASAVKVHSHTFVSDKEYKRKTLAVNGENSLCLFYKNEKGRAINIQSIGQVAESGIKKDRQYFDEPYYNQIEFGKGKNKTTIPLYAVLKPGQKALFFKDSMEELKELSKEDLSVRLFKMYQFESDGRIKFRHHIVAGIDTELKKENKEYSYFDRNEKQVFLRLRQGQWNFAIEGKDFEMKLDGTIEFKF

SEQ ID NO: 15130 - protein, 1317 aa, unidentified
  REGION 1..1317: note = Cas Enzyme sequence
ALLVIKDKVKGKNFSTISEKREEIRKYINKPENIGPVKGYIKTLSNEIEEANCKTLGQYFWNLYKSDRNKPENKIRTNYTAREEHYLHEFEIICKTQRLEGINENEKSPDKKYYGLVKELYNAIFFQRPLKSQKGLVGNCSFEKNKPRCPVSHPLFEEFRMCSFINNIKIKTPDDEKLRALTKEEKEKITPKFYRKSKPHFDFEDIIKELKTKDRTHAFYKDREAKKSDYLFNFKDNTTVSGCPTSANLKSIFGDNWKNVSYNYETINKEKKIINRKVNYHDLWHILTTFTSEDKLKDFALEKLKLDKNDADKFSKISLKKDYASLSLAAINKILPYLKQGLIYSHAVFMANAEKVVDENIWKNEQKRNDLQNEIKLIIENNTLDNQIKQVINGLIKNCKKSNNNFTYNEQSKESYKNDVENALNSFYGKNSWKELENNDRILETSCKTFFEQLKEKGGTGDFIKPKRTDEKVIDLLLGKNETGEIYCSDESRIKKLYHPSDIEKFKPIIIKDKNDNKFIGLGNPATPSVRNPMAMRSLFQLRKLINTLTLEEKIDQNTKINIELARELNDANKRNAIERWQREKKELHDIYAKKIKELYLAEQGKEIEPSYSDILKFQMALEQREDGKIISKEDILKYQLWEEQKHICLYTGNTIGLTDFLNENPKYDIEHTIPRSISEDNSQMNKTLCDNKFNRDIKKQQIPFELSNYDKILPRIEHWKKKYEELDNKIAQAIRATRTATTKEKKDRQIRERHYLAFHREYWKGKYERFTMKDVPQSFKNSQKVDIGIISKYAREYLSSVFKNKYGNSNVSSIKGEMTAEFRKAWGLQESYYNEFGKKNYKPKDRSNHIHHCIDAITIACIDKNKYDTLAQVWSLEDKGELNKAREELEKSKPWKSFTQDVKTIIDEVVIVHNKPDNVKKQSKKALRKRGKKQYVIEYEKDSRGKRVPKRDRNDKIIYKPDKEGNKIPIIQQGDTVRGSLHQDTFYGAIKQPELENVKMKFDENGRKILKKNKKTGKEEIKYVVKRILSNLEDKDIKNIVDERIKMIVLQGRKKEKELKNEIEKLSKDIKQAADFEKSEIEKQITTLKNKIEKKLYVIPPKNGKNIYTPIRKVRCIANDVKTPLKIKEQRTKSKKEYKQHFNVKNEENYCMAIYEIKDENGKIKRSCKLVNMLEAGQYYKLSNKKHRKLYPIVPEKNIENEYSLKYILTKGLMVLLYEKHPEKIWEISDKERLTRLYEITQLDTEQSCIKLLYHQEAREKNKITKYMGLKSGMKGGKNIGKFKEFPWIKIGPNDFDALVEGFDFNITPTGKIKKI

SEQ ID NO: 15131 - protein, 1144 aa, unidentified
  REGION 1..1144: note = Cas Enzyme sequence
LVILRIFSEIKNLSPTNIQPMSSTYSFDLGTNSIGWAVVNTEENKIIACGSKIFEAGVEDLGNGEKEISRNAKRRDARGTRRQYFRRKLRKRKLLKLLRQHAMAPVNDDELKSWIRMNPYDLRARAVTEKITLRELGRIFYHMIQRRGFQSNSRSATAGDENGAIFKGKADEGKTGITATEEKLQKHSTLGSYLHSLYPADGEPFQNREERIRNRYTTRQMYIDEFELIWSVQQQFHPELTKALKEEIGGREKDDYKKDGVLFFQRPLRSQKHLIGNCTFEPKKPRVKESAIPFEKFRAWQFVNTIKCNGEWLNAEQRQTAFDLLMSKEKVTFKQVRKKLGLNDQFYQFNYEDEHRCPASFTISTLSRKKFFGKRWWDLSEKEQEDIWHVLIFFDDKKELQRHAQEKWGFNEEQAKSIANVHLKDKYASLSRKAINNILPFLEMGFGYETAVVLGGIRNAFGKEWADLTDVQKNLIFDNIRDITSAGKEGGFIHDLKDFLKSEFALSDKQLEKLYHHSTDISAKEDLKKLPVNKVADREIEEIRNPVVITALFELRRLVNTLLEKYGQPQEIKVELARDLKNSRKERKNIRIRQNQEQRLNDKVRDKLTELGQPHTHDNITKYKLWMECQRKCPYTGREISIDNLFSGEVQIEHIIPWSKSLDNSFTNKTLCFADENRAKGDQTPYEFYGNDAEHWSVVKNRALSLFKRSADFPNAYRKFERFVTQKYDGDFVSRQLNDTRYISREARAYLSKICEKVTVSPGMATSQLRHMWGLNTILSDGQKDRSDHRHHAIDAITLACTKPKHVQELSKWNRYERKSPVSKFPKPWAHFWEDTKNAIDNILIVHSKRDRVITRRKVKTKKDGKEYVNDSIAARGELHKETVYGKRKDSTGVEKYHIKKALSTLTKGSQVKKIADPALRKIIENRLKDLGVDTNTKSYTVPSNAFFEKREDGSLKPLIYLPNRRGKPVPVYKVRLREEISNAVQLKEDINQHVNPRNNHHILIYEDKRGVLQSEAVSFWEAVERQKQGLNVTALPNDGAKIVTTLSRKDYFLLYLPDDFDNYDNTQLLSEYLYTVQKLSYVNGRFLIYFRKHTDARKDKEASEDYVCFSSFGDGKTGWQTLKPMKVRLREDGTIDPEPLKHE

SEQ ID NO: 15132 - protein, 1117 aa, unidentified
  REGION 1..1117: note = Cas Enzyme sequence
MNKILGLDLGTNSIGWALINYDPAAERGSILGTGVRIFSEGVDNLGQGEKEMSKNASRRVARGARKQIFRRKLRKRILKRALRSYGMMPEVPYEIEEWYHMNPYNLRERAIREEVSLMELGRIFYHMGQRRGFKSNSRSASKNTDGAIFKGTADQVGIAETREKMEDHATFGDYLAKLYPKEGESYQFTNKRIRGRYTTRQMYIAEFEMIWDVQSKYHSSLTEEKKLNIGGRKEDGYEKDGILFFQRPLKSQKHLRGKCSFEPEKTKAQLSCIPFEYYRIHQWINGVRCNDEPLPKDLREKALQFLLKKAKVSFIQLRKHLKLNGPEFKFNYLDSDKIKGSDTIRELSHKKLFGDKWFDLSDAQQEEIWHALYFYDDKPKLKKWVQKHYDLSDKKAQIFSELMLTDGFAKLSRKAINNILPFLRKGYEYDIAVALAGIKKAIESRGEPITDKELLFIEDNVPVIIRSKIQGGYIEEVKQVLRDEFNLTDEQLSNLYHHSTELEKQEVIGRLPIGKEADQEIQAIRNPVVVRAIFEVRKVVNQIIEKFGAIDQIKVELARDLKTSKEARNQIRKRQKENEERNEKAIQGLKENKQPITHENILKYKLWQECNHEDPYTGKTIAISDLFNDNKIQIEHIIPYSRSLDDSYMNKTLCDAKLNQNKGDRTPWEYFSGMGEEEWEKVKNRALSIFQTSPEFPNRYRKFKKFIAKELDDDFISRQLNDTRYISKEAKNYLQKVCKDVQVAPGQMTSKLRHHWGMNELIREEDKEKNREDHRHHAIDALVMACHQRKHLQKISKFNRYRRPPNWEFPEPWENFWVEARNSIREILVSHDNKDRVIAKKATRVKKNGKVFKSAGVAARGALHKATVYGKRKPPKSLEGYHKRNSLEKVKNQGHVKKIVDDRIRSIIYNHLRSERINIDAKKFSIPSGTFFKKNEDGVLEPRVFLPNKRGDKVPIKKVRMVENFNNAEQLKDKINGFADLQNNHHVLIYNDVEGKLKENVVSFWEVVERKIQRQPKYQLPATGEEIVTILKADDMFILGSNEAQLKGWLDRGEKLKIFDALYRVQKFSSGYYVFRHHAASTLDHDDQMERVQSFSAYEKLNPIKVRINKIGDIEVI

SEQ ID NO: 15133 - protein, 910 aa, unidentified
  REGION 1..910: note = Cas Enzyme sequence
IGWAIVEKENDEFSLIDKGARIFSEGVKSEKGVESSRAAERTGFRSARKIKFRRKLRKYETLKVLTENKMCPLTIEDVEQWRKSGFKDYPLNDEFLKWLRTDDDKNINPYLFRDKASKGEANLYELGRAFYHIAQRRGFLSNRLDQSAEGIFEEHCPKIEDVIEDILTIEELKNEISDYFEGTDIIDKTEKFGFKKDLDEGEKKLKSLFSALEKIIKENEKDFEKAKEEIILRLNRKDDLGVVKKKIHEISQAMADGNFKTLGQYFYNLYNKEVEIKNTNTQEIEKFNRAKIRNQYTAREEHYLAEFEIICKAQNIEGVIEKELLPEKRFTGLAKNLYKAIFFQRPLKSQKGLIGKCPFEKSKSRCAVSHPDYEEYRMCAYINTIKIKTSEDEILRFLTAEERQKIVSKFYRKKDNFNFEDLAKELIPKGASFDFYKSFNAKAAHYLFNYKPKDSVSGCVVSTSLKNIFGENWKTKTFSYQTKNAKGEIVNRNVDYKDLWHLLAVSTSDIYLQEYAKENLGLDEKQAKSFSKIKLKKDFASLSLNAINKILPYLKEGLLYSHAVFMANIENIVDQEIWNNPAQRKYIQNKIAEIIETNTYDNGLLEIVNGLIKDCKSEDAYYSKEAETTYKNDLQKRLISFCKFHKIERNKGQILNDLFPVFIEQLKKYEFIKIKRLDEKVLEFLDGKNEDGEVFCSNEKRLNKLYHPSDIEVFKKKIIKDEFGNEKVVLGSPLTSSIKNPMAMRALHQLRKVLNALILEGEIDPKTRIHIEMARELNDANKRKGIQDFQNENKKARASYREEIKKLYFEETKKEIEPTEDDVLRYQLWIEQDKKEIYEDGKCISISQIIGNNPDYDIEHTVPRSRSQDNSLMNKTLCSQRFNREVKKNKMPIELANHEEIKLRVDHWLN

SEQ ID NO: 15134 - protein, 1131 aa, unidentified
  REGION 1..1131: note = Cas Enzyme sequence
MSKTLGLDLGTNSIGWAIVDKEKSEIIRMGSRIFPEGVMNLGDGEGREISKNAGRTENRGARRQFFRRRLRKRHLLRELSKNNLCPVPFSSVKIWTNKEVFNHDEFKDWIKLNPYELRSKGINEEITLHELGRILYHMIQRRGFLSNSRSAGSDEKENSVIFKGNDEGKIGISSTLENIEEGKTLGSYLNSIQPKENKPFEDNLERIRNRYTTRQMYIDEFEKLWEVQSKFHPELTNELKTILGGRRKDNYEKDGVLFHQRPLRSQKHLVGNCTFEPNKTKALISAIPFEEFRVYQWVNTVECNGEKLNEKDRETIVNQLFSKEKVKFMALRRALKKNDNTYQFNYKDDDAIVGSHAISNFSNKKFFGPAWFDLNEKQKEDIWHVIYFFDDKEKLTKYAKEKWGFDDEKAVKIADFNLKEGYSSLSIKAINNILPFLKKGFIYDIAVALGGVKNAFGENWNKLSESELDFIETNVPEIVRTKIKGGYIEELKRVLSHEFHLSDKQLKKLYHHSSSISTSEILDSLPLGTDADKEIQSIKNPVVITALFELRRLVNELIDEYGSFDTIKVEMARDLKISKSKRNDIRREQKRLEKENDRVKNELINLKQRITHDSILKYKLWEECNNTCPFTGKKIPVEKLFSGEVQIEHIFPWSRSLNDSFMNKTLCFADENRAKGNKTPFEFYSAQSSEKWEEVKTRALDCFKNKKGYPNAYAKFKQFVKTKHDSDFVSRQLNDTRYISKEAKNYLGKICKDVQVSPGQATAKLRHFWGMNGILNDDNAKSREDHRHHAVDALVMACTERKFLMEMSKWNTYNRNSSLTNFPLPWDNFINEAHDKVEEILVSHRRMKNIITRRTHTVEKNGKKYANLGVAARGQLHKETVFGRRQSPNAEEAFHVRKPIETIVTEKHLNKVVDPNIRTLIMKRVNELGGIVKGKLPEGTFFTTDENGHKKSMIYLPNKNGAPVPIKKVRMKENIGGAAQLKENKNQYVNPRNNHHVLIYENEQGELREDVVTFWEVAERKRQGMETYKLPADGVNVITTLHINDMFLLGLKEDQINWNSINKNALNNHLYRVQKFTSKDYYFRKHFESNLDGVLGDAFQYIKSFGDGKTSWKNFNPIKVKISSTGKVEKY

SEQ ID NO: 15135 - protein, 1116 aa, unidentified
  REGION 1..1116: note = Cas Enzyme sequence
FQRPLKSQKGLIGKCSFEKTKSRCSVSHPDYEEYRMWAYINTIKIKTPEDNALRFLTAEERQKIVPKFYRKKDNFNFEDLAKELIPKGASFDFYKSFNAKSVHYLFNYKPKNSVSGCVVSASLKNLFGEDWKTKTFTYQAKNGKGENVNRNVNYKDLWHLLSVATTDIYLQEYAKEKLGLDEKKAKSFSKIKLKKDFASLSLNAINKITPYLKEGLLYSHAVFMANIENIVDDKIWNDQTQRKYIQDNIAKIIETNTYENGLLEVLNGLIKEYKKDSVYYSKEAETSFKNDLQKKLISFYKYHKIEENQDQILNDLFPVLIEQIKKQEYITIKRLDEKVLEFLSGENEDGEIFCTNEKQLKKLYHPSDIEVFKKKIVKDANGNEKVVLGSPLTPSIKNPMAMRALHQLRKVLNVLILEGHIDEKTIIHIEMARELNDANKRKGIQDFQNDNKKFREDAVKEIKKLYYEESKKEIEPTEDDLLRYQLWIEQDKKEIYEDGKSISICQIIGTSPEYDIEHTVPRSRSQDNSLMNKTLCSQRYNREVKKTKMPVELANHEEILLRVDHWRKEAEKLTWEIDQIVKSTKAMATKEAKDRKIRRRHYLTLKRDYIKGKYDRFVWEEPKVGFKNSQIPDIGIITKYSQAYLKSYFKRVLSVKGGMVAEFRKIWGVQKSYQENGKKYFEIKDRSKHTHHTIDAITIACMTKDKYDVLASAWTLEDKEQAGNARKLLAESKPWKTFTEDLVKIEEEILVSHYTPDNVKKQSKKIIRVRGKKQYVAKIEKDKNGKTILKKDANGKLIYQLDEKGKKIPRLQQGDTIRGSLHQDSVYGAIKNPLNTEELRYVIRKDLESIKVTDIENIVDEAVKEKVRMAKENGILIIPSNAQQKNKLNGTVWMNEEKGVPINKVRIYANSVKNPLEIKEHSIISKSRQEHKQKVYAQNDENYCMVIYDDGKNKDFELINNFNLAQLQKLEHGDYPLYKEKISKGKTIQVPIVKRNNRDLVLKRGQQVICYDKSVENPKDINEITDFSGRIYIIEGLSIQRIVRPSGKVDEYGVIMMRYFKEARKSDEIKKDNFKPDGIFKLGDNKPTRKMNHNQFNAFIEGIDFKLLPSGKMIKI

SEQ ID NO: 15136 - protein, 1119 aa, unidentified
  REGION 1..1119: note = Cas Enzyme sequence
MSKILGLDLGTNSLGWAITDTDKEEILGMGVRIFPMGVSELGKGEKELSKNASRTGNRQKRRQFARKRFRKKLMIKVLAQHSMCPLSPMDYEQWKKEGKFPEGPLRDWFKMNPYELRARSVKEKVSLHELGRVFYHMIQRRGFLSNARKGAADEGVLFSGKPKEGKTGIDETLSHLSHSTLGSYLHSIAPVENEPFKDSLTRIRNRYTTRAMYIQEFEQIWSEQSKHHALLTAELRGSIGGQKNAGYKKDGILFFQRPLRSQKGKIGACSLEPKKARCPISAIPFEEFRLWQWINTVEFNGYWLNDKQRHKAFNYLIRKEKVKFKALRSELDYADASFKSNYANDDTILGSRTISLLCNKKFFGERWFKFTDKEREDIWHDMLFYEDKKLLTARAIDKWKLDPEAAEKLASTNLADGYANFSRKALMNILPFLEKGCLYDIAVALGGIKNLFGKEWDNLSEEQTSFILDNVPEIVRSNQKGGYIKELMKVLADQYGFSEADMEKKLYHHSSSIAADAYVERLPVNVQADKEIQAIRNPVVITAMFELRKVVNELLERFGPMDRIVVEMARDLKNSKSRRQDERRRQQKQENYNNEMKGLLAHHGQRVSHDNLLLIKLWKECQETCPYTGRSISVQQLFSGEVQIEHILPWSRTLNDSFMNKTLCFADENRAKGDKTPYEYYSGQSEAKWEEVKARALSLFHDSPVFPDRYRKFKQFTLKKFDEDFVSRQLNDTRYISRQSKDYLSQICKDVRVSPGQVTSKLRHLWGLNNLIGVKDSKERDDHRHHAIDALTVAATEQSAVQKLNAWNRYDRGVHESDFPAPWKTFRSQAEKTVNELIVSHRCVNNDISKRMYSVKKKGVKYSNLGIAARGPLHLETVFGKRKAPGSEDYGYHVRKSLDGLSKMKQIEKVVDSAIRELIYKHIAQLGGFQGKNKDEVPKGAFFDTNEDGSLRPLLFLPNKNGAPVPIIKVRMKENFGNAEPLKDGINQYVNPRNNHHVIIYEDEKGNLQEDVVTFWTVVERRKQGQDLIQLPKDGKKIISVLQINDMFSLQCSDGQRRIYRVQKLSSKDFSFRLGTESQITSTSEPCQIRVASFGTGKTGWLTFEPEKVIISPSGMLNP

SEQ ID NO: 15137 - protein, 1444 aa, unidentified
  REGION 1..1444: note = Cas Enzyme sequence
MTKILGLDLGTNSVGWAIVDEKNNLFSLEDRGVRIFSEGVKKENGVESSKAAERTSYRSARRINFRRKLRKYETLLVLSKNKMCPLSVEEVVAWRKSNFKNYPLNPLFLEWLRTDEKRNVNPYFYRDKASKQKVTPLELGRAFYHIAQRRGFLSNRLDQSADGVIEQHIPNIENIIEGTNSIDELLTEINAYFSDLEILDKKSKELDEGEKKLKTLYKALIDRIKANSSDLEKAKKETVDKLNRKENLGIVKQKISEISQAMNEGGFQTLGQYFFSLYSKDKIRTRYTAREEHYLSEFEFICKKQGVQFIHDEERLPKNRYTGLAKELYKAIFYQRPLKSQKGLIGKCVFENRKSRCSISHPDFEEYRMWAFLNTIKIKTPEDNNLRFLTMVEKQKIIPRFFRKSKEQFYFEELANELIIKGLGFEYYKSVNKDSASYLFNYKAKDTVVSCPVSASFKNIFGDDWKTKTFTYQTVNKFEKMQIRQVDYKDIWHLLSVSTSNIYLEEYAKTKLGLDKKRALSFSKIKLKKGFAKLSLNAITKILPYLKQGLLYSHAVFMANMQNVVDSHIWNKPKERLRVQNKINDIIKNNRLENSLVIAANGLINDCKLNDYYYSKEAEPLFKKDLSKKLDAVFNRFKVKDKKQEIVEELFSVFVEHLKEHKFIPVKRLETKVIEFLKGENESGEVFCSDEKRLNKLYHPSDVEVFKKKILRDEMGNERLVLGSPIISSIKNPMAMRALHQLRKVLNTLILEGKINSTTQVHIELARELNDSNRRKAIQDFQTENKEKRKIYTKEIKELYYAETNKEIEPTEDDLLRYQLWIEQNRCEIYEEGHSISISDIIGSNPKYDIEHTIPRSLSQDNSLMNKTLCSKGFNREIKKQRLPVELENYTEILVRVDHWRQEANRLSLEIDQITKSIRATATKEAKDKKIRRRHYLTLKRNYIKGKYDRFIWREPRAGFKNSQLPDTGIITKYARAYLKSYFNRVEVVKGGMVSEFRKIWGLQAGYIKNGNKYYEPKDRNKHTHHTIDAITMACMTKNKYNVLAHAWALEDDPEKENYTIVKELLEKSKPWPTFTQDLKKLEEEILVSHHTPDNVKKQTKKIIRIRGKKQYVAEVEKDSNGKTILKRDQNNKIIYKVDEHGNKIPRYQQGDTTRGSLHQESLYGAIKDPHNQKEIQYVIRKDLYSIKATEVESIVDEAVKEKIKQAIINKILIIPSNAKQKNKLNQPVWMNKEKGVQIKKVRIVAKTVKNPLEIKNQAPLSLSKKEHKQKVYAQNDENYCMAIYEGQDKKGRIKRSNLLINMFYAGNYYKMSNDHKKYYPIAPEKDENGFPLKYILKKGQMVLMYDKSPDELFEMSENMKSERLFQITQLDVEASCIKLLHHIEAREKKDITKAMGLKSGMKGGKNIGEVRKYPWIKVGVNSFDCLVEGYDFKVSPSSKIIML

SEQ ID NO: 15138 - protein, 1548 aa, unidentified
  REGION 1..1548: note = Cas Enzyme sequence
MTKILGLDLGTNSIGWAIVENDKILGMGSRIFPEGVVAKTIGTGDREESKNASRRNSRQQRRQFYRKRLRKVKLLRTLIDLQMCPLTNEELDKWVKWDKVLKSEGRKAPNSNAYEKWHRMNPYLLREKGLNEDLTLCEMGRVLYHLIQRRGFLSNRKGKDDGKIYKGKEGMTGITETQKYLNENTLGSFLYSISPKEGEPFKLITDESGNELRARARYTLRSMYIEEFEKVWNRQARQLGLNNKTATKNKILFLKGSLTENNRNKTKIEKLKNKYGIDNVKIEEIKDKSKKGLFYKVSVSTQVPLKLFLGGEIENDEDGNLKFKSNESVLFWQRPLRSQKGLLAKCRFEPDVKDKKGNYLQKGKTPCHLSHPLYERFRAWQFINNIKYGKNQKLEDSQRLQILELIDSKDSNFNFSEIPKKLKMIYEKWNYGSEQKIAGNYTIKNLKPLFNEEIWNKKYEIETKNGDFLTEYGYEKIWHCFHFFEDNENLLKKLKIDFGLVEKYFEKASKINIKEGYSNVSLKAINNILPYLKEGFQMSDATLLGGVRNAFGSRWRYFKDDHEQIKKDIIKINREKSNREGESIAKIKSYLIENKYGFVKNDIQFIKLYHHSQEIDKKTIKDKLDPIENLRNPIVQQGVNETRRLVNQLIKKYGKFDKIQVELGRNIKNSKKGRQEQSSRISENTTKNDSARKLLTEYGLKHSRDNIQKVLLYKEMQDKGVVTICPYTNKSINIDDVLGPDNKIQIEHIIPKSVSLNDSFANKTLCESKFNSLKRSLTPYQFYLKNGDSKLWGGAISWEEIEQRVYKVLPYYKAKRFTSKIKIEEADVKSSFIERQLNDTRYISKKVKEIMSQVCEDVRVLPGQLTSELRHLWGLNNILQPVMLVDLPNYKLEKGKSTPHYVVLDEANKPISVIPIYKEKPLLKANETTITGKVDKGVFKVNDNFIKLNVNTPELINGEYWLKLKLSKPKEIIRIFKERPITTENEIVLRGKIEKGKFSNQSISRIIATNFDNGSYWAKLPVTNIKFETPEKGKQPKKTGKQILLYGEVKEGIFKSYIFECSTSEQNGKYWVIIDINTENVSFERAINEKPAVSDKRIIIEGSVNDIGVFVSEIDTEHQFETDQKKGKYWFVFDIIDNLNDFNAIKNTKPSPEKEQTLVEGNVWVDKYTGEIKFDPKKNRDDHRHHAIDALVIALSKQRYFQELSVYNAQRDARKKGLVFDKEQLNFPDPWNDFHRDAKKEIEKILISHKQNKNILTKVTKKITKNGKTYTSVGDAVRGQLHKEYIYGERQAPLKTTKGYHRRIKISELSDSQIVKIVDGEIRKIIINAKKEEIVLKKEIIHLEKIKKQYKTEEEENSINEQIEIIKNKIHALYTLKNKNGVPVPIKKVRIRTEMSNAQQLKDANQFVDLQNNHHIIIYKNEKEELKEDIISFWEVVERLRDNQKIYQLPSVDRNGTIITTLQENDIFILGLTDNEFRDNKNNYTFLTKHLYRVQKTSKMDISFRHHLASTLEKKEQVIRVASLKKYESLNPKKVRINELGEIKKFNL

SEQ ID NO: 15139 - protein, 1506 aa, unidentified
  REGION 1..1506: note = Cas Enzyme sequence
IGTGDKEESKNASRRNSRQQRRQFYRKRLRKVKLLRTLIDFKMCPLTNEELDKWVKWDKVLKSEGRKAPNSNAYEKWHRMNPYLLREKGLNEDLTLYEMGRVLYHLIQRRGFLSNRKGKGDGKIYKGKEGMTGILDTKKYLTKSTLGSFLYSISPKEGEPFKLITDENGNELRVRARYTLRSMYIEEFEKIWNRQAKQLGLNNKTATKNKILFLKGSLTENNRNKTKIEKLQNKYGIDNIKIEEIKDKLKKGLFHKVSISTQLPLKLFLGGEIEKDEDGNIKFKSNESVLFWQRPLRSQKGLLAKCRFEPDVKEKKGNYLQKGKTPCHLSHPLYERFRAWQFINNIKYGKNQKLEDSQRLQILELINSKDSNFNFSEIPKKLKMIYEKWNYGNEQKIVGNYTIKHLKPLFSEEIWNKKYEIETKNGDFLTEYGYERIWHCFHFFEDNDNLLKKLKIDFGLVEKYFEKVSKINIKEGYSNVSLKAIKNILPYLKEGLQMSDATLLGGVRNAFGSRWGYFKDDHEQIKKDILKINREKSNKEGESIAKIKSYLIENKYGFVKNDTQFIKLYHHSQEIDKKTLKDKLDPVENLRNPIVQQGVNETRRLVNQLIKKYGKFDKIQIELGRNIKNSKKGRQEQSSRISENTTKNDSARKLLTEYGLKHSRNNIQKVLLYKEMQDKGVVTICPYTNKSINIDDVLGHDNKIQIEHIIPKSVSLNDSFANKTLCESKFNSLKGNLTPYQFYLKNNDSKLWGGATSWEEIEQRVYKVLPYYKAKRFTSKIKIEDADVKSSFIERQLNDTRYISKKVKEIMSQVCEDVRVLPGQLTSELRHLWGLNNILQPVMLVDLPNYKLEKGKSIPHYVVLDETNKPISVIPIYKEKPLLKVNETTITGKVDKDVFKVNDNFIKLNVNTPELTNGEYWLKLRLSKPKEIIRIFKERPITTENEIVLRGKIEKGKFSNQSISRINATNFDNGSYWAKLSVTNIKFETPEKGKQPKKTGKQILLYGEAKDGIFKSYIFECLTSEQNGKYWVIIDINTENVSFERAINEKPTVSDKRIIIEGSVNDIGVFVSEIDTEHQFETDQKKGKYWFVFDIIDDLDEFNAIKNKKPSLEKEQTLVEGNVWVDKYTGEIKFDPKKNRDDHRHHAIDALVIALSKQRYFQELSAYNAQREAKKKGLVFDKEQLDFPDPWNDFHKDARKEVEKILISHRQNKNVLTKVTKKITKNGKTYTSVGNAVRGQLHKEYFYGRRQAPMKITKGYHIRKKVSDLKNKQLVKIVDDEIRKIIIKARKEEAVLKKDIILLEKRKKKSKTEEEDNNLNEQIKILKNNIQQFYTLKNKNGEPVPIKKVRIREEMSNAHQLKDNKQFVNPRNNHHIIIYKNKEGELKDDIVSFWEVVERQKQHQKIYQLPSKDGNCTMITTLQENDMFILGLTDDEFRDNENNSSFLTKYLYRVQKKSKMNIMFRHHLASTQKRKEQEIHVQSLGKYESLNPIKVIVNELGKISQL

SEQ ID NO: 15140 - protein, 1435 aa, unidentified
  REGION 1..1435: note = Cas Enzyme sequence
MERIKLGLDLGTNSIGWAVLIKKDGKYEFLEFEDKEGNAISTKGSYIFPKGVNADENSKAVERRGFRSARKRSQRIILRKIKTLRVLNEYELCPTFEEGELSKWKNKKIYPCENEAFIEWQRTGKKGGNTETERRKQPYYLRHLAATQEGLMNSKNGKLQLGRAFYHLAQRRGYLSNSDEEQTEDKLEQFKIDVRNILEENSDCAAFKEPFEVIFDAAKKDDKVKRLGNKIVRELKKEIVFENLKSFINKEFDKPENLGTVMKAIGALSQEIKSANEKGNCEPTLGSYFNFIYTTSNDKGLINKIRGRYTHRNEHYLEEFNYICKKQNITEDLKKELHFAIFHQRPLKSQKGLVANCPLETKRKRIALSHPLFEGFRMWESINRIKISRNENSKLEFLSVEEKELIKPLFLKVQDFEFRKIASIICNDKWYAYIKEPHKVYLKEEVKAIKGGVAEVFFNFPLDKKFSACPTTARLNTLLGKDEFKKLPFLNTSYKDEKNKQQVSIEDIWHCLFLDDFGKKTKQEGRKDFAIKHLTLDEKGITSFQKIKLAKGYGNLSKAALKKIVPFLKIGEIYSHAVFLANVSDVLGRKLSKSEETTVSEEVKKALKLHKEENKINGIVNNYIAKLKDKDKPEMLGSNSFNQDAHKKSLLDEIINWVTKSVFNKLNEREKNNLIENCWNKFNEVALDKLPKEIRFISTKVIPEFILEILQKSFPNEKIDISKLYHPSAMDKYPQANKRLGNPEIASIKNPVFNRAMHQIKRLCNKLILEGIIDKNTEVNVEVAGEINSASYRRALSLWQKEQETIRAWAKKEIINTYPKECRAEINPTETDVIKYIFWKEQSHQCLYTKKQISICDFLGGKTTYDIEHTIPRSRVNDNSLVNKTLADSEFNRKIKKDILPGLLNVTYKGEEINKETILQNRTANLNSYSFLGKKPNVSVQWNVSLFQLKTNYKKYKNAAKFMSDPTQHSEMMVKVHYTKMKLDYLSAKYKTFEVEEITKQFSNANLVDTRIITKYARAYLNSYFNKVNVVNGKITDTLRKMWGLEGENEQKDRSNHIHHCIDAIVVACVERGTVNWISEAFHKYERDYFKGNQNPRYQLKSPMNNFAERMHNLHKEVFIYHRQIDRIKPLIENLKKENAKKLNLRGKLNSQNPYAHIKKNDALIFVKRELITKFKIKDFKNIVDEGIKRRILTLGSDEYVDNFLKESIKKGYIELPECVNSKGKKISKMIIKKIRLQSSKSNLKDYKEIRLLDKSKFEYKRDYYFDKAKYTNYEAWIFGDLVPDENGKLRGRKSLIINHYDIVKNVFQEENTKPILKLHTDDLFIVFDKNPNEEIDWENVKDLQMRLFSVAKFIENKEKGVIKEIILKRHSYALGNVDKVPKENCIERGAEGIQLSDLDRVVLRRSPSTLKVIPVKQDALGNLDIEYSKSFLNF

SEQ ID NO: 15141 - protein, 1487 aa, unidentified
  REGION 1..1487: note = Cas Enzyme sequence
ARRNSRQQRRQLYRKRLRKIKLLRNLIDLEMCPLTHQELDVWAKWDKKKGKAGRKAPDSATYEEWHRLNPYVLREKSLHKDLTKFEMGRVLYHLIQRRGFLSNRKGKDDGAIYKGKPGMIGISRTQEQIGSKTLGSFLNSIYPTEGEPFQLITDENGNELRVRARYTLRDMYVEEFEQIWNRQANVLGLDNATAMKTKVRFLKGSLDRNRNKKKIEKLREKYGAENVKIEKLKDERNKKTLFKVTTTTQEPLKIFLGGEIYHDDEGNVKHKSQDSVLFWQRPLRSQKGLLAKCRFESDIKKDGKYLQRGKSPCLLSHPLYEEFRAYQYINNIEYGKRHKLEETQRLQVLDLINSKDSNFNFSEIPKKLKMQYEKWNYGDDQKVAGNKTIKQLSALFPNEVWKNKKEEIWHSFHFFDDDDNLIEKLKNDFGLAQKDIEKIEKVDLKEGYSNVSLKAIKNILPYLQRGLQMSDATILGGVRNAFGKRWHYFKDAQEQLENDILKINHQKNNKEGEALEKIKNYLADPDNKFGFSKNDKSFIKLYHHSQEIEEKQLKDKLDAVENLRNPIVQQGINETRRLVNQLIDEYGKFDRIKVELGREVKNSKKGRQEQSRRIYDNTAKNDDARRLLTEYGLKHNRDNIQKVLLYKEMQEKGVTTICPYTNKSINISDVLGRENKIQIEHIIPKSVSLDDSFANKTLCDAKFNGLKGNLTPYQFYLKNSDSKLWGGATSWEDIEQRAFKVLPYPKAKRFTSKIKVEDADVKSSFIERQLNDMRYISRKTKEIMSQVCDDVRVLPGGLTSELRHLWGLNSILQPAMNLNIDIKNIQEDRVYPHYVVLDEDNKPVLTVPIYNDKPKLGVNETTITGKVDKGVFKTTEKTEKYVKLSAETPELANGDYWLNLKLSEPKEIVRIFKERPEATADGLVLRGEINKEKFKNDGIGLITSKGLDNGKYWAKFTIIGKKFIAPEKDKQPKKIGKQVLLFGEVKEGLFKSYIYACETNEIDGKYWLLLDVDTDNVFFDKAINERPQVTESKIIIEGSVNEEGVFVSEMDADHQFKTKEKPGKYWVVFDILNELTEFNAIEQPKPLLQEKQILLEGVFWVNKDTGEIEFDPKKNRDDHRHHAIDALVIALSKQSYFQQLSAYNAARDAKKKLNPFEKEQLKFPHPWNSFRIDAQKEAEKILVSHKQNRKVLTEVRKKITKNGKTFTSVGNAVRGQLHMENVYGQRQAPFETTKGYHIRKKVADLKDNQLDKIVDLEIKKIIKNARKEEAILKKHIDTLEKQKKKVRTDEEEAQLNLQMQELKKQIELLYTLKNKNGEPVPIKKVRIREKMTNAQQLKESNQFVNPRNNHHVLIYKKENGELDKNVVSFWTTVERMKQNSKVVQLPSDGVEIIETFQENDMFLLFLEKDTNIEQLSQKELFNHLYKVQKIAGAVYFMEICFRSHIDSKISTEADYVYIKGFGDGKTGWNRFNPIKVKITPTGKIKKV

SEQ ID NO: 15142 - protein, 1559 aa, unidentified
  REGION 1..1559: note = Cas Enzyme sequence
LYIETFIIRESIYSKKIIMAKILGLDLGTNSIGWAVVDDSATKILGMGSRIFPEGVKAETIGKGDKEESKNAARRNSRQQRRQLYRKRLRKIKLLRNLIDLEMCPLTHQELDVWAKWDKKKGKAGRKAPDSATYEEWHRLNPYVLREKSLHKDLTKFEMGRVLYHLIQRRGFLSNRKGKDDGAIYKGKPGMIGISRTQEQIGSKTLGSFLNSIYPTEGEPFQLITDENGNELRVRARYTLRDMYVEEFEQIWNRQANVLGLDNATAMKTKVRFLKGSLDRNRNKKKIEKLREKYGAENVKIEKLKDERNKKTLFKVTTTTQEPLKIFLGGEIYHDDEGNVKHKSQDSVLFWQRPLRSQKGLLAKCRFESDIKKDGKYLQRGKSPCLLSHPLYEEFRAYQYINNIEYGKRHKLEETQRLQVLDLINSKDSNFNFSEIPKKLKMQYEKWNYGDDQKVAGNKTIKQLSALFPNEVWKNKKEEIWHSFHFFDDDDNLIEKLKNDFGLAQKDIEKIEKVDLKEGYSNVSLKAIKNILPYLQRGLQMSDATILGGVRNAFGKRWHYFKDAQEQLENDILKINHQKNNKEGEALEKIKNYLADPDNKFGFSKNDKSFIKLYHHSQEIEEKQLKDKLDAVENLRNPIVQQGINETRRLVNQLIDEYGKFDRIKVELGREVKNSKKGRQEQSRRIYDNTAKNDDARRLLTEYGLKHNRDNIQKVLLYKEMQEKGVTTICPYTNKSINISDVLGRENKIQIEHIIPKSVSLDDSFANKTLCDAKFNGLKGNLTPYQFYLKNSDSKLWGGATSWEDIEQRAFKVLPYPKAKRFTSKIKVEDADVKSSFIERQLNDMRYISRKTKEIMSQVCDDVRVLPGGLTSELRHLWGLNSILQPAMNLNIDIKNIQEDRVYPHYVVLDEDNKPVLTVPIYNDKPKLGVNETTITGKVDKGVFKTTEKTEKYVKLSAETPELANGDYWLNLKLSEPKEIVRIFKERPEATADGLVLRGEINKEKFKNDGIGLITSKGLDNGKYWAKFTIIGKKFIAPEKDKQPKKIGKQVLLFGEVKEGLFKSYIYACETNEIDGKYWLLLDVDTDNVFFDKAINERPQVTESKIIIEGSVNEEGVFVSEMDADHQFKTKEKPGKYWVVFDILNEFTEFNAIEQPKPLLQEKQILLEGVFWVNKDTGEIEFDPKKNRDDHRHHAIDALVIALSKQSYFQQLSAYNAARDAKKKLNPFEKEQLKFPHPWNSFRIDAQKEAEKILVSHKQNRKVLTEVRKKITKNGKTFTSVGNAVRGQLHMENVYGQRQAPFETTKGYHIRKKVADLKDNQLDKIVDLEIKKIIKNARKEEAILKKHIDTLEKQKKKVRTDEEEAQLNLQMQELKKQIELLYTLKNKNGEPVPIKKVRIREKMTNAQQLKESNQFVNPRNNHHVLIYKKENGELDKNVVSFWTTVERMKQNSKVVQLPSDGVEIIETFQENDMFLLFLEKDTNIEQLSQKELFNHLYKVQKIAGAVYFMEICFRSHIDSKISTEADYVYIKGFGDGKTGWNRFNPIKVKITPTGKIKKV

SEQ ID NO: 15143 - protein, 1559 aa, unidentified
  REGION 1..1559: note = Cas Enzyme sequence
LYIETFIIRESIYSKKIIMAKILGLDLGTNSIGWAVVDDNANKILGMGSRIFPEGVKAETIGKGDKEESKNAARRNSRQQRRQLYRKRLRKIKLLRNLIDLEMCPLTHQELDVWAKWDKKKGKAGRKAPDSATYEEWHRLNPYVLREKSLHKDLTKFEMGRVLYHLIQRRGFLSNRKGKDDGAIYKGKPGMIGISRTQEQIGSKTLGSFLNSIYPTEGEPFQLITDENGNELRVRARYTLRDMYVEEFEQIWNRQANLLGLDNATAMKTKVRFLKGSLDRNRNKKKIEKLREKYGAENVKIEKLKDERNKKTLFKVTTTTQEPLKIFLGGEIYHDDEGNVKHKSQDSVLFWQRPLRSQKGLLAKCRFESDIKKDGKYLQRGKSPCLLSHPLYEEFRAYQYINNIEYGKRHKLEETQRLQVLDLINSKDSNFNFSEIPKKLKMQYEKWNYGDDQKVAGNKTIKQLSALFPNEVWKNKKEEIWHSFHFFDDDDNLIEKLKNDFGLAQKDIEKIEKVDLKEGYSNVSLKAIKNILPYLQRGLQMSDATILGGVRNAFGKRWHYFKDAQEQLENDILKINHQKNNKEGEALEKIKNYLADPDNKFGFSKNDKSFIKLYHHSQEIEEKQLKDKLDAVENLRNPIVQQGINETRRLVNQLIDEYGKFDRIKVELGREVKNSKKGRQEQSRRIYDNTAKNDDARRLLTEYGLKHNRDNIQKVLLYKEMQEKGVTTICPYTNKSINISDVLGRENKIQIEHIIPKSVSLDDSFANKTLCDAKFNGLKGNLTPYQFYLKNSDSKLWGGATSWEDIEQRAFKVLPYPKAKRFTSKIKVEDADVKSSFIERQLNDMRYISRKTKEIMSQVCDDVRVLPGGLTSELRHLWGLNSILQPAMNLNIDIKNIQEDRVYPHYVVLDEDNKPVLTVPIYNDKPKLGVNETTITGKVDKGVFKTTEKTEKYVKLSAETPELANGDYWLNLKLSEPKEIVRIFKERPEATADGLVLRGEINKEKFKNDGIGLITSKGLDNGKYWAKFTIIGKKFIAPEKDKQPKKIGKQVLLFGEVKEGLFKSYIYACETNEIDGKYWLLLDVDTDNVFFDKAINERPQVTESKIIIEGSVNEEGVFVSEMDADHQFKTKEKPGKYWVVFDILNELTEFNAIEQPKPLLQEKQILLEGVFWVNKDTGEIEFDPKKNRDDHRHHAIDALVIALSKQSYFQQLSAYNAARDAKKKLNPFEKEQLKFPHPWNSFRIDAQKEAEKILVSHKQNRKVLTEVRKKITKNGKTFTSVGNAVRGQLHMENVYGQRQAPFETTKGYHIRKKVADLKDNQLDKIVDLEIKKIIKNARKEEAILKKHIDTLEKQKKKVRTDEEEAQLNLQMQELKKQIELLYTLKNKNGEPVPIKKVRIREKMTNAQQLKESNQFVNPRNNHHVLIYKKENGELDKNVVSFWTTVERMKQNSKVVQLPSDGVEIIETFQENDMFLLFLEKDTNIEQLSQKELFNHLYKVQKIAGAVYFMEICFRSHIDSKISTEADYVYIKGFGDGKTGWNRFNPIKVKITPTGKIKKV

SEQ ID NO: 15144 - protein, 1559 aa, unidentified
  REGION 1..1559: note = Cas Enzyme sequence
LYIETFIIRESIYSKKIIMAKILGLDLGTNSIGWAVVDDNANKILGMGSRIFPEGVKAETIGKGDKEESKNAARRNSRQQRRQLYRKRLRKIKLLRNLIDLEMCPLTHQELDVWAKWDKKKGKAGRKAPDSATYEEWHRLNPYVLREKSLHKDLTKFEMGRVLYHLIQRRGFLSNRKGKDDGAIYKGKPGMIGISRTQEQIGSKTLGSFLNSIYPTEGEPFQLITDENGNELRVRARYTLRDMYVEEFEQIWNRQANLLGLDNATAMKTKVRFLKGSLDRNRNKKKIEKLREKYGAENVKIEKLKDERNKKTLFKVTTTTQEPLKIFLGGEIYHDDEGNVKHKSQDSVLFWQRPLRSQKGLLAKCRFESDIKKDGKYLQRGKSPCLLSHPLYEEFRAYQYINNIEYGKRHKLEETQRLQVLDLINSKDSNFNFSEIPKKLKMQYEKWNYGDDQKVAGNKTIKQLSALFPNEVWKNKKEEIWHSFHFFDDDDNLIEKLKNDFGLAQKDIEKIEKVDLKEGYSNVSLKAIKNILPYLQRGLQMSDATILGGVRNAFGKRWHYFKDAQEQLENDILKINHQKNNKEGEALEKIKNYLADPDNKFGFSKNDKSFIKLYHHSQEIEEKQLKDKLDAVENLRNPIVQQGINETRRLVNQLIDEYGKFDRIKVELGREVKNSKKGRQEQSRRIYDNTAKNDDARRLLTEYGLKHNRDNIQKVLLYKEMQEKGVTTICPYTNKSINISDVLGRENKIQIEHIIPKSVSLDDSFANKTLCDAKFNGLKGNLTPYQFYLKNSDSKLWGGATSWEDIEQRAFKVLPYPKAKRFTSKIKVEDADVKSSFIERQLNDMRYISRKTKEIMSQVCDDVRVLPGGLTSELRHLWGLNSILQPAMNLNIDIKNIQEDRVYPHYVVLDEDNKPVLTVPIYNDKPKLGVNETTITGKVDKGVFKTTEKTEKYVKLSAETPELANGDYWLNLKLSEPKEIVRIFKERPEATADGLVLRGEINKEKFKNDGIGLITSKGLDNGKYWAKFTIIGKKFIAPEKDKQPKKIGKQVLLFGEVKEGLFKSYIYACETNEIDGKYWLLLDVDTDNVFFDKAINERAQVTESKIIIEGSVNEEGVFVSEMDADHQFKTKEKPGKYWVVFDILNELTEFNAIEQPKPLLQEKQILLEGVFWVNKDTGEIEFDPKKNRDDHRHHAIDALVIALSKQSYFQQLSAYNAARDAKKKLNPFEKEQLKFPHPWNSFRIDAQKEAEKILVSHKQNRKVLTEVRKKITKNGKTFTSVGNAVRGQLHMENVYGQRQAPFETTKGYHIRKKVADLKDNQLDKIVDLEIKKIIKNARKEEAILKKHIDTLEKQKKKVRTDEEEAQLNLQMQELKKQIELLYTLKNKNGEPVPIKKVRIREKMTNAQQLKESNQFVNPRNNHHVLIYKKENGELDKNVVSFWTTVERMKQNSKVVQLPSDGVEIIETFQENDMFLLFLEKDTNIEQLSQKELFNHLYKVQKIAGAVYFMEICFRSHIDSKISTEADYVYIKGFGDGKTGWNRFNPIKVKITPTGKIKKV

SEQ ID NO: 15145 - protein, 1125 aa, unidentified
  REGION 1..1125: note = Cas Enzyme sequence
MAKILGLDLGTNSIGWAIIDDKENKILGVGSRIFPMGVENLGDGDNEMSKNASRTGARGVRRQFFRKRLRKKVLLKALSENEMCPLLENDFQDWKKTKQFPSEKLKTWFALNPYELRQKALTEELSLVEIGRIFYHLIQRRGFLSNSRKGGSDDGAIFKGNAKDGKIGITETQGKIENKTLGSYLFEIYPKDNEPFEFGLDRIRNRYTTRKMYVDEFELIWEKQSVYHSNFTKELKTLFGGRKIDDYKEDGILFHQRPLRSQKHLVGNCSFETSKTKCPMSAIPFEQFRVWQWVNTVEYNGKKISQKEKEKIVEFLYANEKPDFKKIRKIIGKESAEFKFNYKDDDKIVGTHTISNLSNKKYFDKKWFEFSEKEKEDIWHILYFFESKSNLKEYAIKNWNFKEDQAESISKFNVKDGYANLSRKAILNILPFLKMGYTYDVAVVLGGIKNTFGLDWEKLSNEKRNFFYDNIYEIVRSKSKGGFINIIKDLLRNDYKISDNQMKKMYHHSATIDENVLLDNLPMGKEADKEIQAIRNPIVITALFELRKLVNELIAEHGAIYEIKVEMARDLKISKSQRNKIRINQKRLERENDRVKAEVLKYTNLSHDNILKFKLWEECRKTCPYTGKAIAINQLFTGEVQIEHIHPWSRSLNDSFSNKTLCYADENRNKGDKTPFEFYGSDENNWSAIKERALKLFSDTKEYPTAYQKFKRFVQEKFDDDFTSRQLNDTRYISKEAKNYLAKICNKVIVSPGQATANLRHKWGLNNILNNENEKTREDHRHHAIDALVMACTKTAYVQELSRWNRYNRKPELKDFPMPWETFRYDAEKAVDKILVSHKKVSNDITVRKHITEKNGKKHINVGVAARGQLHKETVFGKRNFNGEEAFHVRKPIDSLTTLKQVEKVVDESTRILIHKRIQALGGVVKDKMPADTFFVVDENGIKQPQIFLPNRNGEPVPILKVRMKENIGGAEKLKDKVNQWVNPRNNHHVLIYKDDKGTLQEEVVTFWTVVERKRQGFPVYQLPINGKEIVTTLHINDMFLLALNEDEIDWENLDYDFMNTHLFKVQTLSQMFYEFRLNSDATQNKDTNSKVFKRIQSFGEGKTGWSKFNPIKVKISVSGKIQKL

SEQ ID NO: 15146 - protein, 1492 aa, unidentified
  REGION 1..1492: note = Cas Enzyme sequence
MAKILGLDLGTNSIGWAIVEKENDEFSLVDKGVRIFSEGVKSEKGIESSRAAERTGYRSARRLKYRRKLRKYETLKVLSLNNMCPLSLKDVEEWKKSGFKKYPLNPEFLKWLRTNDDENINPYAFRDSASKEKVKLYDFGRALYHIAQRRGFLSNRLDQSADGILEEHCPKIQSLIEDLDTTEELLTEIKEYFIEIGIIDENIKGGYAKDLDEGDKKLVSLYKALFAIIKKNENNFEKTKEGVVERLNRKEDLGAVKSGIGEISYEMKVGNFTTLGQYFFSLYSKNKIRNKYTAREEHYLKEFEILCKTQEILGIYEKEQLPEKRYFSLVKELYRAIFFQRPLKSQKGLIGKCSFEKSKSRCAISHPDFEEYRMWTYLNTIRYGTQEDKTLRFLSQEEKLNLIPKFYRKKDNFNFEDLSKELIPKGATFGFYKSSKKNNYHYLFNYKPTDTVSGCLVSASLKNVIGEDWKTKVYTYATLNSKGDEVTSTVDYRDLWHLLSVSSTDIYLQEYAKQKLKLDDKNSKVFSKIRLKKDFGNLSLSAITRILPYLKQGLLYSHAVFMANIEQIVDKDIWEDTNLRIEIQKKIAEIIENHTYENGLLEVVNSLIKECIKPHKDGNQQFYSKQAEGLYKKDLNKKLAIFFKYNNIDNENQKASILNNLFLVFIEQLKAFEFAKIKRLDEKVIEFLKGENNDGTIYCTDEKRIKKLYHPSDIEVFKKKIIKDELGNEKIVLGSPLTPSIKNPMAMRALHQLRKVLNTLIFEGQIDQKTRIHIEMARELNDANKRKGIQDYQNEIKNEREKYIIEIKKLYFEECKKEIEPNQDDLLRYQLWLEQNKAEIYEEGKNISISDIIGSNPKYDIEHTIPRSISQDNSQMNKTLCSQLFNRDVKGVKMPTELSNYLEILPRIAHWKETADNLSREIEIISRSIKSAVTKEQKDKKIRRRHYLNLKRNYFQGKYDRFIWEEPKVGFKNSQIPDTGIITKYSQAYLKSYFKRVESVKGGMVAEFRKIWGIQESYQENGKKYFNEKDRSKHTHHTLDAITIACMTKDKYDILAHAWTQEDQGKIKEARILLADSKPWKTFKEDLAKIEEEILVSHYTPDNIKKQSKKIIRVRGKKQFIAEIERDEKGKAIPKKDANGKIIYKLDKDGKKLPRLQQGDTIRGSLHQNSIYGAIKQPEIDDATKKPKHTSKGAFVIKKDIKGEDIIHYVIRKELNKLSESDVTNIVDNVVREKIIKAIDDGIVTFKTIQSKKVAVIKEGVKIWMREPDEEKELVGIPINKVRIFANSVKNPLEIKEHSSLSKSRHEHKQKVYGQNDENYAMAIYELDGKREFELINNFNLAKLLKQDQGFYPLHIEKEIKGKKILIPIAKSNKNDIVLKRGQQVIFYDKVLEKPKDISEIVDFNGRIYIIEGLSIQRQIVSGKLYEFGVISFRYFKEARKADEIKKDNYKPDGAFKLGEVKPTRKMNHSQFAAFVEGIDFRVLSTGKFERI

SEQ ID NO: 15147 - protein, 1126 aa, unidentified
  REGION 1..1126: note = Cas Enzyme sequence
MAKILGLDLGTNSIGWALIDDTKNKILGVGSRIFPMGVIDLGNGDSEISKNASRTGSRGVRRQFFRRRLRKKVLLKALAENKMCPMIDSDFENWKNTKQFPSELLSSWFAINPYELRKKALSEKLTLEEIGRIFYHLIQRRGFLSNSRKGGSDDGTIFKGNAKEGKIGIDETVESIADTTLGSYFYDIFPKANEPFKSGLERIRNRYTTRKMYVDEFELIWNKQNQYHYQLTPELKELFGGRKLDGYKADGILFHQRPLRSQKHLIGKCSFEQTKTKCPISAIPVELFRIWQWVNTVEFNGEKITNEEREKMIELLLVSEKIEFKKLRKAIGKESADFKFNYKDDDKIVGTHTISNLSNKKYFGKKWFDLSEKEQDDIWHVLYFFESKSNLKDYAIKNWNFTNEQAESISKFNVKDGFASLSRKAITNILPFLIEGYTYDVAVVMGGVKNSFGEKWQTETPEINKKQLDFIDNIYDIIRSKIKGGFIDTIKEILKKEFGFTEKQFKKLYHHSAVIDQKSLLDKLPTGTVADKEIQKIKNPIVITALFELRKLVNELIVDYGQLDEIKVEMARDLKVSKTQRNQIRREQKRLEKENDRVKERLVENNIRITHDNILLYKLWEECKKTCPYTGKSISIIQLFSGEVQIEHIHPWSRSLNDSFNNKTLCFADENRRKGDKTPFEFYGNDEQNWSAIKERALKLFSDTKEYPNSYQKFKRFILTKFDEDFSSRQLNDTRYISKEAKDYLGQICSKVLVSPGQATANLRQKWGMNHILNDDNEKTREDHRHHAVDALVMACTKISYIQELSKWNRYNRNSTLKDFPMPWEGFRKEAENAVDNILVSHKRTSNDITVRTHAVEKNGKVHKNKGVAARGQLHKETVFGKRNFNGEEAFHIRKPIESLTTEKQLEKIVDFTTKKLILKRIQELGGFVKGTIPANTFFTVDAAGLKLPQIFMPNKNGEPVPVLKVRMRENIGRAEQLKDDINQWVNPRNNHHVLIYIDNKGNLMEDVVTFWTVVERKRQGQSVYQLPADGKEIVTTLHINDMFLLGIKEDEINWENPDYNELKEHLYRVQKFTSGDYYFRISSTSTIQNADEKQQINSFGFGKNGWLNHFPIKVKVSVSGRLQKI

SEQ ID NO: 15148 - protein, 1124 aa, unidentified
  REGION 1..1124: note = Cas Enzyme sequence
MAKILGLDLGTNSIGWAIIDDKENKILGVGSRIFPMGVENLGDGDNEISKNASRTGARGVRRQFFRKRLRKKVLLKALSENKMCPLLENDFQDWKKTKQFPSEKLKTWFALNPYELRQKALTEELSLEEIGRIFYHLIQRRGFLSNSRKGGSDDGAIFKGNAKDGKIGITETQGKIEDKTLGSYLFEIYPKDNEPFECGLDRIRNRYTTRKMYVDEFELIWEKQSEYHSNFTKELKTLFGGRKIDDYKEDGILFHQRPLRSQKHLVGNCSFETSKTKCPMSAIPFEQFRVWQWVNTVEYNGKKISQEEKEKIVEFLYANEKPDFKKIRKVIGKENAEFKFNYKDDDKIVGTHTISNLSSKKYFDKKWFQFSNKEQEDIWHILHFFDSKSNLKEYAIKKWNFTEDKAESISKFNVKDGYANLSRKAILNILPFLKMGYTYDVAVVLGGIKNTFGLDWEKLSNEKRNFFYDNIYEIVRSKSKGGFINIIKDLLRNDYKISDNQMKKLYHHSATIDANLLLDNLPMGKEADKEIQAIRNPIVITALFELRKLVNELIAEHGAIDEIKVEMARDLKISKSQRNKIRINQKRLERENDRVKAEVLKYTNLSHDNILKFKLWEECRKTCPYTGKAIAINQLFTGEVQIEHIHPWSRSLNDSFSNKTLCYADENRNKGDKTPFEFYGSDENNWSAIKERALKLFSDTKEYPTAYQKFKRFVQQKFDDDFTSRQLNDTRYISKEAKNYLAKICNKVIVSPGQATANLRHKWGLNNILNNENEKTREDHRHHAIDALVMACTKTAYVQELSRWNRYNRKPELKDFPMPWETFRYDAEKAVDKILVSHKKVSNDITVRTHITEKNGKKHINVGVAARGQLHKETVFGKRNFNGEEAFHVRKPIDSLTTLKQVEKVVDESTRILILKRIQELGGVVKDKIPADTFFVVDENGIKQPQIFLPNRNGEPVPILKVRMKENIGGAEKLKDKVNQWVNPRNNHHVLIYKDDQGNLQEEVVTFWTVVERKRQGFLVYQLPTNGKEIITTLHINDMFILGLNEDEINWQNLDYEVLKEHLYRVQKLSSKFYEFRLCSQASIQNNQHPNYISIRGFGEGKTGWSKFNPIKVKISVSGKIQKL

SEQ ID NO: 15149 - protein, 1453 aa, unidentified
  REGION 1..1453: note = Cas Enzyme sequence
MAKILGLDLGTNSMGWAIVDKESNKFSLVDKGVRIFSEGVKSEKGIESSRAAERTAFRSARKLKYRRKLRKYETLKVLSKNNMCPLSIEEVEEWKKSGFKEYPLNPEFLKWLRTDEDKNINPYVFRDRASKQKVSLFELGRALYHIAQRRGFLSNRLDQSAEGILEEHCPQINSKIEDCNSNTEILKELKDYFFNVGILDEMNKGGFKKELDEGEAKLKTLFNALLGIVKRNENKFIVAKEEIIARLNRKEDLGKVKGKIKDISQAMLDGNFKTLGQYFFSLYSKSKIRNQYTSREEHYLEEFNVICEKQGIGEINVDELLPEKKYNGLAKDLYKAIFFQRPLKSQKGLIGKCSFEKSKTRCPISHPDFEEYRMWTYLNTIKIGTPSDKTLRFLSHDEKQSLIPKFLRKKDNFNFDDLAKELIPKGATSGFYKSSKANEVNYLFNYKPYDTVTASPVSASFKNIFGEDWKIKTISYKTKNAKGNEVSRTVDYKDLWHLLSVSTSDIYLFQFAKEKLGLDDNNAKAFSKIRLKKDFASLSLNAITKILPYVREGLLYSHAVFMANIENIVDENIWNDESQRKFIQDKIAEIIEYHTFENGKLEVINSLIKECKTAGAFYSNEAESIYKSDLDKKLIPFIKYHKIESDKESILNELFPVLIEQLKKYEYIKINRLDEKVLDFIKGKNDDGEIFCTNEKRINKLYHPSDVEVFKKKIIKDEFGNEKVVLGSPLTSSIKNPMAMRALHQLRKVLNTLIFEGQVDEKTIIHIEMARELNDANKRKGIQDYQNENKKFRDDAIKEIKKLYLDAKGIEIEPTDDDVLRYQLWMEQDRKEIYENGNSIGISQIIGSNPDYDFEHTIPRSRSQDNSQMNKTLCSQKFNREIKGNKMPIELNNYFEILPRIAHWKEESDNLTREIEIISRSIKAASTKELKDKKIRRRHYLTLKRDYLKGKYDRFIWEEPKVGFKNSQIPDTGIITKYSQAYLKSYFKRVESVKGGMVAEFRKIWGIQESFQENDKKYFHEKDRSKHTHHTIDAITIACMTKEKYDVLANAWTHEDKGQLGEARKLLADSKPWKTFKEDLKKIEEEILVSHYTPDNVKKQSKKIVRVRGKKQYVAETIKDTNGKAIVQKDGNDKIIFKLDKEEKRIPRLQQGDTIRGSLHQDSIYGAIKNPLNTEEIRYVIRKDLESIKASDVENIVDEMVKEKVKDAIANKVLVMSSNAQQKNKLDGTVWMNEEKGIPINKVRLYANSVKNPLHIKAHSDLSKSRHEHKQKVYGQNDENYCMAIYELDGKRDFELINNFNLAKLIKQGQGNYPVSKEKEVKGKKVQIPIAKSNNRDIILKKGQQVIFYDKAVEIPKDITEIIDFMGRIYIIEGLSINRVKSGNNFYEFGVIQLRYFKEARKSDDIKKDNFKPDGDFKLGENKPTRKMSPGQFTAFVEGIDFRVLPSGKFQKI

SEQ ID NO: 15150 - protein, 1023 aa, unidentified
  REGION 1..1023: note = Cas Enzyme sequence
LFEKFRMYQYLNSIKVKERNSDKFVFLSDFPEYYKIAEDKFYRVSAKNFKFLDISKSINNVAKKNNLYFEFNYNDKYPIVGSPTISRFIEVFDANDWDDCKTIIKSKYIKQDDKSTDELVDELWHTLFFSGDFVNDITSEKVKKFIRDRFDISDEKVNYYEKINLKQGYSSLSKKAIGKILPFLKNKIIYPYAVFFANIDEIIGKEKWIESKQFIQDTIVDIISCYKDQTLKIDIVNGLVGDFINEYDNSHYDYIIDETDKKNVTERIKLFYGKYLWEQMSKEQRNEIQKEVESLFQEQLQKRRVGGYFLSKPRVDEIIKDFLVQEYKVSKEQVGKLYHPSAIDAYPQSQDGFLGLPFTDSIKNPMAMRTLFYLRKLVNTLLKENKIAPDTEIIIELARELNDKNKRQAIERWQRERENENKKFREKLEELAKDTNSVVTETDIIKYRLCQEQNGVCLYTNKTINCEKLLGSNPQFDIEHTFPRSKSFDNSLANKTLADKAFNQIKGNRIPQDLEEEYKQNFLFNTREWKIKIEELEEKIEQQKYFSKVASTVEQKNRAIQQRHYLKLELDYWKQKLYRFTATEIKPNFKNSQLVDTGIITKYSELFLKSLFQRVFPAKGSMVADVRKSWGLNAKDRNFHYHHAIDAVVLTCMDKSIREGLTKAFNDVEKLGDKEKFKVEKPWKTFTEDVNQLKDKIIVVHNHKDKIQKQTKRKLRQRNKIQYDTSGNVIYEKGQGIRGSLHKDTFYGAIERENENNEKEIWFVLRKPVNSSFSDADANNIVDEGIKSRILKHGLKNIRTEQGWILLPKEVDEKGNEIKEMLIKRIRVKTNNKNLPKIKAQSHVAQKNRKPYKEHYYATLENIFAMAIYENVNDKGKKEQAFKTISAFDLAQHNQGSSKLEMPVEANIVKNQGKKNEILIPLSNILRVNQMAIFYEGNPEELKSISKENLSKRLFKITQFESDGRIQLRHHAQGGADKDLVKESAVNFEKPVQKLRISLSNVKAIFEGKDFVLHPTGKIDFLI

SEQ ID NO: 15151 - protein, 1124 aa, unidentified
  REGION 1..1124: note = Cas Enzyme sequence
MAKILGLDLGTNSIGWALIDDVQNSILGIGSRIFPMGVENLGEGEGREMSKNAGRTGARGVRRQFFRRRLRKKILLKALSENKMCPISTNDFEQWKKTKKFPSEKLANWFALNPYELRNKALVEKISLEEIGRIFYHLIQRRGFLSNSRKGGSDDGAIFKGNAKEGKIGITETQESINDKTLGSYLFEIYPKENQPYKYGLERIRNRYTTRKMYIDEFELIWDKQAQFYKELTHELKTKFGGRKLDDYKEDGILFHQRPLRSQKHLVGNCTFEPSKTKCPVSAIPFEQFRVWQWVNTIEYNGEKISQEEKQLIVEFLFANEKPEFKKIRKAIGKESTEFKFNYKDEDKIVGTHTISNLSNNKFFGKKWFDFTEKEQEDIWHVLYFFDSKSNLKEYAIKNWNFTEEQAATISRFNVKDGYSSLSRKAISNILPFLKLGFTYDVAVVLGAIKNVFGLEWEKLSDEKRNYLVDNVEGIVRSKTKGGFIDIIKDILRKDYNISDNQLRKLYHHSATIDVSDLLEKLPIGKDADKEIQKIKNPIVITALFELRKLVNELIDEHGKIDEIKVEMARDLKISKSERYKIRRNQQRLEKENDRVKDEVLKYQVILSHDNILKFKLWEECKKTCPYTGLSIPINELFTNKWQIEHIHPWSKSLNDSFSNKTLCLGTENIKKGNKTPFEFYGSDEANWSVIKERALKLFSDTKEYPNAYQKFKRFVKQKFDDDFSTQQLNDTRYISKEAKNYLSRICKKVMVSPGQATSKIRHKWGLNNILNVDNEKTREDHRHHAIDALVMACTKLSYVQELSKWNRYNRTFDLKDFPMPWEGFWADTNRVVSKILVSHKKTTNDITVRFKTVEKNGIKHINKGVAARGQLHKETVFGKRLFNGDEAFHVRKAIESLETSKQIDKVVDESIKLLILKRVNELGGFLKDKVPANTFFVVDESGVKQPQIFLPNKNGAPVPILKVRMKESIGRAENLKENVNQWVNPRNNHHVLIYKDEKGNLKEDVVTFWTVVERKRTGQSTYQLPFDGQEIVTSLHTNDMFVIGLNEDEINWESIDFYMLSQYLYRVQKTSKKEKSFEFNFRLAIASSLDNKNQEISIQSFKKWKELNPIKVKISVSGKIEKA

SEQ ID NO: 15152 - protein, 1292 aa, unidentified
  REGION 1..1292: note = Cas Enzyme sequence
MTKVLGLDLGTNSIGWAIRDTNKAGNQIIDTNVIVFPQGVGEEKGVEFSLASERTKHRASRKLYRRTKKRKTDLLNLLIENGFCPLTTEELLIWSSYEKGREMKYPTDNFEFSEWLKINPYEVRAKAVNQIVLKQELGRALYHICQRRGFKSGRKDTDAGKDLEQYKKEQIILEQNGFKTLGEYYFDLLQNDKKVRKTKFSADDQEVNSSRISYVEEFNILMKSQNIEKELSDALFEAIFFQRPLKSQKGSVGKCTLEKTKARCPISQPLFEEFRMFQYLNSIKVKERNNDKFVFLSSYPEYYKIAMDKFYRVSAKTFKFVDISKGINTVAKRNNLFFEFNYNDKYPIVGSPTISKFIAVFDAADWKNCKEIISTKYKKLDNKNTDELVDELWHTLFFSGDFVNDVTSEKVKSFIRNRFDISEEKIDYYETINLKQGYSSLSKKAITKVLPFLEKAIIYPYAVFFANVDVIIGQDKWRENKEFIQDTIIDIISNYKAQTLKIDIVNGLVGDFINEYDNSNFDYVLDETDKKNAAEKTKLFYGKYEWDQMSDETKNELLNDIEIDFQKQLKKRRVGGYYLPKPRVDEIIKDFLIQEYKVSKEHVDKLYHPSAIDAYPQSQDNLLGLPFTNSIKNPMAMRTLFYLRKLVNTLLKENKIAPDTEIIIELARELNDKNKRLAIERWQRERENENKKFREKLEELAKDTNSKVTDADIIKYRLCQEQNGKCFYTNKTINCEKLLGSNPQFDIEHTFPRSKSFDNSLANKTLADKAFNQIKGNRIPQELEEEYKNNFKINIKDWEEKIGELEEKIEQQKYFSKVASTVEQKNSAIQKRHYLKLELDYWKQKVYRFTATEIKPNFKNSQLVDTGIITKYSELFLKSLFQRVFPAKGTMVADVRKSWGLGEKDRNFHYHHAIDAVVLTCMGKSIRDGLAAAFKESEENRYQEKFKIAKPWQTFTEDVFQLKESIIVVHNHKNKIEKQTLKKLRKRNKIQYDKLGNVVFEKGQGIRGSLHKDTFYGAIERENENAEKEIWFVLRKPVNSNFSDADVNNIVDVGIKNRILKHGLKNIRTIENWLLLPAEKDEKGKEIKEMLIKKIRVKTSNKNLPKIKSQSHVTQGNRKEYKEHYYATLENIFGMAIYESFDSKGKKEQAFKTISAFDLAKHNQGKIKLEMPVEENIIKNKGKKSEVLTPLTKVLRVNQMALFYENSPEELKQLSKSELNNRLFKITQFESDGRIQLRHHAQGGADKDLKKESSVNFEQPVQKLRISLSNVKAIFEGKDFILHSSGKIDFEF

SEQ ID NO: 15153 - protein, 1126 aa, unidentified
  REGION 1..1126: note = Cas Enzyme sequence
MAKILGLDLGTNSIGWALIDDVQNKILGIGSRIFPMGVENLGDGDGEISKNASRTGARGVRRQFFRRKLRKKVLLKALTENKMCPMDTQDFEDWKKTKEFPSEKLANWFALNPYELRQKALNKKLSLEEIGRIFYHLIQRRGFLSNSRKGGNDDGTIFKGNPKEGKIGITETQESIQDKTLGSYLFEIYPRENQPFQDGLERIRNRYTTRKMYMDEFELIWNKQSQFHATLTDDLKTLFGGRKLDGYKEDGILFHQRPLRSQKHLVGNCSFEPTKTKCPISAIPFEQFRVWQWVNTVEYNGKKISQDEKEKIVEFLYANEKPEFKKIRKAIGKESAEFKFNYKDDDKIGGTHTISNLSNKKYFGKKWFEFSDKEQEDIWHVLYFFDSKSNLKEYAIKNWNFTEEQAESIAKFNVKDGYSSLSRKAISNILPFLKIGFTYDVAVVLGGIKNVFGCDWEKLSDEKRNFLIDNIEGIVRSKTKGGFIDIIKDILRNDYNILDNQLRKLYHHSATIDVAELLEKLPVGKEVDKEIQAIRNPIVITALFELRKLVNELIDEHGKIDEIKVEMARDLKISKSQRNKIRREQKRLERENDRVKARLLEEGQRITHDNILLYKLWEECKRTCPYTGKPISVTQLFSGEVQIEHIHPWSRSLNDSFSNKTLCYADENRKKGDKTPFEFYGNDEANWSAIKERALKLFSDTKEYPNAYQKFKRFVQQKFDDDFSSRQLNDTRYISKEAKNYLSRICKNVIVSPGQATSNLRQKWGMNNILNDENEKTREDHRHHAVDALVMACTKISYVQELSKWNRYNRNSELKNFPLPWETFRKDAEVAVDKILISHKKVSNDITVRTHKCEKNGKTHVNVGVAARGQLHKETVYGKRTFNGEEAFHVRKSIDSLTTEKQLDKVVDESIKLLIRNRIQVLGGFVKGNIPANTFFVVDENGIKQPQIFLPNKNGAPVPVLKVRMKENIGGAEKLKDKLNQWVNPRNNHHVLIYKDEKGNLKEEVVTFWTVVERKRTGQSAYQLPLDGKEMVTMLHINDMFLLGVNEDEINWADPDYEVLKEHLFKVQTLSQMFYEFRLCSDATQNKDTNSNVFKRIQSFGDGKTGWRNHNPIKVKISVSGKIEKI

SEQ ID NO: 15154 - protein, 1124 aa, unidentified
  REGION 1..1124: note = Cas Enzyme sequence
MAKILGLDLGTNSIGWAIVDDIQNKILGVGSRIFPMGVENLGDGDNEMSKNASRTGSRGTRRQFFRRRFRKKKLLKALSENKMCPLVNNDFEDWKKTKQFPSDKLEEWFTLNPYELRQKALTEKLALEEIGRIFYHLIQRRGFLSNSRKGGSDDGTIFKGNAKEGKIGITETQEKIEDKTLGSYLYEIYPKENEPFKDGLERIRNRYTTRKMYVDEFELIWNKQSQFHSNLNEDLKTLFGGRKLDGYKEDGILFHQRPLRSQKHLVGNCSFEPTKTKCPISAIPFEQFRVWQWVNTVDYNGMKISNEEKERIVEFLFANEKPEFKKIRKVIGRESAEFKFNYKDDDKIVGTHTISNLSNKKYFGKKWFEFSDKEQEDIWHVFYFFDSKSNLKDYAIKNWHFTEEQAISISKFNVKDGYASLSRKAIDNILPFLQMGFTYDVAVVLGGIKNSFGLDWVNLSDEKRNYFYDNVYEIIRSKNKGGFIDIIKDILRKDYNLLDNQMKKLYHHSATIDVNELLEVLPTGKEADKEIQTIKNPIVITALFELRKLVNELINEHGVLDEIKVEMARDLKISKSQRNKIRKDQKRLERENDRVKEEVLKYTRLSHDNILKFKLWEECKKTCPYTGLTIPVNELFTNKWQIEHIHPWSKSLNDSFSNKTLCLGTKNIEKGNQTPFEFYGNDEASWSAIKERALKLFSDTKEYPNSYQKFKRFVQQKFDDDFTSRQLNDTRYISKEAKNYLSKVCKKVMVSPGQATSNLRQKWGMNNILNDENEKTREDHRHHAVDALVMACTKISYVQELSKWNRYNRNSELKQFPLPWEMFRFDAEKAVEKILVSHKKVSNDITIRKHKCEKNGKTHINVGVAARGQLHKETVFGKRTFNGEEAFHVRKAIDTLTTLKQVEKVVDETTKKLILKRIEELGGIEKDKIPANTFFIVDENGIKQPQIYLPNKNGNPVPILKVRMKENFSGAEKLKDNINQWVNPRNNHHVLIYKDEKGNLKEEVVTFWTVVERKRTGQSAYHLPIDGKEIVTTLHINDMFLLGLKDDEINWENPDYDVLKEHLYRVQKLSSKFYEFRLGSESSIQKNVLPFYRRITGYGEGIGGWLTHNPIKVKVSVAGKISKI

SEQ ID NO: 15155 - protein, 1531 aa, unidentified
  REGION 1..1531: note = Cas Enzyme sequence
MAKILGLDLGTNSIGWAIVDKNGNDFSLVDKGVRIFTEGVKSEKGIESSRAAERTGYRSARKLKYRRKLRKYETLKVLSKNGMCPLSIKEVEEWKKSGFKEYPLNPEFLKWLRTDEESNVNPYYFRDKASKQKATLYEVGRAFYHIAQRRGFLSNRLDQSAEGILEEHCPKIQSIIEDINSSDEILEELKEYFFETGILDSNEKSGFAKDLDEGDKKLVSLYKSLQAIVKKNDTDFEKCKSEIIERLNKKDVLGKVKGKIKDISQAMLDGNFKTLGQYFYSLYNKERIRNQYTSREEHYLAEFITICKTQGIGSINEMEILPEKKFENLAKDLYKAIFFQRPLKSQKGLIGKCSFETSKSRCAISHPDFEEYRMWTYLNTIKIGRQSEKTMRFLTQDEKLKLAPKFYRKNDFNFEVLAKELVEKGASFGFYKSSKKNDFFYWFNYKPTDSVSACQVSASLKNVIGEDWKTKTFEYKTINSKKEEVNKSVNYKDLWHLLTVATSDIYLNEFAKNKLGFDPKNAKAFSKIKLKKDFASLSLSAITKILPYLKQGLQYSHAVFMANIENIVDTDIWNDINQRKLIQSQIAEIVENYTFDKNQLEIINGLIRDSKLKEEYYSKEAESIYKKDLADKLMSFYKYNSIENESDQKSIHDNLFPVFIEQLKKHEYIKVKRLDEKVLEFLSGENEDGQVFCNNSKNLKKLYHPSDIDVFKKQIARDENGNETGQLILGSPLTPSIKNPMAMRALHQLRKVLNTLILEGQVDENTRIHIEMARELNDANKRKGIQDYQKDNKDFRINAIKEIKKLYFEETKKEVEPTEDDILRYQLWVEQDMKEIYEQGNNISISDIIGSNPSYDIEHTIPRSISQDNSQMNKTLCSQRFNRDVKKQKMPVELTNHLEILPRIAHWKEQANNLSREIEIISRSIKVVATKEAKDKKIRRRHYLTFKRDYLQGKYDRFIWEEPKVGFKNSQIPDTGIITKYSQAYLKSYFKRVESVKGGMVAEFRKQWGIQESYIDENGFKQYKVKDRSKHTHHTIDAITIACMTKDKYDVLAHAWTLEDEQNKKEAKAIIEKAKPWKTFKEDLLKIEDEILVSHYTPDNVKKQSKKIVRVRGKQSYSIKSELPKGYQNKVEGKDYFKLIFDSEILYKMPKNKEKQTDTYYEELPKNYLNKIEGKDYFIIKTNEETFYKIPKFNLGDTIRGSLHLAGNYGAIKQPEIDEVTRKPKHSTNGSFILKKDIKGNEIIKFVERKSLSKLSENDISNIVDDVVSGKIQKAILEGIITFKTVLGKKVAVLKDGATIWMREPNEEKELVGIPINKVRVFIPNVKNPLEIKKHSLLSKSRFEYKQTIYSQNDENYAMAIYELDGKREFELINNFNLAKLLKQDQGFYPLHKEKEVKGKKVLIPIAKSNNIDIVLKKGQQVIFYDKTIEKPKDISEIMNFKGRKYIIEVLSIQRQKDKKTDKINEYGIIQLRYYKEARKSEEISKDNFKPDGAFKLGEYKPTRKMNHSQFSAFVEGVDFKVLPTGKFEKI

SEQ ID NO: 15156 - protein, 1459 aa, unidentified
  REGION 1..1459: note = Cas Enzyme sequence
KILGLDLGTNSIGWAIVDKDDNDFSLVDKGVRIFTEGVKSEKGIESSRAAERTGYRSARKLKYRRKLRKYETLKVLSKNGMCPLSIKEVEEWKKSGFKEYPLNPEFLKWLRTDEESNVNPYYFRDKASKQKATLYEVGRAFYHIAQRRGFLSNRLDQSAEGILEEHCPKIQSIIEDINSSDEILEELKDYFFETGILDSNEKSSFAKDLDEGDKKLVSLYKSLQAIVKKNDTDFEKCKSEIIERLNKKDVLGKVKGKIKDISQAMLDGNFKTLGQYFYSLYNKERIRNQYTSREEHYLAEFITICKTQGIGSINEMEILPEKKFENLAKDLYKAIFFQRPLKSQKGLIGKCSFETSKSRCAISHPDFEEYRMWTYLNTIKIGRQSEKTMRFLTQDEKLKLVPKFYRKNDFNFEVLAKELVEKGASFGFYKSSKKNDFFYWFNYKPTDSVSACQVSASLKNVIGEDWKTKTFEYKTINSKKEQVTRTVNYTDLWHLLYAPTSKDEIYLNEFAKNKLGFDPKNAKAFSKIKLKKDFASLSLSAITKILPYLKQGLLYSHAVFMANIENIVDTDIWNDINQRKFIQSQIAEIVENYTFEKNQLEIINGLIRDSKLKEEYYSKEAESIYKKDLVDKLMSFYKYNSIENESDQKSIHDNLFPVFIEQLKKHEYIKVKRLDEKVLEFLSGENEDGQVFCNNSKNLKKLYHPSDIDVFKKQIAQDENGNETGQLILGSPLTPSIKNPMAMRALHQLRKVLNTLILEGQVDENTRIHIEMARELNDANKRKGIQDYQKDNKDFRINAIKEIKKLYFEETKKEVEPTEDDILRYQLWVEQDMKEIYEQGNNISISDIIGSNPSYDIEHTIPRSISQDNSQMNKTLCSQRFNRDVKKQKMPVELTNHLEILPRIAHWKEQANNLSREIEIISRSIKVVATKEAKDKKIRRRHYLTFKRDYLQGKYDRFIWEEPKVGFKNSQIPDTGIITKYSQAYLKSYFKRVESVKGGMVAEFRKQWGIQESYIDENGFKQYKAKDRSKHTHHTIDAITIACMTKDKYDVLAHAWTLEDEQNKKEAKVIIEKAKPWKTFKEDLLKIEDEILVSHYTPDNVKKQSKKIVRVRGKKQFIAEIKRNEKGKAIPKKDANGKVIYKLDEEGKKIPRFQQGDTIRGSLHQDSIYGAIKNPLNTEEIRYVIRKDLESLKASDIENIVDEIVKEKVKEAVANKILSLSSNAQQKNKIDGTVWMNQEKQVLINKVRIYANSVKNPLEIKEHSLLSKSRHEHKQQVYGQNDENYAMAIYELDGKREFELINNFNLAKLLKQDQGFYPLHKEKEVKGKKVLIPIAKSNNIDIVLKKGQQVIFYDKTIEKPKDISEIMNFKGRKYIIEVLSIQRQKDKKTGKINEYGIIQLRYYKEARKSEEISKDNFKPDGAFKLGEYKPTRKMNHSQFSAFVEGVDFKVLPTGKFEKI

SEQ ID NO: 15157 - protein, 1121 aa, unidentified
  REGION 1..1121: note = Cas Enzyme sequence
MAKILGLDLGTNSIGWAIVDDIQNKILGVGSRIFPMGVENLGDGDNEMSKNASRTGSRGTRRQFFRRRFRKKKLLKALSENKMCPLVNNDFEDWKKTKQFPSDKLEEWFTLNPYELRQKALTEKLALEEIGRIFYHLIQRRGFLSNSRKGGSDDGTIFKGNAKEGKIGITETQEKIEDKTLGSYLYEIYPKENEPFKDGLERIRNRYTTRKMYVDEFELIWNKQSQFHSNLNEDLKTLFGGRKLDGYKEDGILFHQRPLRSQKHLVGNCSFEPTKTKCPISAIPFEQFRVWQWVNTVDYNGMKISNEEKERIVEFLFANEKPEFKKIRKVIGRESAEFKFNYKDDDKIVGTHTISNLSNKKYFGKKWFEFSDKEQEDIWHVLYFFDSKSNLKDYAIKNWHFTEEQAISISKFNVKDGYASLSRKAIDNILPFLQMGFTYDVAVVLGGIKNSFGLDWVNLSDEKRNYFYDNVYEIIRSKNKGGFIDIIKDILRKDYNLLDNQMKKLYHHSATIDVNELLEVLPTGKEADKEIQTIKNPIVITALFELRKLVNELINEHGVLDEIKVEMARDLKISKSQRNKIRKDQKRLERENDRVKEEVLKYTRLSHDNILKFKLWEECKKTCPYTGLTIPVNELFTNKWQIEHIHPWSKSLNDSFSNKTLCLGTKNIEKGNQTPFEFYGNDEASWSAIKERALKLFSDTKEYPNSYQKFKRFVQQKFDDDFTSRQLNDTRYISKEAKNYLSKVCKKVMVSPGQATSNLRQKWGMNNILNDENEKTREDHRHHAVDALVMACTKISYVQELSKWNRYNRNSELKQFPLPWKMFRFDAEKAVEKILVSHKKVSNDITIRKHKCEKNGKTHINVGVAARGQLHKETVFGKRTFNGEEAFHVRKAIDTLTTLKQVEKVVDETTKKLILKRIEELGGIEKDKIPANTFFIVDENGIKQPQIYLPNKNGNPVPILKVRMKENFSGAEKLKDNINQWVNPRNNHHVLIYKDEKGNLKEEVVTFWTVVERKRTGQSAYHLPIDGKEIVTTLHINDMFLLGLKDDEINWENPDYDVLKEHSYRVQKLTSGDFFFRKHKSSTITDDDYKQIRGFGEGKTGWFTFNPIKVKISVSGKIGKI

SEQ ID NO: 15158 - protein, 1128 aa, unidentified
  REGION 1..1128: note = Cas Enzyme sequence
MAKILGLDLGTNSIGWALIDDKQNKILGVGSRIFPMGVENLGDGDGEISKNASRTGARGVRRQFYRRRLRKKVLLKALSEYKMCPLVAVDFEDWKKTKQFPSDKLAAWFALNPYELRHKALNEKLSLEELGRLFYHLIQRRGFLSNSRKGGNDDGTIFKGNLKEGKIGIDNTLESIEGQTLGSYLYSIYPKDNQPFQNRLERIRNRYTTRKMYVDEFEMIWNKQSQFHTILNDDLKQLFGGRKQDGYKEDGILFHQRPLRSQKHLVGNCSFEPTKTKCPISAIPVELFRIYQWVNTVEYNGKKISKEEREKLIEQLLLTDKIEFKKLRKAIGKESAEFKFNYKDDDKIVGTHTISHLANKKFFGKKWFDFTEKEQEDIWHVLYFFDGKSNLKEYALKHWDFTDEQAEAISKFNVKDGYASLSRKAIGNILPFLQQGYTYDVAVVMGGIKNVFGDEWQNNSAENNQKQLDLIDNVEDIVRSKISGGFIDTVKELLRKDFELTDKELKKLYHHSATIDAQALLDKLPIGKEADKEIQAIRNPIVITALFELRKLVNELIEEHGKIDEIKVEMARDLKASKMQRNKIRREQKRLERENDRVKERLREEGQRITHDNILLYKLWEECKNTCPYTGNPIPLHKLFSGEIQIEHIHPWSRSLNDSFNNKTLCYADENRRKGDRTPFEFYGNDELDWSSRKERALKLFSDTKEYPNAYQKFKRFVQQKFDDDFSTRQLNDTRYISKEAKEYLSQICKNVIVSPGQATSNLRQKWGMNNILNDENEKTREDHRHHAVDALVVACTKVSYVQELSRWNRYDRNPELKEFPLPWETFRRDAEIAVDKILVSHKRTVNDITIRMHKVEKNGKTHSNIGIAARGQLHKETVFGKRNFNGEEAYHVRKAIDSLTTEKQLEKVVDETIKTLILKRIQELGGFIKGVIPQNTFFITDERGIKQPQIFLPNKNGSPVPILKVRMKENIGGAEQLKDNINQWVNPRNNHHVLIYKDEKGNLKEEVVTFWTVVERKRQGFSVYQLSNDGMEMITTLHINDMFLLGMNEEEINWQNPDYSVLNESLFRVQKLSSKFYEFRLNSAASIQNNFHPFYIRIQSFGDGKTGWETFKPIKVKITAAGKIQKV

SEQ ID NO: 15159 - protein, 1205 aa, unidentified
  REGION 1..1205: note = Cas Enzyme sequence
IENGFCPLTNDELLMWSVYKKGQEMKYPTTNFEFSEWLKINPYEVRAKAINQIVTKQDLGRALYHMCQRRGFKSGRKDADAGKDLEQYRKEQAILEQNSFKTLGEYYFDLLQNDKKVRKTKFSADDQEVNSSRISYVEEYNILMKSQNVRKELSDAFFDAIFFQRPLKSQKGAVGKCTLEKSKARCPISHPLFEEFRMFQYLNSIKVKEQNNDKFVFLSEHPEYYKIAKDKFYRVSAKNFKFVDISKSINTVAKRESLFFEFNYNDKYPIVGSPTISKLIEVFDAEDWTDCKKQLVSKYKKQDNKNVDDLVDELWHSLFFSGDFVNDITSEKVKNFIRTRFDISEDKINYYEGINLKQGYSSLSKKAIGKILPFLESTIIYPYAVFFANIDAIIGKDKWNQNKEFIQDTIIDIISNYKTQTLKIDVVNGLVGDFIKEYDNSNFDYILDETDKKNVAEKTKLFYGKYEWEKMSDETKTELLAEIENEFQQQLRKRRFGGYYLPKPRVDEIIKNFLIQEYKVSKEQADKLYHPSAMDAYPQSQDGFLGLPFTNSIKNPMAMRTLFYLRKLVNSLLKEGKIAPDTEIIIELARELNDKNKRLAIERWQRERENENKKYREKLEEFARDTNSVVTESDVIKYRLCQEQNGICFYTNKTINCEKLLGSNPQFDIEHTFPRSKSFDNSIANKTLAEKAFNQIKGNRIPQDINDGNYKDNFTNNIIVWQKTIEELEEKIEQQKYFSKVASTVEQKNRAIQQRHYLKLDLDYWKQKVYRFTATEIKPNFKNSQLVDTGIITKYSELFLKSLFQRVFPAKGTMVADVRKSWGLGEKDRNYHYHHAIDAVVLTCMDKSIRDGLAEAFKESEENRYQDKFKIAKPWQTFTEDVNQLKENIIVIHNHKDKIEKQTKKKLRKRNKIQYDKQGNVIYEKGQGIRASLHKASFFGAIERENENSEKVIWFVKRDWASNINEANLENIVDEGIKQRIKKHGLKNVRTEQGFILLPEEDNLKSMLIKKIRLKTKNKNLPKIKSQSHVSQGKRKEYKEHYYATLENIFAMAIYETVDGKGKPPYKTISAFELAKFNQGDSKLEMPVEKNVEIVHKKTKMLMPLSKILKVNQMAIFYENNPEELKTISKQEINKRLFKITEFEGDGRINLRHHAQGGADKDLKEESSLNFDKPSQKLRISLSNVKAIYEGTDFILHPSGKIDFL

SEQ ID NO: 15160 - protein, 1205 aa, unidentified
  REGION 1..1205: note = Cas Enzyme sequence
IENGFCPLTNDELLMWSVYKKGQEMKYPTTNFEFSEWLKINPYEVRAKAINQIVTKQDLGRALYHMCQRRGFKSGRKDADAGKDLEQYRKEQAILEQNSFKTLGEYYFDLLQNDKKVRKTKFSADDQEVNSSRISYVEEYNILMKSQNVRKELSDAFFDAIFFQRPLKSQKGAVGKCTLEKSKARCPISHPLFEEFRMFQYLNSIKVKEQNNDKFVFLSEHPEYYKIAKDKFYRVSAKNFKFVDISKSINTVAKRESLFFEFNYNDKYPIVGSPTISKLIEVFDAEDWTDCKKQLVSKYKKQDNKNVDDLVDELWHSLFFSGDFVNDITSEKVKNYIRTRFDISEDKINYYEGINLKQGYSSLSKKAIGKILPFLESTIIYPYAVFFANIDAIIGKDKWNQNKEFIQDTIIDIISNYKTQTLKIDVVNGLVGDFIKEYDNSNFDYILDETDKKNVAEKTKLFYGKYEWEKMSDETKTELLAEIENEFQQQLRKRRFGGYYLPKPRVDEIIKNFLIQEYKVSKEQADKLYHPSAMDAYPQSQDGFLGLPFTNSIKNPMAMRTLFYLRKLVNSLLKEGKIAPDTEIIIELARELNDKNKRLAIERWQRERENENKKYREKLEEFARDTNSVVTESDVIKYRLCQEQNGICFYTNKTINCEKLLGSNPQFDIEHTFPRSKSFDNSIANKTLAEKAFNQIKDNRIPQDINDGNYKDNFTNNIIVWQKTIEELEEKIEQQKYFSKVASTVEQKKRAIQQRHYLKLDLDYWKQKVYRFTATEIKPNFKNSQLVDTGIITKYSELFLKSLFQRVFPAKGTMVADVRKSWGLGEKDRNYHYHHAIDAVVLTCMDKSIRDGLAEAFKESEENRYQDKFKIAKPWQTFTEDVNQLKENIIVIHNHKDKIEKQTKKKLRKRNKIQYDKQGNVIYEKGQGIRASLHKASFFGAIERENENSEKVIWFVKRDWASNINEANLENIVDEGIKQRIKKHGLKNVRTEQGFILLPEEDNLKSMLIKKIRLKTKNKNLPKIKSQSHVSQGKRKEYKEHYYATLENIFAMAIYETVDGKGKPPYKTISAFELAKFNQGDSKLEMPVEKNVEIVHKKTKMLMPLSKILKVNQMAIFYENNPEELKTISKQEINKRLFKITEFEGDGRINLRHHAQGGADKDLKEESSLNFDKPSQKLRISLSNVKAIYEGTDFILHPSGKIDFL

SEQ ID NO: 15161 - protein, 1283 aa, unidentified
  REGION 1..1283: note = Cas Enzyme sequence
MTKILGLDLGTNSIGWAIRDTNKEGNQIVDSNVIVFPQGVGEEKGVEFSLASERAKHRASRKLYKRRKKRKTDLLKLLIENGFCPLTNDELLMWSVYKKGQEMKYPTTNFEFSEWLKINPYEVRAKAINQIVTKQDLGRALYHMCQRRGFKSGRKDADAGKDLGQYRKEQAILEQNSFKTLGEYYFDLLQNDKKVRKTKFSADDQEVNSSRISYVEEYNILMKSQNVRKELSDAFFDAIFFQRPLKSQKGAVGKCTLEKSKARCPISHPLFEEFRMFQYLNSIKVKEQNNDKFVFLSEHPEYYKIAKDKFYRVSAKNFKFVDISKSINTVAKRESLFFEFNYNDKYPIVGSPTISKLIEVFDAEDWTDCKKQLVSKYKKQDNKNVDDLVDELWHSLFFSGDFVNDITSEKVKNFIRTRFDISEDKINYYEGINLKQGYSSLSKKAIGKILPFLESTIIYPYAVFFANIDAIIGKDKWNQNKEFIQDTIIDIISNYKTQTLKIDVVNGLVGDFIKEYDNSNFDYILDETDKKNVAEKTKLFYGKYEWEKMSDETKTELLAEIENEFQQQLRKRRFGGYYLPKPRVDEIIKNFLIQEYKVSKEQADKLYHPSAMDAYPQSQDGFLGLPFTNSIKNPMAMRTLFYLRKLVNSLLKEGKIAPDTEIIIELARELNDKNKRLAIERWQRERENENKKYREKLEEFARDTNSVVTESDVIKYRLCQEQNGICFYTNKTINCEKLLGSNPQFDIEHTFPRSKSFDNSIANKTLAEKAFNQIKGNRIPQDINDGNYKDNFTNNIIVWQKTIEELEEKIEQQKYFSKVASTVEQKNRAIQQRHYLKLDLDYWKQKVYRFTATEIKPNFKNSQLVDTGIITKYSELFLKSLFQRVFPAKGTMVADVRKSWGLGEKDRNYHYHHAIDAVVLTCMDKSIRDGLAEAFKESEENRYQDKFKIAKPWQTFTEDVNQLKENIIVIHNHKDKIEKQTKKKLRKRNKIQYDKQGNVIYEKGQGIRASLHKASFFGAIERENENSEKVIWFVKRDWASNINEANLENIVDEGIKQRIKKHGLKNVRTEQGFILLPEEDNLKSMLIKKIRLKTKNKNLPKIKSQSHVSQGKRKEYKEHYYATLENIFAMAIYETVDGKGKPPYKTISAFELAKFNQGDSKLEMPVEKNVEIVHKKTKMLMPLSKILKVNQMAIFYENNPEELKTISKQEINKRLFKITEFEGDGRINLRHHAQGGADKDLKEESSLNFDKPSQKLRISLSNVKAIYEGTDFILHPSGKIDFL

SEQ ID NO: 15162 - protein, 1100 aa, unidentified
  REGION 1..1100: note = Cas Enzyme sequence
YYFDLLQNDKKVRKTKFSADDQEVNSSRISYVEEYNILMKSQNVRKELSDAFFDAIFFQRPLKSQKGAVGKCTLEKSKARCPISHPLFEEFRMFQYLNSIKVKEQNNDKFVFLSEHPEYYKIAKDKFYRVSAKNFKFVDISKSINTVAKRESLFFEFNYNDKYPIVGSPTISKLIEVFDAEDWTDCKKQLVSKYKKQDNKNVDDLVDELWHSLFFSGDFVNDITSEKVKNFIRTRFDISEDKINYYEGINLKQGYSSLSKKAIGKILPFLESTIIYPYAVFFANIDAIIGKDKWNQNKEFIQDTIIDIISNYKTQTLKIDVVNGLVGDFIKEYDNSNFDYILDETDKKNVAEKTKLFYGKYEWEKMSDETKTELLAEIENEFQQQLRKRRFGGYYLPKPRVDEIIKNFLIQEYKVSKEQADKLYHPSAMDAYPQSQDGFLGLPFTNSIKNPMAMRTLFYLRKLVNSLLKEGKIAPDTEIIIELARELNDKNKRHAIERWQRERENENKKYREKLEEFARDTNSVVTESDVIKYRLCQEQNGICFYTNKTINCEKLLGSNPQFDIEHTFPRSKSFDNSIANKTLAEKAFNQIKGNRIPQDINDGNYKDNFTNNIIVWQKTIEELEEKIEQQKYFSKVASTVEQKNRAIQQRHYLKLDLDYWKQKVYRFTATEIKPNFKNSQLVDTGIITKYSELFLKSLFQRVFPAKGTMVADVRKSWGLGEKDRNYHYHHAIDAVVLTCMDKSIRDGLAEAFKESEENRYQDKFKIAKPWQTFTEDVNQLKENIIVIHNHKDKIEKQTKKKLRKRNKIQYDKQGNVIYEKGQGIRASLHKASFFGAIERENENSEKVIWFVKRDWASNINEANLENIVDEGIKQRIKKHGLKNVRTEQGFILLPEEDNLKSMLIKKIRLKTKNKNLPKIKSQSHVSQGKRKEYKEHYYATLENIFAMAIYETVDGKGKPPYKTISAFELAKFNQGDSKLEMPVEKNVEIVHKKTKMLMPLSKILKVNQMAIFYENNPEELKTISKQEINKRLFKITEFEGDGRINLRHHAQGGADKDLKEESSLNFDKPSQKLRISLSNVKAIYEGTDFILHPSGKIDFL

SEQ ID NO: 15163 - protein, 1100 aa, unidentified
  REGION 1..1100: note = Cas Enzyme sequence
YYFDLLQNDKKVRKTKFSADDQEVNSSRISYVEEYNILMKSQNVRKELSDAFFDAIFFQRPLKSQKGAVGKCTLEKSKARCPISHPLFEEFRMFQYLNSIKVKEQNNDKFVFLSEHPEYYKIAKDKFYRVSAKNFKFVDISKSINTVAKRESLFFEFNYNDKYPIVGSPTISKLIEVFDAEDWTDCKKQLVSKYKKQDNKNVDDLVDELWHSLFFSGDFVNDITSEKVKNFIRTRFDISEDKINYYEGINLKQGYSSLSKKAIGKILPFLESTIIYPYAVFFANIDAIIGKDKWNQNKEFIQDTIIDIISNYKTQTLKIDVVNGLVGDFIKEYDNSNFDYILDETDKKNVAEKTKLFYGKYEWEKMSDETKTELLAEIENEFQQQLRKRRFGGYYLPKPRVDEIIKNFLIQEYKVSKEQADKLYHPSAMDAYPQSQDGFLGLPFTNSIKNPMAMRTLFYLRKLVNSLLKEGKIAPDTEIIIELARELNDKNKRLAIERWQRERENENKKYREKLEEFARDTNSVVTESDVIKYRLCQEQNGICFYTNKTINCEKLLGSNPQFDIEHTFPRSKSFDNSIANKTLAEKAFNQIKGNRIPQDINDGNYKDNFTNNIIVWQKTIEELEEKIEQQKYFSKVASTVEQKNRAIQQRHYLKLDLDYWKQKVYRFTATEIKPNFKNSQLVDTGIITKYSELFLKSLFQRVFPAKGTMVADVRKSWGLGEKDRNYHYHHAIDAVVLTCMDKSIRDGLAEAFKESEENRYQDKFKIAKPWQTFTEDVNQLKENIIVIHNHKDKIEKQTKKKLRKRNKIQYDKQGNVIYEKGQGIRASLHKASFFGAIERENENSEKVIWFVKRDWASNINEANLENIVDEGIKQRIKKHGLKNVRTEQGFILLPEEDNLKSMLIKKIRLKTKNKNLPKIKSQSHVSQGKRKEYKEHYYATLENIFAMAIYETVDGKGKPPYKTISAFELAKFNQGDSKLEMPVEKNVEIVHKKTKMLMPLSKILKVNQMAIFYENNPEELKTISKQEINKRLFKITEFEGDGRINLRHHAQGGADKDLKEESSLNFDKPSQKLRISLSNVKAIYEGTDFILHPSGKIDFL

SEQ ID NO: 15164 - protein, 1068 aa, unidentified
  REGION 1..1068: note = Cas Enzyme sequence
MIAKDFEDWKKTKQFPSEKLATWFALNPYELRQKALHEKLSLEEIGRIFYHLIQSRGFLSNSRKGGSDDGAIFKGNSKEGKIGIDDTLESIEGKTLGSYLYEIYPKENQPFQDGLERIRNRYTTRKMYVDEFELIWNKQSQFHTVLNDNLKELLGGRKQDGYKEDGILFHQRPLRSQKHLVGNCSFEPSKTKCPISAIPVELFRINQWVNTVEYNGKKITQDEKSKLIEQLLSHDKIEFKKLRKAIGKESAEFKFNYKDDDKIVGTHTISNLSNKKFFGKQWFDFSEKEQEDIWHVLYFFDSKSNVKEYALSKWNFNEEQAEAISKFNVKDGYASLSRKAIGNILPFLQQGYTYDVAVVMAGIKNVFGNTWQNDTAQNNQKQLDVIDNVHDIVRSKISGGFIDTIKELLRKEFGLNEKQLKKLYHHSATIDVKELLDKLPVGKEADKEIQAIRNPIVITALFELRKLVNELIDEHGQLDEIKVEMARDLKISKSQRNKIRRDQKRLERENDRVKAEVEKYTRVTNDNILKFKLWEECKQTCPYTGVAIPINKLFTGEIQIEHIHPWSRSLNDSFNNKTLCWADENRRKDDKTPFEFYGSDESNWSAIKERALKLFSDTREYPNAYQKFKRFVQIKFDDDFSSRQLNDTRYISKEAKEYLSQICSKVMVSPGQATSNLRHKWGMNNILNDENEKTREDHRHHAVDALVMACTKISYVQELSKWNRYNRNSELKDFPAPWENFWSDANRAVDKILISHKRISNTITVRTHTTEKNGVKYKNVGVAARGQLHKEFVYGKRTAPFSDEAYHIRKSIDSLTTLKQVDKVVDEATKKLINKRIQIRLHELNDEIFLSTDVKKVKEIEKEIENYEKKGILPSKVFFIVDENGIKQPQIFLPNKNGAPVPILKVRMNENFSGAEKLKENVNQWVNPRNNHHVLIYKDDKGNLKEEIATFWTVVERKRQGLPVYQLPIDGKEIVTTLHINDMFLLGLKDDEINWESPDYDLIKEHLYRVQKLSSKFYEFRLSSQASIQNNFQPFYISIRGFGDGKTGWDTFRPIKVKISPSGKIQKV

SEQ ID NO: 15165 - protein, 1128 aa, unidentified
  REGION 1..1128: note = Cas Enzyme sequence
MARILGLDLGTNSIGWALVDHDLKKIVGMGSRIFPMGVENLGDGEGELSKNAARTGARGIRRQFFRKKMRKKILLKALSEHQMCPMTDTDFANWKLTRQFPSEKLASWFAMNPYQLRTMALTEKLTLEEIGRICYHLIQRRGFLSNSRKSGNTDGAIFKGNAKEGKIGIDETLENIEGNTLGSYLYDIYPKQNQPFQDGLERIRNRYTTRKMYVDEFELIWEKQKIFHPVLTEELKTLFGGRKLDGYTADGILFHQRPLRSQKHLVGNCTFEASKTKCPINAIPAEMFRVYQWLNTVEYNGQKLSAEEKSKMAEILLSTEKPDFKKLRKIIGKESAEFKFNYKDDDKIAGTYTISNLANKKYFGKEWFDFTEKEQEDIWHVLYFFDSKDKVRDYAKQHWKFNDKQAEDIANFNLKDGYASLSRKAIHNILPFLKEGFTYDIAVVLGGIKNAFGTSWETLPEEKKNYITDNIPDIIRSKISGGFIDEIKNLLKKDFGMDDKQLKKLYHHSASIEAHIINDKLPTGKEADKEIQSIRNPIVITALFELRKLVNELLDEYGSVEEIKVEMARDLKASKSQRNKIRKEQKRLERENDRVKARLLEEGQRISHDNILLYKLWEECKNTCPYTGVPIPVHKLFSGEIQIEHIHPWSRSLNDSFANKTLCYANENRNKGDKTPFEFYGTDELNWSAIKERALKLFSDTKEYPNAYQKFKRFVQQKFDDDFSTRQLNDTRYISKEAKNYLGQVCEKVSVSPGQMTANLRQKWGLNNVLNEENEKTREDHRHHAIDALVMACGKASYLQELSKWNRYNRSHDLKEFPLPWETFRFDTEKATDQILVSHKRLNNIVTVSTSKTERNGKVYKNEGIAARGQLHKETVYGRRQAPDSDEAFHVRKPIDSLTTEKQLEKVVDSSIRNLIYKRIQELGGFEKGTIPVNTFFIADENGVKQPQIFLPNKNGSPVPILKVRVKENIGGAEQLKENINKWVNPRNNHHVLIYKDEKGSFKEEVVTFWTAVERKRQKLPVYQLPEDGKEIVAALQINDMFLLGLNDDEIDWQNPDYKTLKEHLYRVQKLSSKFYEFRLNNQASIQNNFQPYYTRIQSFGLGKTGWDTFNPIKVKVSVSGKIEKIIV

SEQ ID NO: 15166 - protein, 1445 aa, unidentified
  REGION 1..1445: note = Cas Enzyme sequence
MAKILGLDLGTNSIGWAIVDKDGNDFSLVDKGVRIFSEGVKSEKGIESSRASERTAYRSARKIKYRRKLRKYETLKVLSVNGMCPLSLDEVEDWKKSGFKKYPLNPEFLKWLRTDEDENINPYVFRDRASRGKVTLYELGRALYHIAQRRGFLSNRLDQSAEGILEEHCPIIQERIEDLNSTGDLNSEIKDYFLNTGIIDESVKGGFSKDLDDGDKKLVSLYKSLISIVSKNENDSAKAKEEVIARLNRKEDLGAVKRGIGEISQAMKDGNFSTLGQYFYSLYNKDRIRNKYTAREEHYLKEFEILCKQQGISGIDENEQLPEKRYVGLAKDLYRAIFFQRPLKSQKGLIGKCSFEKSKSRCAVSHPDFEEYRMWTYLNTIKYGKQSEKTLRFLSQEEKISLIPKFLRKKDNFNFEDLAKELIPKGASFGFYKSSRKEEFHYWFNYKPTDTVSGCPVSASLKNIIGEDWKTKTFTYKTLNSTGQEVSRTVDYRDLWHLLSVSTSDIYLYEYAKDKLNLSDKNAKAFSRIRLKKDYASLSLNAINKILPYVKEGLLYSHAVFMANVENIVDDEIWNDVQQRKYIQDKIAAIIESHTYQNGLLEAVNSLLKDCKIDNCYYSKEAEGTYKSDLDKKLASFFKYHSVADKQSVLNELFPIFIKQLKAYEFVKIKRLDEKVLAFLSGENEDGQVFCSNKKSLNKLYHPSDVEVFKKKIIKDEFGNEKVVLGSPLTASIKNPMAMRALHQLRKVLNTLIFEGQIDERAKIHIEMARELNDANKRKGIQDYQNELKKKREDAVKEIKKLYLEECGKEIEPTVDDLLRYQLWIEQNRMEIYEPSINGGVSKNIRISQIVGKNPDYDIEHTFPRSISQDNSQMNKTLCSQKFNRDIKKQKMPIELNNHEMILPFITHWREEADNLSREIEIISRSIKAVATKEAKDKKIRRRHYLTLKRDYLKGKYQRFIDEEVKAGFKNSQIPDTGIITKYAQAYLKSYFSRVESVKGGMVAEFRKIWGIQESYQENDKKYFHEKDRSKHTHHTIDAITIACMTKEKYDVLAMAWTLEDKEQINEARKLLSDSKPWKTFKEDLKKIEQEILVSHYTPDNVKKQSKKIVRIRGKKQYVAITEKDKEGKSVLKKDSNQKVIYKIDKDGKKIPRLQQGDTIRGSLHQDSIYGAIKKPLNTEEIRYVIRKDLESIKASDIENIVDEVVKEKVREAIANKVLLMSSNPQQKNKIDGRVWMNEEKGIAINKVRLYANSVKNPIEIKEHVAFSKSRHEHKQKVYGQNDENFALAIYEGLDKKGKIKRGFESLNMLQAGEYFKNSNASHRFIYPIAPEVNEDNLHLKFLAKKGMLVIFYEKTIDEIWNLSQIDISKRLYKLAKIDNQGRLTFRPHKEARPASQLKESYNLVLSESSEQLRLPVSKLDCAVEGYDFIVSSTGQIKRRMILNS

SEQ ID NO: 15167 - protein, 1127 aa, unidentified
  REGION 1..1127: note = Cas Enzyme sequence
MAKILGLDLGTNSIGWALIDDIQNKIIGIGSRIFPMGVENLGDGDGEISKNASRTGARGIRRQFFRRRLRKKVLLKALSENNMCPIVSADFEDWKKTKKFPSEKLASWFSLNPYELRQKALHEKLSLEEIGRIFYHLIQRRGFLSNSRKGGNDDGAIFKGNTKEGKIGIDETVESIEGKTLGSYLYEIYPKENEPFQDGLERIRNRYTTRKMYVDEFELIWNKQAQFHSNLTDELKALFGGRKLDGYKEDGILFHKRPLRSQKHLVGNCSFEPAKTKCPISAIPFEMFRIYQWVNTVEYNGKKISQEEKDKIIEQLLASDKIEFKKLRKAIGREGAEFKFNYKDDDKIVGTYTISNLSNKKFFGKKWFEFSEKEQEDIWHVLYFFESKSNLREYAIKNWGFTENQAVAVSKFNVKDGYSNLSRRAIGNILPFLQQGYTYDVSVVMGGVKNSFGDAWQNDGAENNQRQLDLIDNVEGIVRSKISGGFIDTIKDLLRKEFGFGDKQLKKLYHHSATIDVVSLLEKLPVGKEADKEIQKIKNPIVITAMFELRKLVNELIDEHGQLDEVKVEMARDLKISKSQRNKIRRDQKRLERENDRVKAEVEKYARVSHDNILKFKLWEECKQTCPYTGFAIPIAKLFTGEVQIEHIHPWSRSLNDSFNNKTLCYADENRRKGDRTPFEFYGSDELDWGARKERALKLFSDTKEYPNAYQKFKRFVQLKFDDDFSSRQLNDTRFISKEAKNYLSKICKKVAVSPGQMTANLRQKWGLNTVLNDANAKTREDHRHHAIDALVMACGKTSYLQELSKWNRYDRSYDLKNFPMPWETFRFDAEKAVEKILISHKRLNSVVTVRTHKVEKNGIVHKNIGIAARGQLHKETVFGKRNFNGEEAFHVRKAIDSLTTEKQLEKVVDQTIKKLIHKRIQELGGFIKGTIPLNTFFIVDEKGTKQAQIFLPNKNGEPVPILKVRMRENIGRAEQLKDSLNQWVNPMKNHHVLIYKDERGNFKEEVVTFWTVVERKRQGFPVYQLPSDGKEIVTALHINDMFILGLTEEEINWDDLNYEILKEHLYRVQKLSSKFYEFRLSSQASIQNNFQPFYVRIQSFGEGKTGWDTFKPTKVKISVSGRIQKI

SEQ ID NO: 15168 - protein, 1292 aa, unidentified
  REGION 1..1292: note = Cas Enzyme sequence
MAKILGLDLGTNSIGWAIRDTNKEGNQIIDTNVIVFPQGVGEEKGVEFSLASERTKHRASRKLYKRRKKRKADLLKILIENGFCPLTNDELVIWSVYKKGQEMKYPTDNFDFSEWLKINPYEVRAKAANHMVSKQELGRALYHMCQRRGFKSGRKDADAGKDFERYLVEKSELEKSGFKTLGEYYYDLLKNNINVRKTKFNTDDQEVNSSRISYVEEFNILMKAQNISKELSDAFFDAIFFQRPLKSQKGAVGKCTLEKTKTRCPISHPLFEEFRMYQYLNSIKVKERNSDKFVFLSEFPEYYKIAQDKFYRVSAKNFKFIDISKSINAIAKKSSLIFEFNYNDKYPIVGSPIISKLIEVFDADDWTDCKKIIVSKYKRQDNKTSDELVDELWHTLFFSGDFVNDVTSEKVKSFIRNRFDISEEKVNYYEAINLKQGYSSLSKKAIGKILPFLENKIIYPYAVFFANIDTIIGKEKWETNKEFIQDTIVDIISNYKAQTLKIDIVNGLVGDFIKEYDNSHFDYVLDETDRKNVADKTKLFYGKYEWEKMSDESKKELLNEIEITFQEQLQKRRIGGYYLSKSRVDEVIKDFLIQEYKVSKEQADQLYHPSAMDAYPQSQDNLLGLPFTNSIKNPMAMRTLFYLRKLVNSLLKEKKITPDTEIIIELARELNDKNKRLAIERWQRERENENKKYLEKLEEFAKDTNSKVTETDVVKYRLCQEQNGICFYTNKTISCEKLLGSNPEFDIEHTFPRSKSFDNSLANKTLADKVFNQIKGNRIPQEINEGNYKENFTNNIKDWEDKIDELEEKIEQQKYFSKVASTVEQKNRAIQQRHYLKLELDYWKQKVYRFTATEIKPNFKNSQLVDTGIITKYSELFLKSLFQRVFAAKGTMVADVRKSWGLGEKDRNYHYHHAIDAVVLTCMDKSIRDGLAEAFKESEENRSQDKFKIAKPWQTFTEDVNQLKENIIVVHNHKDKIEKQTKKKLRKRNKIQYDKQGNVIYEKGQGVRASLHKDTFYGKIERENENKEKEFWFVIRKPINSNFSDADVTNIVDEGIKARILKHGLKNIRAENGFIKLPAEKDEKGNEIKEMLIKKIRVKTRNSDLPKIKSQSHTSQGNRKEHKEYYYATLENIFAMAIYEIVDNKGKKIQKHKTISAFELAKYNQGRSKLEMPVEENIKIESKKETILIPLSKVLRVNQMALFYESSPEEIKKLSKTEINKRLFKITQFESDGRIQLRHHAQGGADKDLIKESLVNFENPVQKLRISLSNVKAIFEGKDFVLHPSGKIDFKF

SEQ ID NO: 15169 - protein, 1165 aa, unidentified
  REGION 1..1165: note = Cas Enzyme sequence
NPYEVRAKAINQIVTKQDLGRALYHMCQRRGFKSGRKDADAGKDLGQYRKEQAILEQNSFKTLGEYYFDLLQNDKKVRKTKFSADDQEVNSSRISYVEEYNILMKSQNVRKELSDAFFDAIFFQRPLKSQKGAVGKCTLEKSKARCPISHPLFEEFRMFQYLNSIKVKEQNNDKFVFLSEHPEYYKIAKDKFYRVSAKNFKFVDISKSINTVAKRESLFFEFNYNDKYPIVGSPTISKLIEVFDAEDWTDCKKQLVSKYKKQDNKNVDDLVDELWHSLFFSGDFVNDITSEKVKNFIRTRFDISEDKINYYEGINLKQGYSSLSKKAIGKILPFLESTIIYPYAVFFANIDAIIGKDKWNQNKEFIQDTIIDIISNYKTQTLKIDVVNGLVGDFIKEYDNSNFDYILDETDKKNVAEKTKLFYGKYEWEKMSDETKTELLAEIENEFQQQLRKRRFGGYYLPKPRVDEIIKNFLIQEYKVSKEQADKLYHPSAMDAYPQSQDGFLGLPFTNSIKNPMAMRTLFYLRKLVNSLLKEGKIAPDTEIIIELARELNDKNKRLAIERWQRERENENKKYREKLEEFARDTNSVVTESDVIKYRLCQEQNGICFYTNKTINCEKLLGSNPQFDIEHTFPRSKSFDNSIANKTLAEKAFNQIKGNRIPQDINDGNYKDNFTNNIIVWQKTIEELEEKIEQQKYFSKVASTVEQKNRAIQQRHYLKLDLDYWKQKVYRFTATEIKPNFKNSQLVDTGIITKYSELFLKSLFQRVFPAKGTMVADVRKSWGLGEKDRNYHYHHAIDAVVLTCMDKSIRDGLAEAFKESEENRYQDKFKIAKPWQTFTEDVNQLKENIIVIHNHKDKIEKQTKKKLRKRNKIQYDKQGNVIYEKGQGIRASLHKASFFGAIERENENSEKVIWFVKRDWASNINEANLENIVDEGIKQRIKKHGLKNVRTEQGFILLPEEDNLKSMLIKKIRLKTKNKNLPKIKSQSHVSQGKRKEYKEHYYATLENIFAMAIYETVDGKGKPPYKTISAFELAKFNQGDSKLEMPVEKNVEIVHKKTKMLMPLSKILKVNQMAIFYENNPEELKTISKQEINKRLFKITEFEGDGRINLRHHAQGGADKDLKEESSLNFDKPSQKLRISLSNVKAIYEGTDFILHPSGKIDFL

SEQ ID NO: 15170 - protein, 1126 aa, unidentified
  REGION 1..1126: note = Cas Enzyme sequence
MTKILGLDLGTNSIGWALIDDKHNQIVGLGSRIFPMGVENLGEGEGREMSKNAGRTGARGVRRQFFRRRLRKKILLKALSEHEMCPMVSDDFQDWKRTKQFPSEKLASWFALNPYELRHKALNEKLSLEEIGRIFYHLIQRRGFLSNSRKGGTDDGAIFKGNPKEGKIGITETQDKILEKTLGSYLFEIYPNQNEPYQDGLERIRNRYTTRKMYVEEFELIWNKQSQYHSILNEDLKTLFGGRKLDGYKEDGILFHQRPLRSQKHLVGNCSFEPAKTKCPISAIPFEQFRVWQWVNTVEYNGRKISQEEKEKIVEFLYANEKPEFKKIRKVIGKESAEFKFNYKDDDKIVGTHTISNLSNKKFFGKKWFEFSDKEQEDIWHVLYFFDSKSNLKEYAIKNWNFNEEQAEAISKFNLKDGYANLSRKAISNILPFLQLGYTYDIAVVLGGIKNVFGTDWEKLSEEKRNYLIDNVEGIVRSKTKGGFIDIIKSILRNDFNVSDNQLRKLYHHSATINVAELLEKLPLGKEADKEIQAIRNPIVITALFELRKLVNELIEDHGKIDEIKVEMARDLKISKSQRNKIRKEQNRLERENDRIKARLLEEGQRIKHDNILLYKLWEECKHVCPYTGRTISLSQLFSGEVQIEHIHPWSRSLNDSFSNKTLCYADENRKKGNQTPFEFYGNDEANWSAIKERALKLFSDTKEYPNAYQKFKRFVQQKFDDDFSSRQLNDTRYISKEAKNYLSKICKNVMVSPGQATSNLRQKWGLNHILNDENAKTREDHRHHAIDALVMACTKLSYVQELSKWNRYNRTYDLKKFPLPWETFNYDAEKAVDKILISHKKVSNDITVRTHVTEINGIKHKNIGVAARGQLHKETVFGKRTFNGEEAFHVRKSIESLETAKQIDKVVDEAIRLLILKKINELGGFVKDKVPANTFFNVDENGIKQPQIFLPNKKGEPVPVLKVRVKENIGGAEKLKENVNQWVNPRNNHHVLIYKDEKGNLKEVVVTFWTVVERKRTGESVYKLPIDGKEIVTTLHINDMFLLGLREEEIIWENPDYEILKEHLYRIQKLSSKFYEFRLNTEASIQNNFHPFYVRIQSFGEGKTGWDTFNPIKVKISVSGKIKRA

SEQ ID NO: 15171 - protein, 1126 aa, unidentified
  REGION 1..1126: note = Cas Enzyme sequence
MTKILGLDLGTNSIGWALIDDKHNQIVGLGSRIFPMGVENLGEGEGREMSKNAGRTGARGVRRQFFRRRLRKKILLKALSEHEMCPMVSDDFQDWKRTKQFPSEKLASWFALNPYELRHKALNEKLSLEEIGRIFYHLIQRRGFLSNSRKGGTDDGAIFKGNPKEGKIGITETQDKILEKTLGSYLFEIYPNQNEPYQDGLERIRNRYTTRKMYVEEFELIWNKQSQYHSILNEDLKTLFGGRKLDGYKEDGILFHQRPLRSQKHLVGNCSFEPAKTKCPISAIPFEQFRVWQWVNTVEYNGRKISQEEKEKIVEFLYANEKPEFKKIRKVIGKESAEFKFNYKDEDKIVGTHTISNLSSKKFFGKRWFEFSEKEQEDIWHVLYFFDSKSNLKEYAFKNWDFTEEQANDISKFNVKDGYSSLSRKAISNILPFLKLDFTYDIAVVLGGIKNVFGTDWEKLSEEKRNYLIDNVEGIVRSKTKGGFIDIIKSILRNDFNVSDNQLRKLYHHSATINVAELLEKLPLGKEADKEIQAIRNPIVITALFELRKLVNELIEDHGKIDEIKVEMARDLKISKSQRNKIRKEQNRLERENDRIKARLLEEGQRIKHDNILLYKLWEECKHVCPYTGRTISLSQLFSGEVQIEHIHPWSRSLNDSFSNKTLCYADENRKKGNQTPFEFYGNDEANWSAIKERALKLFSDTKEYPNAYQKFKRFVQQKFDDDFSSRQLNDTRYISKEAKNYLSKICKNVIVSPGQATSNLRQKWGMNNILSEENEKTREDHRHHAVDALVMACTKVSYVQELSKWNRYNRNSELKNFPLPWETFRKDAEVSVGKILISHKKVSNDITVRTHVTEINGIKHKNIGVAARGQLHKETVFGKRTFNGEEAFHVRKSIESLETAKQIDKVVDEAIRLLILKKINELGGFVKDKVPANTFFNVDENGIKQPQIFLPNKKGEPVPVLKVRVKENIGGAEKLKENVNQWVNPRNNHHVLIYKDEKGNLKEVVVTFWTVVERKRTGESVYKLPIDGKEIVTTLHINDMFLLGLREEEIIWENPDYEILKEHLYRIQKLSSKFYEFRLNTEASIQNNFHPFYVRIQSFGEGKTGWDTFNPIKVKISVSGKIKRA

SEQ ID NO: 15172 - protein, 1135 aa, unidentified
  REGION 1..1135: note = Cas Enzyme sequence
MTKILGLDLGTNSIGWALIENDIILGIGSRIFPEGVVNLGEGEGRETSKNASRTGARGTRRQFFRRRLRKRYLLKELAKHSLCPISSTLIKDWNGSEIFKNEQLQEWLKLNPYELRAKSIKEEISLTELGRVFYHMIQRRGFLSNSRSAGADINEKSTIYKGDSKIGKIGISKTLESISQSKTLGSYLDSIQPKINEPYIGELERIRNRYTTRQMYIDEFELIWEFQKKFHSELTLHLKTIIGGRKKEGYKEDGVLFHQRPLRSQKHLVGYCSFEPKKPKCAISTIPFELFRMYQWLNTLSYDVNGVKQQITKEEREKIVALLLSKEKPSFKEIRKAINKLDGSYQFNYKDEDNIVGSYTISNLSNKKFFGKQWFDFSDEEQEKIWHVLSFFDDRDKLKEYAIKNWSFDKEKASKISKFNLKEGYSNLSRKAINNILPFLQKGFMYDIAVGLAGVRNVLGNDWEKQEQFVLDNVPEIVRSNLKGGYIEPLKSMMKNEFNCTDKQLEKLYHHSSAIEIEKLLDKLPVNINADREIQKIKNPVVITALFEIRKLVNEIIDTYGKPNEIKVELARDLKASKKNRLETRRQQQTLEKENDRVKDELEKLNQRINHTTILKYKLWEECNHTCPFTGQTITISQLFTGEVQIEHIFPWSRSLNDSFNNKTLCFADENRAKGNKTPYEFYSTQGDKKWEEIKLQALSCFKTKANYPNCYNKFKHFVKIKHDEDFISRQLNDTRYISKEAKNYLSKICSDVLVAPGQMTATLRHHWGLNTILNTEDDTKTRDDHRHHAVDALVMACSKRSHLQELSKRNRYHKNHELKDFPDPWLHFRQDAEKAVEQILVSHKKQKNLLTVRTHTTKKNGVIHKNVGVAARGQLHLDTVYGKRKDVFTNEQNYHVRKPITSLTAAEIPKIVDIAIKIIIYKAIEEFGLNINSKDRKPIVKTKEEKVLFDQLLNKPFFLPNKNGNPVPIKKIRIKKNFSNAEPLKENMNQWVDLGKNHHVLIYKDFDGNLKEDVVTFWTAVERKRQGQDVFQLPKDGEEIISTLQINDLFLLDLSEADINWNELDYHFLNQHLFRVQKLSSKFYVFRLVSESKIDKKVMPFYCRIQSFSEGKTGWLTFNPIKVKVNSIGKIEKI

SEQ ID NO: 15173 - protein, 1552 aa, unidentified
  REGION 1..1552: note = Cas Enzyme sequence
MSKVLGLDLGTNSIGWALLDLRDEENKLEGKGVLIFSEGVKKEKGQEKSKAAERTGFRSARRIKFRRKIRKYQTLLVLAKHDMCPLTIEEVKEWRKSNFKKYPAKPEFLEWLRTDEEQNINPYYYRDKASREKISKYNLGRALYHIAQRRGFLSNRLDQSDDNLIKSKKDEIQDIINNTSLNKVDLIDAIEAIFETYEFKEKKKKDCTNATEEKLWSIRKYILNVIENKIKGKDYSKNEDVRKEIDRYINKPENLGAVQGNISELNTAISEANCKTLGQYFWKLYQQDRNDAKNKIRNNYTSREDHYLHEFEVICKTQGLDSINEAKKDPSERYSGIVKELYKAIFYQRPLKSQKGLIGKCSLEPNRVRCTVSRPEYELFRMYSFINTIKLKEPTAEKFRFLNSEERESIKSKFFRKSKPTFTFIDIKKTLGEDNKYNYKDNSTVSGCPTVSALISVFGDDWENIIYENYTDKIIRNLKNDKSEEVKSKEDVTADVWHVLSTFTSDEKLVDFAKNKLQLSQKDAEKFSKIHLKKDYASLSLYAIKKILPYLEKGLLYSHAVFMANMDKIIKPERWENNEDRELIEKEVGEIINNHQEENKMLFAVNSALKICFDNHQTYSKEAETGYKDDVEKQLKKEFGEKTWDNKPNKEALFSEAFDIFIQHLKERKHPAIKRIDEKVMEFLSDNDLLIPNTFNKLYHPSDIEKFRSVKLKDKDGNVIKIDGKEAIGLGSPDVGSIKNPMAMKALHQLKKLINTLILEGQIDENTKVNIELSRQLNDANKRKAIEKWQNDRKELFQEYEKKIKELYKIETGNELKEVTNEDIEKFTYALEQRKDKKLVSKEDVMKYVLWEEQNHICIYTGKTISLSSFLGANPQFDIEHTLPRSRSWDNSQMNKTLCDKTYNQQTKKERMPIELSEKDYSEILPRIQHWKDKYEALANEIEKKKRSTRGATDKEQKDKLIQQRHYLQMEYNYWKGKYDRFVMKEIKEGFKNSQAVDIGIISKYATAYLKSVFKKVYSVKGEMVSEYRKAWGLHDTFKDKWGRTQYQPKDRSNHIHHCIDAVTIACMNKNKYDKLAHAWGLEDKGEFDKAKKELENEKPWDTFTQDVRNLENEVFIVHQNKDVLPIQTKKKFRKRGKAQPKVIYKKDENGKYVFDTNGKKIVEKYIYKKDDLGNLIPVKGKKLNTDLIKDKKEGEDYFKIESENGTKFYEYLKDKENKIVYQKDYMIEQGDGTRGSLHKLNYIGVIAKPELENGKPKTENGAFILQKDDEGKVSKFYVKRNPVTKDFSESDVKKIVDEGIKRRIEKHGLKNVKTPDGFILLPAEKKGLNGSEKDLKEMLIKKIRLFEKDKPIEIKKQNEINLQTEKALRKKHKHHFYAQNDENYSMAIYEGFDKKGKPKRDFELVNNIDAGEYYKLSNKSHRENHDLVPNPHLKSSLPLKYILKKGMMVLMYDKDPDEIWELSDNQKLGRLYEITQLDVEKYAEIKLLHHQEAREKKEITKFMGLKTGMKGGKNLDNYRKFPWIKIGYTTFDCIVENIDFKILPTGKIEKI

SEQ ID NO: 15174 - protein, 1453 aa, unidentified
  REGION 1..1453: note = Cas Enzyme sequence
MARILGLDLGTNSIGWAIVEKDGDGFSLIDKGARIFSEGVKSEKGIESSRAAERTGYRSARKIKFRRKLRKYETLKVLTKNKMCPLTLEEVEKWRQSGFKDYPLNEAFLKWLRTDDDKNINPYFFRDKASKVKASLYEIGRALYHIAQRRGFLSNRLDQSAEGIFEEHSPKIEDILDNTTTIAELRTEITDYFDGLDIFDKNEKTGFKKDLDEGEKKLKSLFIALEKIIKTNEKDYEKAILELKERLNRKEDLGAVKQKISEISQAMIDGDFKTLGQYFYSLYNAEVELENKTTNEIEKFNRAKIRNQYTSREEHYLKEFEIICKAQNIEGIKDAELLPEKKYSGLAKDLYKAIFFQRPLKSQKGLIGKCSFEKSKSRCAVSHPDYEEYRMWAFINNIKIKTPEDDTLRFLMQEERQKLVSKFFRKKDNFNFEDLAKVLIPKGATFDFYKSFNAKSAHYLFNYKPKDSVSGCVVSASLKNVFGEDWKTKTFSYKTKNAKGESVKRNVDYKDLWHLISVSNNDIYLQEYAKENLNLDEKRAKSFGKIKLKKDFGSLSLNAINKILPYLQEGSLYSHAVFMANIENIVDKKIWNNETHRKFIQNKIAKIIETNTYDNGLLDVVNGLIKEYKKESVYHSKEAETTFKKDLQKKLISFYKYHKIEDDQEQIFTELFPVFMEQLIKYEFKPVKRLDEKVLEFLSGENEDGEIFCTDEKQLKKLYHPSDIEVFKKKIHKDENGNEQLVLGSPLTSSIKNPMVMRALHQLRKVLNALILDGQIDPKTRIHIEMARELNDSNKRKGIQDFQNENKKARETYRAEIKKLFFEETKKEIEPTEDDVLRYQLWIEQDKKEIYEEGKSIGISQIIGNNPDYDIEHTIPRSISQDNSLMNKTLCSKHFNREIKKTKMPVELTNHEQILLRVNHWRIEAGKLTWEIEQIVRSTKAMATKEAKDRKIRKRHFLTLKRNYLQGKYDRFTLKEPKSGFKNSQIPDIGIITKYSQAYLKSYFNRVESVKGGMVAEFRKIWGVQESYQENGKKYYEKKDRSKHTHHTIDAITIACMTKDKYDALASAWTLEDKEQIGAARKILADSKPWRTFTEDLKKTEEEILVSHYTPNNLKKQSKKILRIRGKKQYVAEIEKDQNGKNISKKDANGKIIFQIDENGEKTHRLQQGDTVRGSLHQDSIYGKIRNPLKFEDIRCVIRKDLESIKATDIENIVDETVKEKVSTAKENKILVFSSNAQQKNKMNGTVWMNEEKGIPIKKVRLYANSVKNALEIKEHAVLSKSRHKHKQKVYAQNDENYAMAIYEGIDKNGKLKRSFQTITNKEAGAYYKLSNKDYNQAYDIVTNPDDKTNLPFKYLLKKGLMVLFYQESAQEILELDEKDLFNRLYKLAKFDAQGRLTFRTHFEARQASGLKEVYNIDFEKPFEQIRLQVSKLNILVEGYEFIISPAGKIVLL

SEQ ID NO: 15175 - protein, 1129 aa, unidentified
  REGION 1..1129: note = Cas Enzyme sequence
MAKILGLDLGTNSIGWAIVDDKEQKILGIGSRIFPMGVDNLGDGDNELSKNASRTDARGARRQFFRRRLRKRYLLRELAKNNMSPLDYKLVKAWNQKDIFSNKGLKEWLRLNPYELRAKALKEKITLEELGRIFYHMIQRRGFQSNSRSAGAENNEKSVIFKGDAKSGKIGISETTESIKDNQTLGSYLNKIYPKESEPFSGRLERIRNRYTMRQMYIDEFEAIWEQQQQYHKELTDELKTIFGGRKKDGYLEDGVLFHQRPLRSQKHLVGNCSFEPKKTKCHISAIPNEQRRVYEWLNTLKCDLVGEKVKITLEDREKILKLLFSKEKVEKFKEIRKAINKLDGHYQFNYKDDDAVYGSHTISNLSNKKFFGKQWFEFSEKGQEDIWHVLYSFDDRDKLKQYAIEKWNFNEEKAEKISKFNLKDGYANLSRKAINNILPFLKMGFTYDVAVGLGGVKNALEDKWEEYEDFILYNVPEIVRSNLKGGYIEPLKNMLKKECELSEKELSKLYHHSSNIEINKLLDKLPVSPEADKEIQSIKNPVVITALFEIRKLVNEIIEDYGKPDEIKVELARDLKISKSKRNDIRREQKRLERENDRVKAELDYIGQRPTHVNILKYKLWEECNKTCPYTGRNIEVNQLFSGEIQIEHIYPWSRSLNDSYMNKTLCFADENRAKGDLTPYEFYSKQGEQKWNDIKLQALSCFKNKTNYPNAYNKFKQFVKEKQDSDFISRQLNDTRYISKEAKNYLSKICNNVMVAPGQMTSNLRHHWGLNTVLNKEDDAKTREDHRHHAIDALVMACATRSHLQELSKWNRYDRTFDLENFPKPWKTFREDAENAVEQILVSHKKQKSILTVRTHTTKKNGTTYKNVGVAARGQLHKETVFGKPKNGEEVFHVRKPIDALTTEKQLEKVVDETIKKLIFKRIHVLGGFIKGKIPAETFFVVDENGVKQPQIFLPNKNGNPVPVLKVRMKENIGGAEPLKDNLNQWVNPRNNHHVLIYKDDNGNLKEDVVTFWTVVERKRKSFPVYQLPTDGKEIVTTLHINDMFLLGLNEDEIDWENPNYGLLKEHLYRVQKFTSGDYYFRICNTASIQNKEEKQQINSFGMGKNGWTTHNPIKVKVSVSGKIEKL

SEQ ID NO: 15176 - protein, 1131 aa, unidentified
  REGION 1..1131: note = Cas Enzyme sequence
MSKILGLDLGTNSIGWAIVDDSKKEILGIGSRIFPEGVVNLGEGEGREASKNASRTDARGTRRQFFRRRLRKRYLLRELAKNNMCPINYKLVKVWNQKEIFSSESLKEWLRLNPYELRAKALKEKITLEELGRIFYHIIQRRGFQSNSRSAGAENNEKSVIFKGDAKAGKIGISETIESIKDNQTLGSYLNKIYPKENEPFSGEMERIRNRYTTRQMYIDEFEAIWEHQKQYHKELTNELKTIFGGRKKDGYSEDGVLFHQRLLRSQKHLVGNCSFEPKKTKCHISAIPNEQRRVYEWLNTLKCDLAGEKVKITLEDRENILKLLFSKEKVKFKDIRKAIGKLDGYYQFNYKDDDAIHGSHTVSNLSNKKFFGEQWFEFSEKEQEDIWHVLYSFDDRDKLKDYAVEKWNFNEEKAEKISKFNLKDGYANLSRKAINNMLPFLKLGFTYDVAVGLGGVKNALENKWEEYEGFILDNVSEIVRSNLKGGYIEPLKNMLKKECDLSDKELTKLYHHSSNIETAKILDKLPVSPEADKEIQSIKNPVVITALFEIRKLVNEIIEDYGKPDEIKVELARDLKISKSKRNDIRREQKRLERENDRVKAELDYIGQRPTHVNILKYKLWEECNKTCPYTGKNIEVNQLFSGEIQIEHIYPWSRSLNDSYMNKTLCFADENRAKGDLTPYEFYSKQGEQKWNDIKLQALSCFKNKANYPNAYYKFKQFVKEKHDSDFISRQLNDTRYISKEAKNYLSKICNNVMVAPGQMTSNLRHHWGLNTVLNKEDDTKSREDHRHHAIDALVMACATRSHLQELSKWNRYDRTYDLENFPKPWKTFREDAENVVEKILVSHKKSKSILTVRTHTTKKNGTTYKNVGVAARGQLHKETVFGKRQAPNSDEAFHVRKPIDVLTTEKQLEKVVDEAIKQLIFKRIHVLGGFIKGKIPPETFFVVDEHGIKQSQIFLPNKNGNPVPVLKVRMKENIGGAEPLKDNLNQWVNPRNNHHVLIYKDDNGNLKEDVVTFWTVVERKRKSFPVYQLPTDGKEIVTTLHINDMFLLGLNEDEIDWENLNYGLLKEHLYRVQKFTSGDYYFRICNTASIQNKEEKQQINSFGMGKNGWATHNPIKVKVSVSGKIEKI

SEQ ID NO: 15177 - protein, 1128 aa, unidentified
  REGION 1..1128: note = Cas Enzyme sequence
MAKILGLDLGTNSIGWALIDDKQNKILGIGSRIFPMGVENLGEGEGREMSKNAGRTGARGVRRQFFRRRLRKKILLKALTENKMCPMVVSDFEDWKKTKEFPSEKLANWFAINPYELRQKALNEKLSLEEIGRIFYHLIQRRGFLSNSRKGGNDDGTIFKGNLKEGKIGIDDTLESIEGKTLGSYLYEIFPKQNQPFQDGLERIRNRYTTRKMYVDEFELIWNKQSQYHANLNEDLKTLFGGRKLDGYKEDGILFHQRPLRSQKHLVGYCSFEPTKTKCPVSAIPFEQFRVWQWVNTIEYNGKKIPHQDKDKIVEFLYANEKPDFKRIRKVIGKESAEFKFNYKDEDKIVGTHTISNLLNKKYFGKKWFEFSDKEQEDIWHVLYFFDSKSNLKEYAFKNWNFTDEQADVISRFNVKDGYSSLSRKAITNILPFLKIGFTYDVAVVLGGIRNVFGSDWEKLSDEKRNYLIDNVEGIVRSKTKGGFIDVVKDILRNDYSITDNQLRKLYHHSAAIDVSELLEKLPVDSVADKEIQKIKNPIVITALFELRKLVNELIDEHGKIDEIKVEMARDLKISKSERYKIRRNQQRLEKENDRVKAEVLKYTNLSHDTILKFKLWEECKRTCPYTGLSIPINELFTNKWQIEHIHPWSKSLNDSFANKTLCLGTENIKKGNQTPFEFYGNDEVSWSAIKERALKLFSDTKEYPNAYQKFKRFVQQKFDDDFSSRQLNDTRFISKEAKNYLSKVCKNVMVSPGQATSNLRQKWGLNNILHDENAKTREDHRHHAVDALVMACTKLSYVQELSKWNRYNRTYDLKQFPLPWETFSYDAEKALEKILISHKKVSNDITVRFKSVEKNGKKHTNKGVAARGQLHKEFIYGKRIAPFIGEAYHIRKPIGSLETEKHIEKVVDVTIRNLIYKKVNELGGFINGKIPNNTFFTVDENGNKQPQILLPNKNGQPVPILKIRIQETINKAKQLKKDSNQFVNPRNNDHVLIYETIDGNLEKDVVSFWEVVERKKEGLNKIKLPSDGKKIINTFKENDMFILFKNEDEINWDSSIDLSDNLYKVQKIAGADYFMEICFRKHNDSRDDKNAKGDYVYIKGFGEGKTGWFTFNPIKVKISVSGKISKV

SEQ ID NO: 15178 - protein, 1125 aa, unidentified
  REGION 1..1125: note = Cas Enzyme sequence
MAKILGLDLGTNSIGWALIDDTANKIVGIGSRIFPMGVDNLGDGDNEISKNAGRTGARGVRRQFFRRRLRKKVLLKALLENEMCPMTVIDFDNWKQTKQFPSDKLASWFALNPYELRNKALTDKVSLEEIGRIFYHLIQRRGFLSNSRKGGSDDGAIFKGNPKEGKIGIIETQEHIQDKTLGSYLFKIYPKENQPFQDGLERIRNRYTTRKMYVDEFEMIWDKQKQFHAVLNDKLKQGIGGRKVDGYKEDGILFHQRPLRSQKHLVGNCSFEPTKTKCPLSAIPFEQFRVWQWVNTVEYNGKKISQEEKEKIVLFLYANEKLDFKKIRKVIGRDSAEFKFNYKDDDKIVGTYTISNLSNKKYFGNKWFEFSEKEQEDIWHVLYFFDSKSNLKEYAIKNWGFNEDQAIAISKFNVKDGYSSLSRKAILNMLPFLQMGFTYDVSVVLGGVKNTFGKDWEKLSEEKRNFFYDNVYEIVRSKTKGGFIDVIKGILRDDYGVSDNQMRKLYHHSATIDVAELLEKLPMGKEADKQIQAIRNPIVITALFELRKLVNELIDEHGVLDEIKVEMARDLKISKSQRNTIRRDQKRLERENDRIKEEVLKYTHLSHDNILKFKLWEECKKTCAYTGKAISVTQLFSGEVQIEHIHPWSRSLNDSFANKTLCYADENRKKGDKTPYEFYGSYELNWSGIKERALKLFSDTAAYPKAYQKFKRFVQVKFDDDFSSRQLNDTRYISKEAKDYLSLVCKKVNVAPGQMTANLRQKWGLNHILNAENDSKSREDHRHHAIDALVMACGKTSYLQELSRWNRYDRRPELKNFPLPWEGFNFEAEKAVEKILISHKRIANDITVRTHKCEKNGKTHTNVGVAARGQLHKETVFGKRDFNGEEAFHVRKAIDSLTTLKQIEKVVDESIRTLILKRIQELGGFVKEKVPANTFFIVDENGLKKPQIFLPNKNGAPVPISKVRMKENFSGAEKLKENVNQWVNPRNNHHVLIYIDEKDNLKEEVVSFWTVVERKRTGEPVYKLPFGGKEIVTTLHINDMFLLGLNEDEINWEDLDYDLLKVHLFRVQSLSSKYYEFRQSINANSQNKVSPFYEQIRGFGSGKTGWDSFNPIKVNVSVSGKIQKV

SEQ ID NO: 15179 - protein, 1063 aa, unidentified
  REGION 1..1063: note = Cas Enzyme sequence
RKNDFNFEVLAKELIEKGASFGFYKSSKKNDFFYWFNYKPTDTVSACQISASLKNVIGEDWKTKRFTYKTLNAKKEEVTKSVDYKDLWHLLSIATSDIYLNEYAKGKLGFDDKNAKAFSKIKLKKDFASLSLSAITKILPYIREGLLYSHAVFMANIENIVDKDIWKDSNQRKYIQTQIAEIVDNYTFDKSQLEVINRLIKECKLKEEYYSREAESIYKSDLNNKLITFYKYNAIENEVDKKIILDNLFPIFIAQLKKYEFAKIKRLDEKVLEFLNGENETGQVFCTEQIGTDEERETKIAKRLKRLYHPSDIDVFKKKIIKDDFGNETLVLGSPLTASIKNPMAMRALHQLRKVLNTLILEGQVDERTIIHIEMARELNDANKRKGIQDYQNENKKFREDAIKEIKKLYFDECKKEVEPTEDDILRYQLWLEQGKSEIYEKGKNISICDIIGSNPAYDIEHTIPRSISQDNSQMNKTLCSQRFNREVKKQKMPIELNNHLEILPRIKHWKEEADNYTREIEILSRSIKVAATKEAKDKKIRRRHYVTLKRDYLQGKYDRFIWKEPKVGFKNSQIPDTGIITKYAQAFLKSYFKRVESVKGGMVAEFRKQWGIQESFIDENGFKQYKIKDRSKHTHHTIDAITIACMTKDKYDVLAKAWTSEDEQDKPAARALMAASKPWKTFKEDLLKIEDEILVSHYTPDNVKKQSKKIVRIRGKKQYIAEIERDEKGKAIPKKDVNGKVIYKLDKDGKKRPRLHQGDTIRGSLHQDSIYGAIKNPLNTEEIRYVIRKDLESLKASDIENIVDETVKQKVKEAVANKILLLSSNAQQKNKIAENEKVWMNEEKQVPIYKVRIYANSVKNPLEIKEHSVLSKSRHEHKQKVYGQNDENYAMAIYELDGKREFELINNFNLAKLIKQDQGFYPLYKEKEVKGKTTFIPIAKSNDIDVVLKRGQQVVFYDKEVEKPKDITEIIDFNGRMYIIEGLSIQRIVRPSGNVDEYGAIMLRCNKEARKADAIKKDNFKPDGVFKINENKPTRKMNHNQLSAFVEGIDFKVLPTGKYEKI

SEQ ID NO: 15180 - protein, 1050 aa, unidentified
  REGION 1..1050: note = Cas Enzyme sequence
LKRVFGEEAYNNTQLSNTGYGEEKGKKQLSIEDVWHCLQMDTFGSKDKKTVRAEFAKKHLKLDEKALENFVKIKLVKGYGSLSKSAIKKIIPFLEKGEIYTNAVFLANVTEVLGRKISETEQKQIAEIIKEALENFRIEKQNKGIVNNYVSKFKADKENSLGNNQFSIEAHQKELDYEIANWIGEVQLGKMDKEVIAEITKTCWELFYNAACDKSSKEIIYLSSKTIPEFIYDGLKVAFPNDKIDVSKLYHPSAMEAYAKADKKLGNPEITSIKNPVFDRAMHQVKRLCNELIRKGLVDKDTEVNLEVAGEINSASYRRALSQWQKEQELIRTWAKRKIVESYPKESQKDIKPTESEIVKYILCSEQNHKCLYTADTISICDFLGTTTYYDIEHTIPRSKNNDNSLKNKTLANFDFNRNYKKATLPALLNVDFKGKAIDVVTILQNRDNNLKSYTIKGDEVFWNVSLNDLKFDYKKFKNAAKAITDAVAHDEVMTKAHYTKMKLDYLREKYRNFEIEEINNQFTNANLVDTRIITKYARAYLNSYFNKVNVVNGKITDTLRKIWGLQGEEETKDRSNHIHHCIDAIVVACVEKGTANKISELYHKYENDYFRGNSNPRIHAKEPMDNFIERLKNLHKEVLIYHKQTDRIKPLLINAQKENDKKINLRGRLNSQNPYAHIKKNDELIFAQRKPITSISGNDIENIIDEGIKKRLLAYADIRGWEKLMEIQTIDSEEIVEKQIELKKTVVFRLYEKLKKDKKNESLIKRNVVKNDVDIDFFDSNSLIDVVFKSSVLENLDVSKKDVFNNKILKEVNNLIRSKGLETLLKESEGVIVLPEYKEEKSDKIISKMIIKRIRLKSSKSNLKDYKKIREIDRKQTTDNKYDHKHNYYFDKDSYTNYEARIYGDLIPNDNGKFKNREYKLINHHNIVKGIFEEENRNSILQLHQDDMFLVFDIQPNDEINWNDTIDLQNRLFKIVKFDENGTIVLSRHNYAGGNVNEANAIKTENDLSDSSQVVLRRSPSTLRVIPAKLDTLGKIDIKFSRDFINSNS

SEQ ID NO: 15181 - protein, 1470 aa, unidentified
  REGION 1..1470: note = Cas Enzyme sequence
MAKILGLDLGTNSIGWAIVDKEGADFSLVDKGVRIFSEGVKSEKGIESSRAAERTGYRSARKLKYRRKLRKYETLKVLTINGMCPLSIEEVELWKKSGFIDYPLNPEFLKWLRTDDDQNINPYYFRDKTSKQKTTLYELGRALYHIAQRRGFLSNRLDQSADGILEEHCPKIEAIIEDLNSYDEIRTNLKDYFFETGILDYNEKSGFVKDLDEGDKKLVSLYKSIQAIIKKNDADFEKGKSEIIERLNKKDVLGKVKGKIKDISQAMLDGNYKTLGQYFFSFYNKGKIRNQYTSREEHYLEEFIIICKVQGIGTVDESEKLPEKKFSGLAKDLYRAIFFQRPLKSQKGLIGKCSFETSKSRCAISHPDFEEYRMWNYLNTIKMGTQSEKTLRFLSLEEKIKLIPKFLRKKDNFNFEELAKELIEKGASFGFYKSSRKNDFYYWFNYKPTDTVSGCPISASLKNVIGEDWKTKRFTYKTLNAKKEEVTKSVDYKDLWHLLSIATSDIYLNEYAKGKLGFDDKNAKAFSKIKLKKDFASLSLSAITKILPYIREGLLYSHAVFMANIENIVDKDIWKDSNQRKYIQTQIAEIVDNYTFDKSQLEVINGLIKECKLKEEYYSREAESIYKSDLNNKLITFYKYNAIENEVDKKIILDNLFPIFIAQLKKYEFAKIKRLDEKVLEFLNGENETGQVFCTEQIGTDEERETKIAKRLKRLYHPSDIEVFKKKIKIDEFGNETLVLGSPLTASIKNPMAMRALHQLRKVLNTLILEGQVDERTIIHIEMARELNDANKRKGIQDYQNENKKFREDAIKEIKKLYFDECKKEVEPTEDDILRYQLWLEQGKSEIYEKGKNISICDIIGSNPAYDIEHTIPRSISQDNSQMNKTLCSQRFNREVKKQKMPIELNNHLEILPRIKHWKEEADNYTREIEILSRSIKVAATKEAKDKKIRRRHYVTLKRDYLQGKYDRFIWKEPKVGFKNSQIPDTGIITKYAQAFLKSYFKRVESVKGGMVAEFRKQWGIQESFIDENGFKQFKIKDRSKHTHHTIDAITIACMTKDKYDVLAKAWTSEDEQDKPAARALMAASKPWKTFKEDLLKIEDEILVSHYTPDNVKKQSKKIVRIRGKKQYIAEIERDEKCKAIPKKDANGKVIYKLDKDGKKRPRLQQGDTIRGSLHQDSIYGAIKNPLNTEEIRYVIRKDLESLKASDIENIVDETVKEKVKEAVVNKILLLSSNAQQKNKITENEKVWMNEEKQVPINKVRIYANSVKNPLEIKEHSLLSKSRHEHKQKVYGQNDENYAMAIYELDGKKEFELINNFNLAKILKQGESFYPLHKEKEVKGKKVLIPIAKSNYRDVVLKKGQQVIFYDQAVENPQDINEILDFKGRIYIVEGLSINRVKSGNSFYEFGVILLKYFKEARKADDVKKDIYKPDGDFKLGDNKPTRKMSPGQFTAFVEGIDFKVSPAGKFQKI

SEQ ID NO: 15182 - protein, 1146 aa, unidentified
  REGION 1..1146: note = Cas Enzyme sequence
MAKILGLDLGTNSIGWAIVDDLQNKILGIGSRIFPMGVENLGDGDKEMSKNASRTGARGIRRQFFRKRLRKKILLNALSKNKMCPLTSEDFENWKIMKEFPTVKLADWFALNPYELRQKALTEKMSLEEIGRVLYHLIQRRGFLSNSRKGGTDDGTLFKGNPKEGKIGITETQEKIEDKTLGSYLFEIYPKQNKPFQDGLERIRNRYTTRKMYVDEFEHIWNKQAECNSALNEDLKTLFGGRKLDNYKEDGILFHQRPLRSQKHLVGNCSFEPSKTKCPISAIPFEQFRVWQWVNTVEYNGNKISQEEKEKIAAFLYSNEKPDFKKIRKVIGKESAEFKFNYKDDDKIVGTHTISNLSNKKYFGTSWFDFTEKEQEDIWHVLYFFDSKSNLKKYVIKNWNFSEEQAEAISKFNVKEGYSSLSRKAILNILPFLQMSYTYDVAVVLGGIKNTFGANWQTLQDEKRNYFIDNVEGIVRSKTKGGFIDVIKDILRNDYNLSDNQMRKLYHHSATIDAEELLMKLPIDKEADKEIQAIRNPIVITALFELRKLVNELTDEHGTINEIKVEMARDLKISKSQRNNIRRDQKRLERENDRVKAEVLRYTNLSHDNILKFKLWEECRKTCPYTGKAISINQLFSGEVQIEHIHPWSRSLNDSFGNKTVCFADENRNKGNKTPFEFYGTDDGNWSSIKERALKLFSDTKEYPTAYQKFKRFVQQKFDDDFTTRQLNDTRYISKEAKNYLSKICKKVLVSPGQATSNLRQKWGLNNILNDQNEKTREDHRHHAVDALVMACTKTAYVQELSKWNRYNRNYDLKEFPLPWESFRKDAENAVEKILISHKKVSNDITVRTHTTEKNGEKHKNIGVAARGQLHKETVFGKRNFNGEEAFHVRKPIDSLITLKQVEKVVDETTRKIILKRVQIRLLELNDEVFNSTDTRKDKEIQKEIENYHKGTIPSKVFFNVDENGIKHPQIFLPNKSGQPVPILKVRIKENFSGAEKLKDNINQWVNPRKNHHVLIFKDEKGNLKEEVVTFWTVVERKRTNQSVYQLPSDGTEIVTSLHINDMFLLGLKEEAINWENPDYEVLKEHLFRVQKFTSGDYYFRISKTSSIQNLEEKQQINSFGVGKNGWETHNPIKVKISVSGKITKI

SEQ ID NO: 15183 - protein, 982 aa, unidentified
  REGION 1..982: note = Cas Enzyme sequence
LVKGYGSLSKSAIKKIIPFLEKGEIYTNAVFLANVTEVLGRKISETEQNKIAGIIKEALENFRIEKQNKGIVNNYISKFKDQNNKENSLGNNEYSINAFKKELDYEIANWIGEVQLGKMKKEAVSEITETCWELFYEAACDKLPKTVAYLSTETIPEFIYDGLKVVYPNDKIDVTKLYHPSAMEAYAKADKKLGNPEITSIKNPVFDRAMHQVKRLCNELIRKGLVDKDTEVNLEVAGEINSASYRRALSQWQKEQEEIRSWAKSKIIDCYTKEFSSNKIPTETEISKYILYSEQNGICLYTSETITPRNFLNRQTIYDIEHTIPRSKNNDNSLKNKTLANYDFNRNYKKAILPALLNLNFAGNDIDVEVILNNRNKHLKSYTFIGKQPNMNIAWNVSLNDLRFEYKKFKNAAKAITDAASHDEVMTKAHYTKMKLDYLQEKYRNFEIEEINNQFTNANLVDTRIITKYARAYLNSYFTKVNVVNGKITDTLRKIWGIQGEEETKDRSNHIHHCIDAIVVACVEKGTANKISELYHIYENDYFRGNSNPRIHAKEPMNNFVERLKNLQKEVLIYHKQTDRIKPLLINAQKENAKKLNLRGKLNSQNPYAHIKKNDKLIFAQRKPIASIGGNDIENIIDEGIKKRLLAFADMKGWEKLMEIQNSEDDEAVEKRIILKKTLVFRLYEKLKKDKNNKSFIKTNVVKESVDFDFFDFDTLIDSVYKSSVLENLDDSKKGLFKNKIVKETNNLIRSKGLETLLKESEGVIVLPEYNDEKTQKVISKMILKRIRLKSSKSNLKDYKKIREIDRKQSDDNKFDHKHDYYFDKESYTNYEARIYGDLIPNDKGKFKNREYKVINHHNIVKNIFEKERSSSLLQLHQDDMFLVFDMKPHDEILWENNIDVQNRLFRIVKFDENGIIVLTRHNYATGNVDSAVAVTSENDLSISSQVVLRRRSSTLRVIPARLDALGKIDIEFSKDFIRLNS

SEQ ID NO: 15184 - protein, 1044 aa, unidentified
  REGION 1..1044: note = Cas Enzyme sequence
MQILNSGYADEKGKKQLSIEDVWHCLQMDSFGNKDKKYVRTEFAKKYLKLDDKGLENFVKIKLVKGYGSLSKSAIKKIIPFLEKGEIYTNAVFLANVSQVLGRKITEIEQQKIAEIIKEALENFGIEKQNKGIVNNYISKFKEENNKENSLGNNENSINAFRKDLDYEIANWIGEVKLGTMKKEAVSAITETCWKLFYEAACDKLPKTVNYLASKTIPEFIYEGLKIVYPNDKIDVTKLYHPSAMEAHAKADKKLGNPEISSIKNPVFDRAMHQVKRLCNELIRKGLVDKETEVNLEVAGEINSASYRRALTQWQKEQEDIRDWAKSKIIDCYAKEFSEVKIPTQTEIAKYILYSEQNGVCLYTSETITPRNFLGKQTMYDIEHTIPRSKNNDNSLKNKTLANYDFNRNYKKATLPALLNLNFKGNDIDLEVIFNNRNKNLKSYSFIGKKPNMNIVWNVSLSDLKFEYKKFKNAAKAITDATSHDEVMTKAHYTRLKLDYLREKYRNFEIEEINNQFTNANLVDTRIITKYARAYLNSYFNKVNVVNGKITDTLRKIWGIQGEEETKDRSNHIHHCIDAIVVACVEKGTANKISELYHKYENDYFRGNSNPRIHAKEPMKNFVETLKNLHKEVLIYHKQTDRIKPLLINAQKENAKKLNLRGKLNSQNPYAHIKKDDKLIFAQRKPIASISGSDIENIIDEGIKKRLLTFADIRGWEKLMEIQSTEIDDIEEKRIVLKKVVVFRLYEKLKKDKNNKSFIKSNVIKDNVDFDFFDFETLIESVYKSSILENLDDSKKDLFKSKIANETNNLIRSKGLETLLKESEGVIVLPEYIDAKTQKNISTMVLKRIRLKSSKSNLKDYKMIREIDKKQSEENRFHYKHDYYFDKESYTNYEARIYGDLIPNDKGKFKNREYKVINHHNIVKNIFEKEVKNSILQLHQDDMFLVFDLKPNDEIDWTSKIDLQNRLFKVVKFDENGIIVLVRHNYASGNVGSAIAVKSENDLTDISQVVLRRSPSTLRVVPAKLDTLGNLDIEFSKIFISQNS

SEQ ID NO: 15185 - protein, 1145 aa, unidentified
  REGION 1..1145: note = Cas Enzyme sequence
MAKILGLDLGTNSIGWAIVDDLQNKILGIGSRIFPMGVENLGDGDKEMSKNASRTGARGIRRQFFRKRLRKKILLNALSKNKMCPLTSEDFENWKIMKEFPTVKLADWFALNPYELRQKALTEKMSLEEIGRVLYHLIQRRGFLSNSRKGGTDDGTLFKGNPKEGKIGITETQEKIEDKTLGSYLFEIYPKQNKPFQDGLERIRNRYTTRKMYVDEFELIWNKQAEFNSALNEDLKTLFGGRKLDNYKEDGILFHQRPLRSQKHLVGNCSFEPSKTKCPISAIPFEQFRVWQWVNTVEYNGNKISHEEKEKIAAFLYSNEKPDFKKIRKVIGKESAEFKFNYKDDDKIVGTHTISNLSNKKYFGTSWFDFTEKEQEDIWHVLYFFDSKSNLKKYAIKNWNFSEGQAEAISKFNVKEGYSSLSRKAILNILPFLQMSYTYDVAVVLGGIKNTFGANWQTLQDEKRNYFIDNVEGIVRSKTKGGFIDVIKDILRNDYNLSDNQMRKLYHHSATIDAEELLMKLPIDKEADKEIQAIRNPIVITALFELRKLVNELTDEHGTINEIKVEMARDLKISKSQRNNIRRDQKRLERENDRVKAEVLRYTNLSHDNILKFKLWEECRKTCPYTGKAISINQLFSGEVQIEHIHPWSRSLNDSFGNKTLCFADENRNKGNKTPFEFYGTDDGNWSSIKERALKLFSDTKEYPTAYQKFKRFVQQKFDDDFTTRQLNDTRYISKEAKNYLSKICKKVLVSPGQATSNLRQKWGLNNILNDQNEKTREDHRHHAVDALVMACTKTAYVQELSKWNRYNRNYDLKEFPLPWESFRKDAENAVEKILISHKKVSNDITVRTHTTEKNGEKHKNIGVAARGQLHKETVFGKINFNGEEAFHVRKPIDSLITLKQVEKVVDETTRKIILKRVQIRLLELNDEVFNSTDTRKDKEIQKEIENYHKGTIPSKVFFNVDENGIKHPQIFLPNKSGQPVPILKVRIKENFSGAEKLKDNINQWVNPRKNHHVLIFKDEKGNLKEEVVTFWTVVERKRTSQSVYQLPSDGREIVTSLHINDMFLLGLKEETINWENPDYEVLKEHLFRVQKLTSGDYFFRKHTASNITNSEYSQIRGFGEGKTGWFSFNPIKVKISVSGKITKI

SEQ ID NO: 15186 - protein, 1125 aa, unidentified
  REGION 1..1125: note = Cas Enzyme sequence
MAKILGLDLGTNSIGWALIDDTANKIVGIGSRIFPMGVDNLGDGDNEISKNAGRTGARGVRRQFFRRRLRKKVLLKALLENEMCPMTVIDFDNWKQTKQFPSDKLASWFALNPYELRNKALTDKVSLEEIGRIFYHLIQRRGFLSNSRKGGSDDGAIFKGNPKEGKIGIIETQGHIQDKTLGSYLFKIYPKENQPFQDGLERIRNRYTTRKMYVDEFEMIWDKQKQFHAVLNDKLKQGIGGRKVDGYKEDGILFHQRPLRSQKHLVGNCSFEPTKTKCPLSAIPFEQFRVWQWVNTVEYNGKKISQEEKEKIVLFLYANEKLDFKKIRKVIGRDSAEFKFNYKDDDKIVGTYTISNLSSKKYFGNKWFEFSEKEQEDIWHVLYFFDSKSNLKEYAIKNWGFNEDQAIAISKFNVKDGYSSLSRKAILNMLPFLQMGFTYDVSVVLGGVKNTFGKDWEKLSEEKRNFFYDNVYEIVRSKTKGGFIDVIKGILRDDYGVSDNQMRKLYHHSATIDVAELLEKLPMGKEADKQIQAIRNPIVITALFELRKLVNELIDEHGVLDEIKVEMARDLKISKSQRNTIRRDQKRLERENDRIKEEVLKYTHLSHDNILKFRLWEECKKTCAYTGKAISVTQLFSGEVQIEHIHPWSRSLNDSFANKTLCYADENRKKGDKTPYEFYGSYELNWSGIKERALKLFSDTAAYPKAYQKFKRFVQVKFDDDFSSRQLNDTRYISKEAKDYLSLVCKKVNVAPGQMTANLRQKWGLNHILNAENDSKSREDHRHHAIDALVMACGKTSYLQELSRWNRYDRRPELKNFPLPWEGFNFEAEKAVEKILISHKRIANDITVRTHKCEKNGKTHTNVGVAARGQLHKETVFGKRDFNGEEAFHVRKAIDSLTTLKQIEKVVDESIRTLILKRIQELGGFVKEKVPANTFFIVDENGLKKPQIFLPNKNGAPVPISKVRMKENFSGAEKLKENVNQWVNPRNNHHVLIYIDEKDNLKEEVVSFWTVVERKRTGEPVYKLPFGGKEIVTTLHINDMFLLGLNEDEINWEDLDYDLLKVHLFRVQSLSSKYYEFRQSINANSQNKVSPFYEQIRGFGSGKTGWDSFNPIKVNVSVSGKIQKV

SEQ ID NO: 15187 - protein, 1470 aa, unidentified
  REGION 1..1470: note = Cas Enzyme sequence
MGKILGLDLGTNSIGWAIVDKEGADFSLVDKGVRIFSEGVKSEKGIESSRAAERTGYRSARKLKYRRKLRKYETLKVLTINGMCPLSIEEVELWKKSGFIDYPLNPEFLKWLRTDDDQNINPYYFRDKTSKQKTTLYELGRALYHIAQRRGFLSNRLDQSADGILEEHCPKIEAIIEDLNSYDEIRTNLKDYFFETGILDYNEKSGFVKDLDEGDKKLVSLYKSIQAIIKKNDADFEKGKSEIIERLNKKDVLGKVKGKIKDISQAMLDGNYKTLGQYFFSFYDKGKIRNQYTSREEHYLEEFIIICKVQGIGAVDESEKLPEKKFSGLAKDLYRAIFFQRPLKSQKGLIGKCSFETSKSRCAISHPDFEEYRMWTYLNTIKIGTQSEKTLRFLTQEEKLKLVSKFYRKNDFNFEVLAKELIEKGASFGFYKSSKKNDFFYWFNYKPTDTVSACQISASLKNVIGEDWKTKRFTYKTLNAKKEEVTKSVDYKDLWHLLSIATSDIYLNEYAKGKLGFDDKNAKAFSKIKLKKDFASLSLSAITKILPYIREGLLYSHAVFMANIENIVDKDIWKDSNQRKYIQTQIAEIVDNYTFDKSQLEVINRLIKECKLKEEYYSREAESIYKSDLNNKLITFYKYNAIENEVDKKIILDNLFPIFIAQLKKYEFAKIKRLDEKVLEFLNGENETGQVFCTEQIGTDEERETKIAKRLKRLYHPSDIEVFKKKIKIDEFGNETLVLGSPLTASIKNPMAMRALHQLRKVLNTLILEGQVDERTIIHIEMARELNDANKRKGIQDYQNENKKFREDAIKEIKKLYFDECKKEVEPTEDDILRYQLWLEQGKSEIYEKGKNISICDIIGSNPAYDIEHTIPRSISQDNSQMNKTLCSQRFNREVKKQKMPIELNNHLEILPRIKHWKEEADNYTREIEILSRSIKVAATKEAKDKKIRRRHYVTLKRDYLQGKYDRFIWKEPKVGFKNSQIPDTGIITKYAQAFLKSYFKRVESVKGGMVAEFRKQWGIQESFIDENGFKQYKIKDRSKHTHHTIDAITIACMTKDKYDVLAKAWTSEDEQDKPAARALMAASKPWKTFKEDLLKIEDEILVSHYTPDNVKKQSKKIVRIRGKKQYIAEIERDEKGKAIPKKDVNGKVIYKLDKDGKKRPRLHQGDTIRGSLHQDSIYGAIKNPLNTEEIRYVIRKDLESLKASDIENIVDETVKQKVKEAVANKILLLSSNAQQKNKIAENEKVWMNEEKQVPIYKVRIYANSVKNPLEIKEHSVLSKSRHEHKQKVYGQNDENYAMAIYELDGKREFELINNFNLAKLIKQDQGFYPLYKEKEVKGKTTFIPIAKSNDIDVVLKRGQQVVFYDKEVEKPKDITEIIDFNGRMYIIEGLSIQRIVRPSGNVDEYGAIMLRCNKEARKADAIKKDNFKPDGVFKINENKPTRKMNHNQFSAFVEGIDFKVLPTGKYEKI

SEQ ID NO: 15188 - protein, 1438 aa, unidentified
  REGION 1..1438: note = Cas Enzyme sequence
MSRILGLDLGTNSIGWAIVDKDGINFSLIDKGVRIFSEGVNIEAKTNSESSKAAKRTEYRSARKLKYRRKIRKIELLKILSDNDLCPKLSDEELNDWRYKKIYPQNDEFRIWLSTDNQDNVEDRKRQTKNPYSCRFKSAKENLNLNSKEDRYILGRAFYHIAQRRGFLSNRLDSSDNSIIEDKKDEISTVINDATSIAEFLELFSDFVSSFDKDESNNKPLFVLSRAFNIIIKENPTLVYVDLKEKLQERLNKKEFLGPVKRAISDLSEKIAIAECFTLGEYFYTLHQKNEKIRGEYTHRVDHYLTEFNFICGKQNIPTEIREKIEKAIFFQRPLKSQKGLVAKCPLENRKACVPISHPDFEEFRMLSYLNNVKIKLPTDEKLRLLNEDEREQVQSLFFRKSKANFDFAEIAKKLTPKNLKSGYYRDKNASEFDVLFNFNLGSNVAGCPTVANLIDVFGVDWKAYLNINFIKNTKTENNIKIKKSEEGIIDDVWHVLFRFDKEEILKQFAIETLKCDDKTATKFSKIKFKQDYGSLSLKAIRNILPYLRQNLIYSHAVFLANMKNVLPIEIWNNEENKNVINNEINSIIENYKVYGNKIEIVNGLIKNAKRENGTWSSENKFVAEAYINDLNKQVKDFFGTKKWNETPEKYQNEILSECFELFSNQMKLNSGRGEFAKKQTIDEILKTFLNDNFNVNEESLKKLYHPSAIEVYKKAKRSVEDGKLYLGSPLISSIKNPMAMRSLHQLKKVVNQLIKDDIIDENTRIHIEMPRELNSSNERVAIRQWNEDLKNRKNKYAEEIKSIFKGDIKTESCDDANTNYNDYEPTETDILKYQLWIEQNKVCLYTGKTICLSDFIGNNPKFDIEHTIPRSRSLDNSQLNKTLCCATYNRQIKKDKIPFECPNHEEILPRIRHWFAKYKALEQQIKDLSKKVKAVSTKEMRDKYIIDRTKLRFEYYYLLKKYKSFNMEEVPEGFKNSQSVDIGIISKYGNLFLKTAFNKVYPIKGKTTANLRQMWGLDEKSRDNHAHHAKDAVVVACCTRDINDALANYYHDLEQFEYYGKPKPSFSHRIPWEGFHKDVDNFDNDTLISHHTPDVLPTQSKKAIRKRGIIQRNENGEIKYKQGDTVRGALHKESFYGAIKREETNKKTGKSEEVIKYVKRQSIDLFKDTDLKNIVDDVIKEIVTNGREQEKLIKKEIESLEKQLKKQKEDEEQPVKEEIQILKNRIKNDLYILPNKSGMPVPIKKIRYYTSDVTNPLFIKKHRDISRHEHKQFYHAKNDGNYCYAIYDGFDKKGKKLVEFRVVNNFDSGKYFNSGLNNHKYPLELNILDNKQNVLSLKYLLKTGTLVLFFKESKNEIWELDDNDLSKRLYKTVAIESDGRVQFRLHSTSKPDGQLEKSSSFNFETPNEKLRISKSGLNVLVEGVDFIISPTGKVQKL

SEQ ID NO: 15189 - protein, 1148 aa, unidentified
  REGION 1..1148: note = Cas Enzyme sequence
MGKILGLDLGTNSIGWAIVDDLQNKILGIGSRIFPMGVENLGDGDKEMSKNASRTGARGIRRQFFRKRLRKKILLNALSKNKMCPLTSEDFENWKIMKEFPTVKLADWFALNPYELRQKALTEKMSLEEIGRVLYHLIQRRGFLSNSRKGGTDDGTLFKGNPKEGKIGITETQEKIEDKTLGSYLFEIYPKQNKPFQDGLERIRNRYTTRKMYVDEFELIWNKQAEFNSALNEDLKTLFGGRKLDNYKEDGILFHQRPLRSQKHLVGNCSFEPSKTKCPISAIPFEQFRVWQWVNTVEYNGNKISQEEKEKIAAFLYSNEKPDFKKIRKVIGKESAEFKFNYKDDDKIVGTHTISNLSNKKYFGTSWFDFTEKEQEDIWHVLYFFDSKSNLKKYAIKNWNFSEGQAEAISKFNVKEGYSSLSRKAILNILPFLQMSYTYDVAVVLGGIKNTFGANWQTLQDEKRNYFIDNVEGIVRSKTKGGFIDVIKDILRNDYNLSDNQMRKLYHHSATSDAEELLMKLPIDKEADKEIQAIRNPIVITALFELRKLVNELTDEHGTINEIKVEMARDLKISKSQRNNIRRDQKRLERENDRVKAEVLRYTNLSHDNILKFKLWEECRKTCPYTGKAISINQLFSGEVQIEHIHPWSRSLNDSFGNKTLCFADENRNKGNKTPFEFYGTDDGNWSSIKERALKLFSDTKEYPTAYQKFKRFVQQKFDDDFTTRQLNDTRYISKEAKNYLSKICKKVLVSPGQATSNLRQKWGLNNILNDQNEKTREDHRHHAVDALVMACTKTAYVQELSKWNRYNRNYDLKEFPLPWESFRKDAENAVEKILISHKKVSNDITVRTHTTEKNGEKHKNIGVAARGQLHKETVFGKRNFNGEEAFHVRKPIDSLITLKQVEKVVDETTRKIILKRVQIRLLELNDEVFNSTDTRKDKEIQKEIENYHKGTIPSKVFFNVDENGIKHPQIFLPNKSGQPVPILKVRIKENFSGAEKLKDNINQWVNPRKNHHVLIFKDEKGNLKEEVVTFWTVVERKRTSQSVYQLPSDGTEIVTSLHINDMFLLGLKEETINWENPDYEVLKEHLYRVQKLSSKFYEFRLGSESSIQNNIQPFYVRIQGFGEGKTGWATFRPAKVKISVSGKITKI

SEQ ID NO: 15190 - protein, 1125 aa, unidentified
  REGION 1..1125: note = Cas Enzyme sequence
MAKILGLDLGTNSIGWALIDDTANKIVGIGSRIFPMGVDNLGDGDNEISKNAGRTGARGVRRQFFRRRLRKKVLLKALLENEMCPMTVIDFDNWKQTKQFPSDKLASWFALNPYELRNKALTDKVSLEEIGRIFYHLIQRRGFLSNSRKGGSDDGAIFKGNPKEGKIGIIETQEHIQDKTLGSYLFKIYPKENQPFQVGLERIRNRYTTRKMYVDEFEMIWDKQKQFHAVLNDKLKQGIGGRKVDGYKEDGILFHQRPLRSQKHLVGNCSFEPTKTKCPLSAIPFEQFRVWQWVNTVEYNGKKISQEEKEKIVLFLYANEKLDFKKIRKVIGRDSAEFKFNYKDDDKIVGTYTISNLSNKKYFGNKWFEFSEKEQEDIWHVLYFFDSKSNLKEYAIKNWGFNEDQAIAISKFNVKDGYSSLSRKAILNMLPFLQMGFTYDVSVVLGGVKNTFGKDWEKLSEEKRNFFYDNVYEIVRSKTKGGFIDVIKGILRDDYGVSDNQMRKLYHHSATIDVAELLEKLPMGKEADKQIQAIRNPIVITALFELRKLVNELIDEHGVLDEIKVEMARDLKISKSQRNTIRRDQKRLERENDRIKEEVLKYTHLSHDNILKFKLWEECKKTCAYTGKAISVTQLFSGEVQIEHIHPWSRSLNDSFANKTLCYADENRKKGDKTPYEFYGSYELNWSGIKERALKLFSDTAAYPKAYQKFKRFVQVKFDDDFSSRQLNDTRYISKEAKDYLSLVCKKVNVAPGQMTANLRQKWGLNHILNAENDSKSREDHRHHAIDALVMACGKTSYLQELSRWNRYDRRPELKNFPLPWEGFNFEAEKAVEKILISHKRIANDITVRTHKCEKNGKTHTNVGVAARGQLHKETVFGKRDFNGEEAFHVRKAIDSLTTLKQIEKVVDESIRTLILKRIQELGGFVKEKVPANTFFIVDENGLKKPQIFLPNKNGAPVPISKVRMKENFSGAEKLKENVNQWVNPRNNHHVLIYIDEKDNLKEEVVSFWTVVERKRTGEPVYKLPFGGKEIVTTLHINDMFLLGLNEDEINWEDLDYDLLKVHLFRVQSLSSKYYEFRQSINANSQNKVSPFYEQIRGFGSGKTGWDSFNPIKVNVSVSGKIQKV

SEQ ID NO: 15191 - protein, 1469 aa, unidentified
  REGION 1..1469: note = Cas Enzyme sequence
MAKILGLDLGTNSIGWAIRDTEIDGNQILDKGVRIFSEGVKSEKGIESSRAAERTGYRSARKIKYRRKLRKYETLKVLSLNGMCPLSIEEVEEWKKSGFKEYPLNPEFLKWLSTNEDENINPYFFRDKASKQKVTLFELGRALYHIAQRRGFLSNRLDQSAEGVFEEHNPQIQSLIEDLDDSKLILDELKTYYVDKGIIEEAEKGVFKKDLDEGEKKLKSLYNSLVAITKKNDGDIIKCKEELLARLNKKEDLGKVKGKIKDISQAMTDGGFKTLGQYFFSLYNKERIRNQYTSREEHYLEEFITICKVQGIDSINENEKLPEKKFDGLAKDLYKAIFFQRPLKSQKGLIGKCSFETSKSRCAISHPDFEEYRMWTYLNTIKIGTQSEKTLRFLTQEEKLKLVPKFYRKNDFNFEVLAKELVEKGASFGFYKSSKKNDYFYWFNYKPTDSVSACQASASLKNVIGEEWKTKTFNYKTLNAKKEEVIKSVDYKDLWHLLSVATSDVYLYEYAKEKLGFDDKSAKAFSKIKLKKDFASLSLAAISKIFPYIKEGLLYSHAVFMANIENIVDESIWNDVKQRKYIQTKITEIVENYTFDKNQLEIINGLIKEAKLKAEYYSKEAEKIYKSDLASKLVSFHKNHSIENEADQKIILDNLFLIFIEQLKKYEFIKVKRLDEKVLEFLSGQNEDGEVFCSNPKQLKKLYHPSDIDVFKKKIIKDGFGNEKVVLGSPLTPSIKNPMAMRALHQLRKVLNTLILEGQIDENTRIHIEMARELNDANKRKGIQDYQNENKKFREDAIKEIKKLYFEECKKEVEPTEEDILRYQLWIEQNRMEIYEPTINGGVSKNIKISQIIGSNPDYDIEHTIPRSRSQDNSQTNKTLCSQKFNRDNKGNKMPIELSNYEMIEPFISHWKQEADNLSREIEIISRSIKAAATKEVKDKKIRRRHYLTLKRDYLQGKYDRFIWKEPKVGFKNSQIPDTGIITKYSQAYLKSYFKRVESVKGGMVAEFRKQWGIQESFIDENGFKQYKEKDRSKHTHHTIDAITIACMTKDKYDVLAKAWTSEDEQDKQKAKALMSDAKPWKTFKEDLEKIENEILVSHFTPDNVKKQSKKILRVRGKKQYVAEIERDINGKAIPKKDSNGKIIYKLENEGKKLPRFQQGDAVRGSLHQDSIYGAIKNPLNNEEIRYVIRKDLESLKANDIENIVDEMVKEKVKGAVVNKVLLLSSNAQQKNKMNGVVWMNEEKQVPINKVRIYANSVKNPLEIKEHSLLSKSKHEHKQKVYGQNDENYAMAIYELDGKREFELINNFNLAKLLKQGQGFYPLHKEKELKGQKVLVPIEKRNNRDVVLKRGQQVVFYDKDVEKPKDITEIIDFKGRIYIIEGLSIQRIVRPSGKVDEYGVIMLRYFKEARKADDIKKDNFKPDGVFKLGESKPTRKMNHNQFNAFVEGIDFKVLPTGKLEKIKKWKNQN

SEQ ID NO: 15192 - protein, 1146 aa, unidentified
  REGION 1..1146: note = Cas Enzyme sequence
MAKILGLDLGTNSIGWAIVDDLQNKILGIGSRIFPMGVENLGDGDKEMSKNASRTGARGIRRQFFRKRLRKKILLNALSKNKMCPLTSEDFENWKIMKEFPTLKLADWFALNPYELRQKALTEKMSLEEIGRVLYHLIQRRGFLSNSRKGGTDDGTLFKGNPKEGKIGISETQEKIEDKTLGSYLFEIYPKQNKPFQDGLERIRNRYTTRKMYVDEFELIWNKQAEFNSALNEDLKTLFGGRKLDNYKEDGILFHQRPLRSQKHLVGNCSFEPSKTKCPISAIPFEQFRVWQWVNTVEYNGNKISQEEKEKIAAFLYSNEKPDFKKIRKVIGKESAEFKFNYKDDDKIVGTHTISNLSNKKYFGTSWFDFTEKEQEDIWHVLYFFDSKSNLKKYVIKNWNFSEEQAEAISKFNVKEGYSSLSRKAILNILPFLQMSYTYDVAVVLGGIKNTFGANWQTLQDEKRNYFIDNVEGIVRSKTKGGFIDVIKDILRNDYNLSDNQMRKLYHHSATIDAEELLMKLPIDKEADKEIQAIRNPIVITALFELRKLVNELTDEHGTINEIKVEMARDLKISKSQRNNIRRDQKRLERENDRVKAEVLRYTNLSHDNILKFKLWEECRKTCPYTGKAISINQLFSGEVQIEHIHPWSRSLNDSFGNKTVCFADENRNKGNKTPFEFYGTDDGNWSSIKERALKLFSDTKEYPTAYQKFKRFVQQKFDDDFTTRQLNDTRYISKEAKNYLSKICKKVLVSPGQATSNLRQKWGLNNILNDQNEKTREDHRHHAVDALVMACTKTAYVQELSKWNRYNRNYDLKEFPLPWESFRKDAENAVEKILISHKKVSNDITVRTHTTEKNGEKHKNIGVAARGQLHKETVFGKRNFNGEEAFHVRKPIDSLITLKQVEKVVDETTRKIILKRVQIRLLELNDEVFNSTDTRKDKEIQKEIENYHKGTIPSKVFFNVDENGIKHPQIFLPNKSGQPVPILKVRIKENFSGAEKLKDNINQWVNPRKNHHVLIFKDEKGNLKEEVVTFWTVVERKRTNQSVYQLPSDGTEIVTSLHINDMFLLGLKEEAINWENPDYEVLKEHLFRVQKFTSGDYYFRISKTSSIQNLEEKQQINSFGVGKNGWETHNPIKVKISVSGKITKI

SEQ ID NO: 15193 - protein, 1171 aa, unidentified
  REGION 1..1171: note = Cas Enzyme sequence
MGNYFLRSFKNSYKIQIDMAKILGLDLGTNSIGWALIDDKLNKIIGMGSRIFPVGVDNLGDGEGELSKNASRTGARGTRRQFFRKKLRKKVLLKELASLNMCPLTNQNFDDWKITKKFPSKELASWFALNPYELRHRALNEKLNFEEIGRIFYHLIQRRGFLSNSRSAGKDDGAIFKGNAKEGKIGIDETRVQIENKTLGSYFYEISPKENQPFLDGLERIRNRYTTRQMYVDEFEEIWGHQKKYHSNLTHEIKEKIGGRKNDEGFKEDGILFHQRPLRSQKHLVGNCTFEPNKTKCQSSAIPFELYRLHQWINTVEYNGHKLHVDERKLVFNFLIEKEKPSFKDIRKAINKLDAIYKFNYKDEDKIVGTHTISNLCNKKFFGKKWFDFTEKEQEDIWHVLYFFDSKDKVKEYAIKNWGFDETQAEAISKFNLKDKYASLSRKAINNILPFLGMGFQYDIAVVLGGIKNAYGQNWETLNSSDKGLILDNVYEIVRSNLKGGFIEPLKYFLKADLHLKDKQLTKLYHHSANIDETVLLEKLPVNANADKEIQAIRNPVVITALFEIRKLVNEIVDEYGKPDEIKVELARNLKASKSGRREERNRQQKLERENDRVKVELNNLGKHISHDNLLLYKLWEECKRTCPYTGRSIGVTQLFSGEVQIEHIHPWSKSLNDSFMNKTLCFADENRAKGDKTPFEFYSLQGENKWHEVKERALKLFSDTAQYPNSYQKFKRFVQQKFDDDFASKNLNDTRYISKEAKNYMSKICKKVSVSPGQMTANLRQKWGLNAILNPEDKTKTREDHRHHAIDALVMACGTVSHLQKLSEWNRYDRKPENKNFPLPWDGFVKDAEGAVDKILVSHKKLNNIITVRTHKTEKNGQVYRNVGVAARGQLHLETVYGQNKNCNEDEYVYRVDINKLSFAQLTNILDANLKKVIIDDVLTKFSNDEIQFFDKMIDKEKNLDKSKQKQIKEKVDKILKENSFFMPNEGKRYLRLNKKEPENFNRTPVPIKKVRVKKVLSKAERLKEDIKQFVDPNSNHHVLIYKDEKGNLKEDVVTFWTAVERKRQKQKVFQLPANGTSIVTTLQINDMFLLGLKEEKINWENPDYDILKECLYRVQKLTAGDYFFRKHKSSTITDDDYKQIRGFGEGKTGWFSFIPIKVKISVSGKISKI

SEQ ID NO: 15194 - protein, 1435 aa, unidentified
  REGION 1..1435: note = Cas Enzyme sequence
MNKIKLGLDIGTNSIGWTVIEKQDGVYDFLKKEDKNGELIPSKGSYIFSKSVDASENSKASERRGFRGARRRIDRIRLRKITTLKVLDEFGLCPKFNAGELNRWKNKKIYPCENNKFIDWQRTGKKNGNSHTEKLKQPYYLRHLAATKTGMMETENGKLQLGRAFYHLSQRRGYLSNSEEEQSDDKIDLFKSAILNLVENTYDSVYFKTGLEVIFDQYKSDVKVKSLNAKISKELKKEIVFENIKSFINVEFNKPENLGKVMSEIGNLSSEIKGFPTKEGFPTEEVFPTMGCYFYSIYNSVNKKTGLINKIRGRYTHREEHYKEEFNYICKIQNITGDFKKELDDAIFYQRPLKSQKGLVAKCTLEPKRKRIATSHPLFEEFRMWESINRIKIKREAGGKLDFLNKEEKELIKKDFLQITDFEFGKIANRLSEGQSYNYIKRPTEVYLKGKKIETESDAVISFNFPMDKKFSACPTIASLKRVIGEKAYNNMKLLNTGYGNEKGKKQLSIEDVWHCLQMDTFGTKDRKTVRTEFAKNHLKLDEKALENFVKIKLVKGYGSLSKSAIKKIIPFLEKGEIYTNAVFLANVTEVLGRKISDNEQKQISEIIKEALDDFRIEKLNKGIVNNYVNKFKENKDSLGDNVFSIEEHKKGLDSEMVNWIGELQLNALKKEELSNITNTCWKLFHEAVYDKSPKEITYLSSKTVPEFIYDGLKAVFLNDKIDVTKLYHPSAMEAYAKADRKLGNPEITSIKNPVFDRAMHQVKRLCNELIRKELVDKDTEVNLEVAGEINSASYRRALTIWQKEQEDIRTWAKNKIIECYPIEDRKNKKPSDNEISKYILYSEQNRLCLYTSETISPRNFLDKQTTYDIEHTIPRSKNNDNSLKNKTLANYDFNRNFKKEILPALLNLNFNGKEIDKETILNNRDKYLKSYSFSGKKPDVNIVWTVSLSDLKFDYKKFKNAAKAITDAVAHDEVMTKAHYTKMKLDYLRVKYRNFEMEEINNQFTNANLVDTRIITKYARAYLNSYFNKVNVVNGKITDTLRKIWGLQGEEETKDRSNHIHHCIDAIVVACVEKGTANRISELYHKYENDYFRGNSNPRIHAKEPMNNFVEQLKNLHKEVLIYHKQTDRIKPLLLNTQKENAKKLNLRGRLNSQNPYAHIKKNDELIFAQRKPITKISDKDIENIIDDGIKKRILSFASEVDLEAFIKESSKAGFMILPKYFDKEKQKDISEMIIKRLRLKSSKSNLKDYKKIREIDRKQTIDNKFDHKHDYYYDKDSYTNYEARIYGDFIPNEKGKFKNREYILINHHNIVKNIFEIEKTIPILRLHQDDMFLVFDLNPKEEIDWNNKIDLQSRLFKIVKFDENGIIVLARHNYAGGSVDNAIAIKTENDLTDITQVVLRRSPSTLRVIPAQVDALGKINVGFSKNFVNLNSM

SEQ ID NO: 15195 - protein, 906 aa, unidentified
  REGION 1..906: note = Cas Enzyme sequence
VNETKRLVNELIAQQGKFDQIRVELGRDVKNSKTKREELGYKIRENDKKNEKAKELLIEFGLRQSRENIQRVLLYQEMPISICPYTNKTINISDLLGRENKFQIEHIIPKSISLDDSFANKTLCDSKFNGLKGNRTPHDFYEINKDPNLWGGAKSWEEIERRAFKVLPYPKAKRFVSKTKFDSNDFIQRQLNDTRYISKKTSEILSQVCSDVRVMPGSLTAELRRLWGLNNILQPIMTVDIPNLHIEENKHIPHYVVLDIDKKPVLSQRIYYDRPITNENETLLSGSIEKGVFKSKEQYVKFQVDAPDLANGDYWAKLVLSNPKNIVQVFKDKPSTLENEIVLRGKIEKEKFKNDGLNAMNATGKENGAYWATFSITNKDFKKQVKEEQPKKNGKQILLFGEVKEGLFSSYIYKCEAEIEDGKYWLIIDVDFEKVSFEKALNERPLVKENQILIQGTTNDENIFVSDMDNQHHFEMEEGKGKYYVLFDIVSEVNEFSPVKTTKPVLEEGQTIVEGITWVDKYTGEIKFDPIKNREDHRHHAIDALVIALTKESFFQRLSKQNASNENKKRGNEHEKEHLDFPEPWNDFHTDAKKVINGILISHKQNKSILTKITKKITKNGQTFKSVGMAVRGQLHKENLYGFRTPPSGESAYHIRRSVESLKTDKQLEKIVDVKIKEIIIKARKAEILLDKEIERLSKQLKSPKNTEIEEKEIKEKIEALRTKIKSLYTLPNKNGEPVPIKKVRVAEEMGNAQQLKSTIKQYVNPRNNHHIVIYKDEKEELKDDITNFWKVVERVKQKDEIYKLPEIEIGKPAPKELVLTFQENDMFLLGLSNDEFNDNKQDFTFLSNYLYRVQKISDGDYSFRHHLASTVTNKMEEVRIASIKKYQEMNPIKVKISSTGKIEKL

SEQ ID NO: 15196 - protein, 1128 aa, unidentified
  REGION 1..1128: note = Cas Enzyme sequence
MAKILGLDLGTNSIGWALIDDKQNKILGIGSRIFPMGVENLGEGEGREMSKNAGRTGARGVRRQFFRRRLRKKILLKALTENKMCPMVVSDFEDWKKTKEFPSEKLANWFAINPYELRQKALNEKLSLEEIGRIFYHLIQRRGFLSNSRKGGNDDGTIFKGNLKEGKIGIDDTLESIEGKTLGSYLYEIFPKQNQPFQDGLERIRNRYTTRKMYVDEFELIWNKQSQYHANLNEDLKTLFGGRKLDGYKEDGILFHQRPLRSQKHLVGYCSFEPTKTKCPVSAIPFEQFRVWQWVNTIEYNGKKIPHQDKDKIVEFLYANEKPDFKRIRKVIGKESAEFKFNYKDEDKIVGTHTISNLLNKKYFGKKWFEFSDKEQEDIWHVLYFFDSKSNLKEYAFKNWNFTDEQADVISRFNVKDGYSSLSRKAITNILPFLKIGFTYDVAVVLGGIRNVFGSDWEKLSDEKRNYLIDNVEGIVRSKTKGGFIDVVKDILRNDYSITDNQLRKLYHHSAAIDVSELLEKLPVDSVADKEIQKIKNPIVITALFELRKLVNELIDEHGKIDEIKVEMARDLKISKSERYKIRRNQHRLEKENDRVKAEVLKYTNLSHDTILKFKLWEECKRTCPYTGLSIPINELFTNKWQIEHIHPWSKSLNDSFANKTLCLGTENIKKGNQTPFEFYGNDEVSWSAIKERALKLFSDTKEYPNAYQKFKRFVQQKFDDDFSSRQLNDTRFISKEAKNYLSKVCKNVMVSPGQATSNLRQKWGLNNILHDENAKTREDHRHHAVDALVMACTKLSYVQELSKWNRYNRTYDLKQFPLPWETFSYDAEKAVEKILISHKKVSNDITVRFKSVEKNGKKHTNKGVAARGQLHKEFIYGKRIAPFIGEAYHIRKPIGSLETEKHIEKVVDVTIRNLIYKKVNELGGFINGKIPNNTFFTVDENGNKQPQILLPNKNGQPVPILKIRIQETINKAKQLKKDSNQFVNPRNNDHVLIYETIDGNLEKDVVSFWEVVERKKEGLNKIKLPSDGKKIINTFKENDMFILFKNEDEINWDSSIDLSDNLYKVQKIAGADYFMEICFRKHNDSRDDKNAKGDYVYIKGFGEGKTGWFTFNPIKVKISVSGKISKV

SEQ ID NO: 15197 - protein, 1504 aa, unidentified
  REGION 1..1504: note = Cas Enzyme sequence
MGNYFLRSFKNSYKIESDMAKILGLDLGTNSIGWAIVDKDGSEFSLVDKGVRIFSEGVKSEKGIESSRAAERTGFRSARKIKFRRKLRKYEILKVLSKNNMCPLSVEEVEEWRKSSFKKYPLNPEFLKWLRTDEDENINPYVFRDRASKQKVSLFQLGRAFYHIAQRRGFLSNRLDQSAEGILEEHCPKIQASIEDLISKEEIITDLKEYFLETGILDANEKTGFAKDLDEGDKKLVSLYKSMFTIIKNNENNFEKGKEEIIARLNKKDVLGTVKGKIKDISQAMIDGNFETLGQYFFSLYNKSKIRNQYTSREEHYLEEFNIICQKQGIGEIIVDEMLPEKKYCGLAKDLYKAIFFQRPLKSQKGLIGKCSFEKSKTRCAISHPDFEEYRMWTYLNTIKIGTQSEKTLRFLSQEEKISLISKFLRKKDNFNFEDLAKELIPKGSTYGFYKSSKANEVNYLFNYKPYDTVTASPVSASLKNIFGEDWKTKTISYKTKNSKGIEVNRTVDYKDLWHLLSVSTSDIYLFQYAKEKLGLDDKNAKAFSKIRLKKDFASLSLNAITKILPYVREGLLYSHAIFMANIESIVDESLWNDNNQRKFIQDKIAEIIETFTYEKSKLEIINGFIKEAKNEGFYYSKEAEKSFRQSLSSKLETFHKNFNIDNEEDRFVILDDLFPIFIQQLKDYEYIKVQRLDEKVLDFIKGKNDDGEIFCTNEKRINKLYHPSDIEVFKKKIIKDEFGNEKVVLGSPLTSSIKNPMAMRALHQLRKVLNTLIFEGHVDEKTIIHIEMARELNDANKRKGIQDYQRDIEKNRKDYIEEIKKDYKAAKGIDIEPTEDDILRYQLWIEQDRKTIYEEQYTNISIYQIIGSDPDYDIEHTIPRSRSQDNSQLNKTLCSKFYNREIKKNKMPIELGNHSDILDRIEPWRKKYLALEYEINNISKSIKAATTKEQKDRKIRLRHKLNLEKEYFKGKYERFIWEEPKVGFKNSQIPDTGIITKYSQAYLKSYFKRVESVKGGMVAEFRKIWGIQESFQENDKKYFHEKDRSKHTHHTIDAITIACMTKDKYDALANAWTHEDKGQLGEARKLLAASKPWKTFKEDLKKIEEEILVSHYTPDNVKKQSKKIVRIRGNKQFRDENLLDKRGNTIPIFGKSLNEVGIRSKVEGKDYFKIQKNNESLYYEYLFDKSGNIIYKKIPIFKQGDTIRGSLHQDSIYGAIKNPLNTEEIRYVIRKDLESVKASDVENIVDEMVKEKVKEAIANKVLLISSNPQQKNKLAENQKVWMNQEKGIPINKVRLYANSVKNPLEIKEHSLLSKSRHEHKQKVYGQNDENYCMAIYELDGKRDFELINNFNLAKLIKNGQGFYPLHKQKEVKGIKNLIPIAKSNGRDIVLKRGQQVVFYDKETETPKDITEVLDLKGRIYIIEGLSIQRIKSGNNEFEYGVIMLRYFKEARKADEIKKDNFKPDGIFKLGENKPTRKMNHSQFSAFIEGIDFRVLPSGKFEKI

SEQ ID NO: 15198 - protein, 1080 aa, unidentified
  REGION 1..1080: note = Cas Enzyme sequence
MSKNAGRTGARGVRRQFFRRRLRKKILLKALTENKMCPMVVSDFEDWKKTKEFPSEKLANWFAINPYELRQKALNEKLSLEEIGRIFYHLIQRRGFLSNSRKGGNDDGTIFKGNLKEGKIGIDDTLESIEGKTLGSYLYEIFPKQNQPFQDGLERIRNRYTTRKMYVDEFELIWNKQSQYHANLNEDLKTLFGGRKLDGYKEDGILFHQRPLRSQKHLVGYCSFEPTKTKCPVSAIPFEQFRVWQWVNTIEYNGKKIPHQDKDKIVEFLYANEKPDFKRIRKVIGKESAEFKFNYKDEDKIVGTHTISNLLNKKYFGKKWFEFSDKEQEDIWHVLYFFDSKSNLKEYAFKNWNFTDEQADVISRFNVKDGYSSLSRKAITNILPFLKIGFTYDVAVVLGGIRNVFGSDWEKLSDEKRNYLIDNVEGIVRSKTKGGFIDVVKDILRNDYSITDNQLRKLYHHSAAIDVSELLEKLPVDSVADKEIQKIKNPIVITALFELRKLVNELIDEHGKIDEIKVEMARDLKISKSERYKIRRNQQRLEKENDRVKAEVLKYTNLSHDTILKFKLWEECKRTCPYTGLSIPINELFTNKWQIEHIHPWSKSLNDSFANKTLCLGTENIKKGNQTPFEFYGNDEVSWSAIKERALKLFSDTKEYPNAYQKFKRFVQQKFDDDFSSRQLNDTRFISKEAKNYLSKVCKNVMVSPGQATSNLRQKWGLNNILHDENAKTREDHRHHAVDALVMACTKLSYVQELSKWNRYNRTYDLKQFPLPWETFSYDAEKAVEKILISHKKVSNDITVRFKSVEKNGKKHTNKGVAARGQLHKEFIYGKRIAPFIGEAYHIRKPIGSLETEKHIEKVVDVTIRNLIYKKVNELGGFINGKIPNNTFFTVDENGNKQPQILLPNKNGQPVPILKIRIQETINKAKQLKKDSNQFVNPRNNDHVLIYETIDGNLEKDVVSFWEVVERKKEGLNKIKLPSDGKKIINTFKENDMFILFKNEDEINWDSSIDLSDNLYKVQKIAGADYFMEICFRKHNDSRDDKNAKGDYVYIKGFGEGKTGWFTFNPIKVKISVSGKISKV

SEQ ID NO: 15199 - protein, 1447 aa, unidentified
  REGION 1..1447: note = Cas Enzyme sequence
MAKILGLDLGTNSIGWAIVDKENNDFSLVDKGVRIFSEGVNIEAKTNSESSKAAKRTEFRSARKLKYRRKIRKIELLKVLSDNNLCPKLSDDELYDWRYKKVYPQNDEFRIWLSTDSQDDEAERKKQIKNPYSFRFKAAKENLNLNNKEDRYVLGRAFYHIAQRRGFLSNRLDSSDNSIIEEKNSEIASIINDATSIVEFSDLFLEFLSSYDKEDTSNKPLFTLSRAFNAIIKENSNLVYTDLKEKLNERLNKKEFLGPVKRAISDLTEKIQEEKCTTLGEYFYILYQKSEKIRGEYTHRIEHYLTEFNFICDKQNISTEIKEPIEKAIFFQRPLKSQKGLVAKCPLENRKACVPISHPDFEEFRMLSYLNNVKIKLPLDEKLRLLDEDEKEQIQSLFFRKKLNFDFLDIAKKLTPKGLTPKYYKDKEISNENVLFNYNLGSNVAGCPTIANLIDVFGSDWKEYLLSNFVKNTKVESNIKVQKSIDDIIDDVWHVLFRFDNEELLKQFALENLNCDEKTATKFSKIKLKQDYGSLSLKAIRNILPYLRQTLIYSHAVFLANMKNILPAEIWSNEENRSIIDNEINSIIENYKLYSNNIDIVNGLIKNVKKENGTWSSSNDFVAEAYRNGLIKQVKDFFGTKKWSETSEIYQNNILAECFDLFSNQMKLNLGRGEFAKKQTMDEILKTFLSDNFNVTEENLKKLYHPSAIEVYKKAKRSDEDGKKYLGSPLISSIKNPMAMRSLHQLKKVVNQLIKDNMIDEDTLIHIEMPRELNSSNERVAIRQWNEDLKNRRNKYSEDIKSIFRGEIIIEGCNDSNPNYNDYEPSETDILKYQLWIEQNKVCLYTGKTICLSNFIGNNPKFDIEHTVPRSRSLDNSQQNKTLCCATYNRQTKKDKIPFECANHDEILPRIKHWYAKYKGLEQQIKDLSKKVKAASTKEKRDKYIIERTKLRFEYSYYLKKYKSFNMEEVPEGFKNSQSVDIGIISKYGNLFLKTVFNKVYPIKGKTTANLRQMWGLNEKSRDNHAHHAKDAVVIACCTNDINDALANYYHNYEQHEFFGKPKPSFSHRIPWEGFHKDVDNFDNNTLISHHTPDNLPVQSKKAIRKRGIIQRNENGEIKYKQGDTVRGALHKESFYGAIKREELNKKTGETEEVIKYVKRQAIELFKDSDLKNIVDDKIKEIVINGREQEKHIKKEIEELKKQLKNIKEDEEQPIKEVIQVLEHKIKNELYVLPNKGGNPVPIKKIRYYTSDVTNPLFIKKHRDASRHEHKQFYHAKNDGNYCMAIYEGLDKKGKISRSNQLINIIDAGKYFKLSNEDKKQYPIAPEKDENLNPLKYVLTKGKMVLIYDKSPTELFEMSEEKLLERLFEITQLDVEDSCIKLMHHSEAREKKKLTPFMGLKTGMKGGKNIGEHKKFPWIKIGVNSFDCLVEGYEFILTPTGKIKFLK

SEQ ID NO: 15200 - protein, 1121 aa, unidentified
  REGION 1..1121: note = Cas Enzyme sequence
DLGTNSIGWALIDDKQNKILGIGSRIFPMGVENLGEGEGREMSKNAGRTGARGVRRQFFRRRLRKKILLKALTENKMCPMVVSDFEDWKKTKEFPSEKLANWFAINPYELRQKALNEKLSLEEIGRIFYHLIQRRGFLSNSRKGGNDDGTIFKGNLKEGKIGIDDTLESIEGKTLGSYLYEIFPKQNQPFQDGLERIRNRYTTRKMYVDEFELIWNKQSQYHANLNEDLKTLFGGRKLDGYKEDGILFHQRPLRSQKHLVGYCSFEPTKTKCPVSAIPFEQFRVWQWVNTIEYNGKKIPHQDKDKIVEFLYANEKPDFKRIRKVIGKESAEFKFNYKDEDKIVGTHTISNLLNKKYFGKKWFEFSDKEQEDIWHVLYFFDSKSNLKEYAFKNWNFTDEQADVISRFNVKDGYSSLSRKAITNILPFLKIGFTYDVAVVLGGIRNVFGSDWEKLSDEKRNYLIDNVEGIVRSKTKGGFIDVVKDILRNDYSITDNQLRKLYHHSAAIDVSELLEKLPVDSVADKEIQKIKNPIVITALFELRKLVNELIDEHGKIDEIKVEMARDLKISKSERYKIRRNQHRLEKENDRVKAEVLKYTNLSHDTILKFKLWEECKRTCPYTGLSIPINELFTNKWQIEHIHPWSKSLNDSFANKTLCLGTENIKKGNQTPFEFYGNDEVSWSAIKERALKLFSDTKEYPNAYQKFKRFVQQKFDDDFSSRQLNDTRFISKEAKNYLSKVCKNVMVSPGQATSNLRQKWGLNNILHDENAKTREDHRHHAVDALVMACTKLSYVQELSKWNRYNRTYDLKQFPLPWETFSYDAEKALEKILISHKKVSNDITVRFKSVEKNGKKHTNKGVAARGQLHKEFIYGKRIAPFIGEAYHIRKPIGSLETEKHIEKVVDVTIRNLIYKKVNELGGFINGKIPNNTFFTVDENGNKQPQILLPNKNGQPVPILKIRIQETINKAKQLKKDSNQFVNPRNNDHVLIYETIDGNLEKDVVSFWEVVERKKEGLNKIKLPSDGKKIINTFKENDMFILFKNEDEINWDSSIDLSDNLYKVQKIAGADYFMEICFRKHNDSRDDKNAKGDYVYIKGFGEGKTGWFTFNPIKVKISVSGKISKV

SEQ ID NO: 15201 - protein, 1470 aa, unidentified
  REGION 1..1470: note = Cas Enzyme sequence
MTKILGLDLGTNSIGWALRNTKIEGVKQIVDKGVRIFSEGVKSEKGIESSRAAERTGYRSARKIKYRRKLRKYETLKVLSLNGMCPLSIEEVEEWKKSGFKDYPLNPEFLIWLRTDEKSNINPYFFRDKASKQKVSLFELGRALYHIAQRRGFLSNRLDQSAEGILEEHCPKIQEVVEDLNSNEEVLESLKDYFFETGILVGNEKSGFVKDLDEGDKKLVSLYKSLQVILKKNETDFEKGKLEIIERLNKKDVLGKVKGKIKDISQAMIDGNFKTLGQYFFSLYNKERIRNQYTSREEHYLEEFIIICKTQEIGSINEDEKLPEKKFEGLANDLYKAIFFQRPLKSQKGLIGKCSFETSKSRCAISHPDFEEFRMWTYLNTIKIGTQNEKTLRFLTQEEKLKLVPKFYRKNDFNFEVLAKELIEKGASFGYYKSSKKDDYFYWFNYKPTDSVAACQVSASLKNIIGEDWKTKIFTYKTLNSKNEEVTKSVDFKDLWHLLSVATSDIYLNEYAKEKLGFDDKKAKAFSKIKLKKDFGSLSLSAIHKILPYIKEGLLYAHAVFMANIENIVDEDIWKDESQRKYIQTKIAELVENYTFEKSQLEVINGLIKECKLKEEYYSNEAESIYKKDLANKLVLFYKYNSIKNELDKKMILDNLFPIFIDQLKKYEFIKIQRLDEKVLEFLSGENETGQIFCTEEKGTDEDKEKKIANRLKKLYHPSDIEKFKKQIAKDENGKETGQIILGSPLTSSIKNPMAMRALHQLRRVLNTLILEGQVDENTRIHMEMARELNDANKRKGIQDFQNENKKFREDAIKEIKKLYFDECKKEVEPTEDDILRYQLWIEQGKCEIYEQGNNISICDIIGSNPAYDIEHTIPRSISQDNSQMNKTLCSQRFNREVKKQKIPIELSNHNDILPRIAHWKEEADNLSREIEIISRSIKTAATKEVKDKKIRRRHYLSLKRDYLQDKYDRFIWTEPKVGFKNSQIPDTGIITKYAQAYLKSYFKRVESVKGGMVAEFRKQWGIQESFMDENGFKQYKAKDRSKHTHHTIDAITIACMTKDKYDVLAHAWALEDEHNKKEAKKIIEEAKPWKTFKEDLKKIEEEILVSHYTPDNVKKQSKKIVRIRGKKQFIAENERDEKGKVILKKDTSGKIIYKLNEKGEKIPRFQQGDTIRGSLHQDSMYGAIKNPLNTEEIRYVIRKDLESLKANDIENIVDETVKGKIKQAIINKVLLLSSNAQQKNKMNGIVWMNEEKQIPINKVRIYANSVKNPLEIKEHSLLSKSRHVHKQKIYGQNDENYAMAIYELDGKREFELINNFNLAKLLKNRQGFYPLNKEKEVKGKKILYPIAKSNNRDVVLKKGLQVIFYDKAVENPKDINEILDFKNRIYIVEGLSINRVKSGNSFYEFGVILLRYFKEARKADDIKKDIYKPDGDFKLGDNKPTRKMSPGQFTAFIEGIDFKVLPSGKIEKI

SEQ ID NO: 15202 - protein, 1458 aa, unidentified
  REGION 1..1458: note = Cas Enzyme sequence
MAKILGLDLGTNSIGWAIRDTEIDGNQILDKGVRIFSEGVKSEKGIESSRAAERTGYRSARKIKYRRKLRKYETLKVLSLNGMCPLSIEEVDEWKKSGFKEYPLNPEFLKWLRTNEDENINPYFFRDKASKQKVTLFELGRALYHIAQRRGFLSNRLDQSAEGVFEEHNPQIQSLIEDLDDSKLILDELKSYYIDKGIIEEAEKGVFKKDLDEGEKKLKSLYNSLVTIAKKNEDDIVKCKEELLARLNKKEDLGKVKGKIKDISQAMLDGNYKTLGQYFFSLYDKLKIRNQYTSREEHYLEEFITICKVQGIDSIYEKAQLPEKKFDGLAKDLYKAIFFQRPLKSQKGLIGKCSFETNKSRCAISHPDFEEYRMWTYLNTIKIGTQSEKTLRFLTQEEKLKLVPKFYRKNDFNFEVLAKELIEKGASFGFYKSSKKNDYFYWFNYKPTDSVSACQVSASLKNVIGEDWKTKIFIYKSLNAKKEEVTKSVDYKDLWHLLSVATSDIYLYEYAKEKLGFDDKSAKAFSNIKLKKDFASLSLAAISKILPYIKEGLLYSHAVFMANIENVVDDKIWNDENEKAIIKKEISNIIKNDVFEREVLNVANGLIKKSKTESENYSEESKNIFKRNFEKALENLFEKRKDLEKDQSFINEVYLNFIEEIKKYDKERRFLPIPRLDEKVIQFLQGNNNDGVVYCSDKKKIKKLYHPSDIEVFKKKIIKDEFGNEKVVLGSPLTSSIKNPMAMRALHQLRKVLNTLILEGQIDENTRVHIEMARELNDANKRKGIQDYQNENKKFREEAIKKIKKLYFEECKKEVEPTEDDILRYQLWIEQNKCEIYENGNNISICDIIGSNPAYDIEHTIPRSISQDNSQMNKTLCSQRFNREIKKQKMPIELSNHLEILPRIAHWKEEAENLTREIEILTRSIKAATTKEAKDKKIRRRHYTTLKRDYLQGKYDRFIWHEPKVGFKNSQIPDTGIITRYAQAYLKSYFKRVESVKGGMVAEFRKQWGIQESFIDKNGFKQYKEKDRSKHTHHTIDAITIACMTKDKYDVLAKAWTSEDEQDKQKAKALMSEAKPWKTFKEDLEKIEEEILVSHYTPDNVKKQSKKVLRVRGKKQYVAEIERDEKGKAIPKKDGNGKIIYKLDKEGKKLPRFQQGDTIRGSLHQDSIYGAIKNPLNTAEIRYVIRKDLESLKASDIENIVDEMVKEKVKEAVENKVLLLSSNAQQKNKMDGIVWMNEEKQVPINKVRIYANSVKNPLEIKEHSLLSKSRHEHKQKVYGQNDENYAMAIYELDGKREFELINNFNLAKLIKQEQGFYPLHKEKEIKGKKVIVPVEKRNNRDVVLKRGLQVVFYDKEIENPRDISEIIDFKGRIYIIEGLSIQRIVRPSGKVDEYGVIMLRYFKEARKADEIKKEKYKPDGTFKLNENKPTRKMNHNQFTAFVEGIDFEVTPTGKIEKL

SEQ ID NO: 15203 - protein, 1157 aa, unidentified
  REGION 1..1157: note = Cas Enzyme sequence
MNKLIFGFDLGTASIGWVAVNDGKSINGAGVRIFPEGVNRNKKNQKESSLNSERRIKRQIRKQLYRRRKRKSELARVLMKYNMFPQMINLDSELKQVILNKELQTFFSINPYSCRAKAVQDIPIQLTPYELGRVLYHFSQRRGYRSNLLADTDDKETGALFSGKPEEGKTGIISTREGIEKFKTLGSFLNQLNPHSERIRNRYTERQMFIDEFNEVWETQSKFDFWKNILTNELKNQIANDILFFQRPLKSQKGLVGKCRFEPGKPRCPISSPEFELYRIWKTINSIKNGTISLDEKQRKAAFDFMVSKDKFKFGDLAKKLGTDVSQANFNYDNEQVLPGSNTLSKMRLAIGKKQWEEFTPEKIRMLWHDKYNATDKNWLKARLIKNYSLNEEQADKLLNFRLQQGYSGISTKVIRAALPYLEKGFAENEAILIAGISNCFGVRWQDMGAKEQNYIIDSSLDLLKQKSERTLPALREWFGKEFSLTEKELKKLYHHSDEENLNGEEKMRSPIVDKALTELQFLVNAMVVKYGKPDEIRIELSRDIKSSKEKRENTLIEQRRKETENNLIKKELDGLNLPHTAGRILKLKLYREIERKAGNVRCPYTGKSISISQLFSGEVNIEHIIPASRLPGMQLDNLTLCFVDENRAKSNKTPFEYYSSNPVLWEEIKNNAYHLLPYRKYIRFISDNHPELDDFINRQLNETRYISRKARARLQKQFPEIRVNVTQGATTAMLRHYWGLDSILQPNYQIGVLPDGEYLAVFDEKNVLVEAQRWNYDKLKDIEKALEKKGMIVYGNVVKGVFKPYKTRDDHRHHAIDALTIACTKVAYVQKIAEFESNDIKDYEKQIQFPQPWPSFWQDAKKAVSEILVSHKKRNKILTKSIVKRKVKGKLVIGEGLAARDQLHNDTFYGQYKDRSGKNYYHYRKPLNQITESAQVNKIVDEHVRKAVIEAILKADPGINIKEKYKVPNGAFFQKTESGRFTPLVFLPNKNGEPVPVKKVRIRDVMNNVVKIDEKINKWVDPDNNHHALIYQTYDGQLNESVVTFWEVVERKREKTSVYQMPPDGKKIIATLQSNDLFLLGIENTAIELSDQKTLCNHLYRVQKISHGDYNFRHHTASHLNDDRLLHRVRSASKLLALNPVKVIVDRLGTIKKATK

SEQ ID NO: 15204 - protein, 1194 aa, unidentified
  REGION 1..1194: note = Cas Enzyme sequence
MPFLLGVDLGTNSIGWALIDDLSKKIVDCGVRIFPEGVNRDNKGKEESKNATRRIKRQVRRQLFRRKYRKLLLAKYLMQHGMFPSIPNVSKSIQDLQLGNELKSFFHINPYECRSKAYLGEKLSLYELGRIFYHFAQRRGYKESIKDDSADTGVLYEGSAKDGKIGIIETSQKIEQYGTLGNYLYNEDPHEKRWRNRYTTRKMYTEEFEKVWAQQNKFYPSILTDEMKQKIGDATEGFLFFQRPLKPQKHLIADCTFESGKKRISDSTIAFELRRMHEFINSIRVDGLPLLTEQRAVLKELMQSKEKFEFSTIAQKLKINPTRFNYEHDKNVIGTKSISSLRKIFSPKIWDNKTLQEQEDILSIKHFAEDKAKTLDYLKNKHQLSDKQADQFIKFRPSKGYSSLSYKATLNILPFLEKDFIYNEAVLLGGIFNALGKEKWNSLSPSKINYIETNAIEIYHNMGADHFNIIKDWLQSECNLTEKQLQKLYHHSQLVSHGDGQSTNLPLPEETRNPVVQQALYELRKVVNTIIEVYGKPDQIRMELSRELKSSIEERDKLRLRQYENERENDEIKRELTDHDLPHTNAYIIKLKLYREVQKRAGKVACPYTGNAISFAQLWNGEVDVEHILPYSISLDDSLANKTLCFRYMNTRKGNKTPYNFFLSEFGQERWEEIKKQAYSLLPYLKWLRFIDEKPHTLEEFENRKLNDSRYISKVAKGYLEYICKDVSVTQGEVTAKLRHYWGLDNILNPCIRTEGIEEGEYYAAVDNNDKIIQLEKWQPDTKANKRTEEKLAKLGLVISGNIKKNTFYPYKTRNDHRHHVIDAITIACTKRSYLQNLSTMKGKLTKEEFETRELSFPEPWPGFHRSAETAVSKVLISHKSKHRITSQLSKTVVKNDKIFKVSASSIRGTLHGESVYGKRKDVYGNDAFHIRKPLSQINKRAQVDKIVDPAIKKLVEQAIIKAWQEENAVLFKAYQSEGLLVARGQHWEINNSNKTKYEVPAGAFFDIQRDETGKKIIGISPKVFLPNRNGNPIAIRKVRIKENSSGAVRLKDKINQWVEPGNNFGVLIFDDQSCEWQEKMITFWEAVERKKQNLPVFQLPPEGKSIITTLQINDMFIIGLQDEEVDWKNQVLLGNHLYRVQKLSSYYYTFRKANAATLDFANEEIPIQSFKRWKEKNPIKVKVSILGKIEGIK

SEQ ID NO: 15205 - protein, 1291 aa, unidentified
  REGION 1..1291: note = Cas Enzyme sequence
MAKILGLDLGTNSIGWAIRDTNKKGNQILDSNVIVFPKGVGEKEGKEFSMASERTKNRAKRKLYKRRKKRKTDLLKLLIENGFCPLTIDELTIWSEYKKGQEMKYPATNFEFTEWLKINPYEVRAKAVNQIVSKKELGRALYHMCQRRGFKSGRKDADAGKDLEQYKKEQEILAQSGFKTLGEYYYDLLQNDKKVRKTKFSTDDQEVNSSRISYVEEFNILMKAQNISKELSDAFFDAIFFQRPLKSQKGAVGKCTLEKTKTRCAISHPLFEEFRMYQYLNSIKVKERNSDKFVFLSEYPEYYKIAKDKFYRVSAKNFKFVDISKGINAAAKKASLLFEFNYNDKYPIVGSPTISKLIEVFDADDWTDCKKRIASKYKKQDNKTVDELVDELWHTLFFSGDFVNDITSEKVKSFIRDRFDISEENVNYFEAINLKQGYSSLSKKAISKILPFLENKIIYPYAVFFANIDTVIGKEKWEFNKEFIQDTIIDIISNYKTQTLKIDIVNGLVGDFIEEYDNSHFDYVLDEVDRNNVADKTKLFYGKYEWEKMSDESKNELLNEIEITFQEQLQKRRVGGYYLPKPRVDEIIKKFLIQEYKVSKEQADKLYHPSAIDAYPQSQDNLLGLPFTNSIKNPMAMRTLFYLRKLVNTLLKENKIAPDTEIIIELARELNDKNRRLAIERWQRERESENKKFREKLEEFAKDTNSKVTEADVLKYRLCQEQNGRCFYTNKTINCEKLLGTNPAFDIEHTFPRSKSFDNSLINKTLADKAFNQIKGNRIPQELEQEYINNFTLNIKDWEKKIDDLEEKIEQQKYFSKVASTVEQKNRAIQQRHYLKLELDYWKQKVYRFTATEIKPNFKNSQLVDTGIITKYSELFLKSLFQRVFPAKGSMVADVRKSWGLGEKDRNFHYHHAIDAIVLTCMDKSIRDGLAEAFKESEENRYQDKFKIAKPWQTFTEDVNHLKDNIIVVHTHKNNIEKQTVRKLRKRNKIQYDKKGNVIFEKGQGIRASLHKDTFYGKIERENEKNEKEFWFVIRKPINNNFSDADVTNIVDEGIKARILKHGLKNIRTEENWILLPSEKDEKGNEIKEMLIKNIRVKTKNKNLPKIKAQSHISQRNRKEHKEYYYATLENIFAMAIYETVDGKGKPPYKTISAYEFAKFNQGNNKLEIPVEQNIEILHKKTKVKVLVSLSKVLRVNQMVIFYENTPEELKTITKQELNKRLFKITEFEGDGRINLRHHAQGGADKDLKEESFLNFQSPAQKLRISLSNVKAIFEGKDFVLHPSGKIDFII

SEQ ID NO: 15206 - protein, 1118 aa, unidentified
  REGION 1..1118: note = Cas Enzyme sequence
MAKILGLDLGTNSIGWALIEDNQNKILGLGTRIFPMGVENLGDGEGEISKNASRTVARGVRRQFFRRRLRKQILLKALSENKMCPLEAIDFQEWKRNKRFPIEKLTTWFALNPYELRQKALIEKLSLEEIGRIFYHLIQRRGFLSNSRKGGSDDGTIFKGNPKEGKIGITETQKNIEDKTLGAYLFEIYPKENQPFQDGLERIRNRYTTRKMYVDEFELIWNKQAQFHTELTNELKTLFGGRKLDGYKEDGILFHQRPLRSQKHLVGNCSFEPRKTKCPISAIPFEQFRVWQWVNTVEYNGKKISQEEKEKIVEFLFANEKPEFKKIRKVIGKESSGFKFNYKDDDKIVGTHTVSNLSNKKYFGAKWFEFTEKEQEDIWHVLYFFDSKSNLKEYAIKNWNFTEEQAESISKFNVKDGYASLSRKAISNILPFLKLGFTYDVAVVLGGIKNVFGSDWEKLSDEKRNFFYDNVYEIVRSKNKGGFIEIIKDILRNDYNISDNQLRKLYHHSATIDATELLEKLPVGKDADKDIQAIRNPIVITALFELRKLVNELIDEHGKIDEIKVEMARDLKISKSQRNKIRKEQKRLERENDRVKARLLEERQRITHDNILLYKLWEECKHTCPYTGKPISVTQLFSGEVQIEHIHPWSRSLNDSFSNKTLCYADENRKKGNLTPFEFYGSDEANWSAIKERALKLFSDTKEYPNAYQKFKRFVQQKFDDDFSTRQLNDTRYISKEAKNYLSKICNKVTVSPGQATSNLRHKWGLNQILNDDNEKTREDHRHHAIDALVMVCTKVSYVQELSKWNRYNRGYDVKDFPMPWLSFWKDAEKAVNQILVSHKKVSNDITVRTHTTEKNGKKHTNLGIAARGQLHKETVYGKRTFNGEEAFHVRKPIESLETAKQIAKVVDESIRLLILKRVNELGGFVKDKVPANTFFIVDENGVKQPQIFLPNQNGAPVPILKVRVKESVGRAEKLKTNVNQWVNPRNNHHVLIYKDEQGNLKEEVVTFWTVVERKRTGQPVYQLPLDGKEMVTTLHINDMFLLGLNEDEINWENPDYKVLKEHLYRVQKTSQNDYSFRHALTSSVNNKNEEKRMGVKGIINNNAIKIKLSVSGKITKI

SEQ ID NO: 15207 - protein, 1457 aa, unidentified
  REGION 1..1457: note = Cas Enzyme sequence
MKNSRRILGLDLGTNSIGWAIVDQEGEEFSLSDQGVRIFSEGVASEKGIESSRAAERTGFRSARKIKFRRKLRKYETLKVLAQNDMCPLTIKEVEDYRKSGFKHYPSNADFINWLRTDEEENKNPYAFRDKASRDKTNPMEVGRALYHIAQRRGFLSNRLDQSDEGVLEENSPLVLSLIEDLENVLDVKESINNYFEEKGIFDVSQKTGYIKDQDEGDKVLIKLYKSLYAILSKGDESFEKTKEELIAKLSQKENLGVVKGAIHDLSAEMKEKGFETLGQLFYDRYSKTKIRKSYTSREEHYLTEFELICKIQGFDKIFETEKLPDKRFVGLAKDLYRAIFYQRPLKSQKGSIGKCSFEPARSRCAISHPDFEEFRMWNYLNTIKMAVNGDKLQFLSQEQKESIIPKFLRKKESFNFEDLAKELIPNKKSFGFYKSSKKANFAYWFNYNSYDSVAGCPVSASLKSVFGENWKSDEFRYKTLDSNGVSVDRSVDCHDLWHLLSTSSSDDYLIDFATSKLKLDAKQAKAFSKIRLKKDYASLSLNAIRKILPYTRNGLLYSHAVFMANLEKIVDKDLWNNPESRLEIQNIIGQLIENHTLENSKLEIINGMVKNLIEDGGSFSVEAEPIFKKELKEKLIGLRKRFKLENELTDLEEQLYPALKKQLTALKFEKIKRIDDKVKEFLLGENADGQVFCSDENRFSRMYHPSDIDKFQLKEVLDENKIRVRYELGSPLSTSIKNPMAMRAIHQLRKVLNTLIAEGKIDEHTHLHIEMSRELNDANKRKGIQDYQNEIQKERAKYIDEIKKLYLEETKKKVEPTEDDILRYQLWIEQNKQEIYEPSINGGKANSISISQIIGANPDYDIEHTVPRSRSQDNSQTNKTLCSKRFNRDIKKNLMPSELDNHALILPFVEHWKKEADSIKQEIGQLSKRIKGATTKEAKDKSIRKRHYLNLKKNYLKEKYDNFVRLEPKVGFKNSQIPDTGIITRYAQAYLKSYFKRVVSVKGGMVAEFRKQWGIQKSFIDENGQKQYNKKDRSKHTHHTIDAITIACMTKEKYDILASAWTLEDREDKKAAKALIEKAKPWKTFAEDLAKIEENILVSHYTPDNLKIQSKKIMRIRGKKQFVAEMEQDATGKLKPKTNANGKVVFKLNEKGEKIPRFHQGDTVRGSLHKDTIYGRVLDPESKEIRSVIRKSLESIKASDVDKIVDPEIKEKVRQAILEKVLKFSSSDQQANKIDKEIGIWMNKEKGVAIHKVRIYADTVKNPLEIKKHVEFSKSRHPHKQHVYGQNDGNYCMAIYEGKDKKGKIYRTTELVNNISAGDYFKTSFKNENNLPIVPETDSNGNLIKYLLTKGKMILMYNKHPEELFSMDVPMLYSRLYEITQLDVEDSCIKLLHHSEAREKKEITTFMGLKSGMKGGKNLDDHKNFPWIKIAPNSFDCLVEGIDFTISTSGKINFLI

SEQ ID NO: 15208 - protein, 1135 aa, unidentified
  REGION 1..1135: note = Cas Enzyme sequence
MTSSRKILGLDLGTNSIGWAIVDEGKEEILGMGSRIFPMGVENLGDGDGEISKNASRTGARGVRRQFFRKRLRKKVLLKALSENNMCPLTSEDFQEWKNKKVFPEEKLKMWFAMNPYELRDKALTEKLDLHEVGRVFYHLIQRRGFLSNSRKGGADDGAIFKGNPKEGKIGIDETNEKINDKTLGSYLNEIYPKDKAPFKSGLERIRNRYTTRKMYVDEFEQIWQNQEKYYQSFTKEMKQLFGGRKVEEDFSEDGILFHQRPLKSQKHLVGNCSFENNKIKCPISAIPFEEFRAWQWVNTVECNGKKITQGEKEKIVESLYSLPSSKDKVEFKAIRKVIGRIGAEYKFNYKDDDKVVGAYTISSLSNKKFFSNEWASFSEKEKEDIWHVLYFFDSKSNLKEYAIEKWGFDEVKAEAISKFNLKDGYSSISRKAINNILPFLKLGFTYDMAVVFGGVKNAFGEKWSKLTDLEMEFLMTNIPSIVRSKMKGGFIEPLKEILMNEYGLTEKELKKLYHHSESLKKEDILNKLPIGKEADKEIQDLRNPIVVTALFELRKLINELIDEHGSFYEIKVEMARDLKASKSQRNAIRSEQKRLERENDRVKGEVEKYTRVSHDNMLKFKLWEECKQTCPYTGVQIPLNKLFTGEIQIEHIHPWSRSLNDSYNNKTLCWADENRKKGDKTPYEFYSGDEANWEVIKHRALKLFSDTKEYPKAYQKFKRFVQQKFDDDFSSRQLNDTRYISKEAKDYLSKICRKVTVSPGQMTAVLRQKWGLNSLINEENIKTREDHRHHAIDALVLTCSKQSYLQELSKWNRYNRNSELNDFPIPWEMFRKQAETNVNSILVSHKRSKNVITVRSHKVEKNGETYRNLGVAARGQLHKETVFGKRKAPFAEEAFHVRKAIDSLTTEKQVLKVVDTKIRELIYKRIEQLGGFQKDKIPNNTFFIVDENGIKQPQIFLPNKNGAPVPVLKVRMKENFSGAEKLKDKINQWVNPRNNHHVLIYKDSDGNLKEDVVTFWTAVERKRNGDSVYKLPFDGAEIITSLHINDMFVLGYDNNKINLDEINSEQLKKSLFKIQTLSSGVYEFRLSTDSTQIKDTNSDVFRRIQSFGNGKTGWLTFNPIKVKISSSGKLAFAN

SEQ ID NO: 15209 - protein, 1194 aa, unidentified
  REGION 1..1194: note = Cas Enzyme sequence
ENLGVVKGEIHDLTSEMKERGFDTIGQLFYDKYSKSRIRNQHTSREEHYLAEFELICKIQELGQINENEKLPEKRFEGLAKDLYRAIFYQRPLKSQKSLIGKCSFEPTKSRCAVSHPDFEEFRMWNYLNTIKMAENGGELLPLSQEQKEQLIPKFYRKKENFNFEDLAKELVPPKASYGFYKSSKKNEFDYWFNYQNNDSVSGCPVSASLKSILGEDWNTIELNYSTTNAKGEQVNRVVNYHDLWHLLSSSTTNDYLYDYAQKKLNFSEKQAKAFSKIRLKKDFGNLSLNAIRKILPYTRNGLLYSHAVFLANLDKIVDENLWNDLTVKAEIQQSIGRIIENHTFENAKLEVLNGVLKKMRNDDGHYSDAAESVYRDELKDGIKWLINKFKLNNSVDELESLLFPTLKNQLKKEEFIKIQRIDDKVMAFLLGENEDAQVFVSDENKLKKMYHPSDIEKFKLKVVYDENNQVVREELGSPISSSIKNPMAMRAIHQLRKVLNTLIQEGKIDKNTHIHIEMARELNDANRRKGIQDYQKELQNLREEYKKEIKKLYQEETGKDVEPTQDDILRYQLWIEQNKQEIYEPSINGGKAKTIGISQIIGANPEYDIEHTIPRSISQDNSQSNKTLCSRFFNREIKKNKTPIELQNHDLILPFVEHWKKEADSIDVEINILNRRIKAASTKENKDRSIRKRHYLSLKKAYLEDKYYNFIRKEPKTGFKNSQIPDTGIITKYAQSYLRSYFKRVESVKGGMVAEFRKLWGVQKSFRDENDKKHYEEKDRSKHTHHTIDAITIACMTKQKYDMLAHAWTLEDEARLPEARRIIESSKPWKTFAEDIAKIEEEILVSHYTPDNLKKQSKKILRVRGKKQFVAEVTTDEKGKKIPKTDANGKIIYKLNEAGQKIPRLQQGDTVRGSLHQDSIYGRVLDPETKEIRSVIRKSLESLKANDIEKIVDPEVKEIVKKAVADKIIIMSSNTQQANKIDKEIGVWMNKEKGVAINKVRIYADSVKNPLQIKKHAESSKSRHEHKQFVLGQNDENYAMAIYEGVDKKGNAKRVYEILNNIDAGKFYRLSNKDKNDTLIPQSHLETNYPLSYIVKKGDLILFYEKDVEELYNMNSAELGKRLYKLAKFDAQGRLTFRFHKEARQASDLKEVYQVDFNAPFEQIRLQVSKLNILLQKKDFDFSPSGKIFFKKK

SEQ ID NO: 15210 - protein, 1131 aa, unidentified
  REGION 1..1131: note = Cas Enzyme sequence
MENSRKILGLDLGTNSIGWAIVDEVNNKILGIGSRIFPMGVENLGEGEGREMSKNASRTGARGVRRQFFRRRLRKKVLLKALSEHNMCPLTENEFENWKHTKKYPSETLAAWFALNPYDLRHRALAEQLSLLEIGRIFYHLIQRRGFLSNSRKGGTDDGAIFKGNPKEGKIGITETQKSIEDKTLGSYLNEIRPKENVPFQQGLERVRNRYTTRKMYVDEFEKIWDFQAKHHSTLNSNLKQFFGGRKLDGYKEDGILFHQRPLRSQKHLVGNCTFEPNKTKCPLSAIPFEEFRVWQWVNTVEYNGKKITAEEKLKIVDFLFANEKPDFKKIRKAIGKESAEFKFNYKDEDKIVGTYTISNISNKKFFGKKWFDFSDKERENIWHVLYFFDSKSNLKEYAIENWGFNEEQATAISKFNLKDGYSSISRKAINNILPFLKLGFTYDVAVVFGGIKNAFGEHWDNLSDEKRNFLLDNVESIVRSKIQGGFIDTIKEILVKDYGLTEKQLSKLYHHSASIQVMDLFEKLPTGKEADKEIQAIKNPIVTTALFELRKLVNELIDEYGKFDEIKVEMARDLKISKSQRQKIRRENQRLEKENDRVKERLNYEGIRITHDNILLYKLWEECKNTCPYTGKPISFAQLYSGEVQIEHIHPWSRSLNDSFANKTLCFADENRKKGNKTPFEFYGGDEANWSVIKERALKLFSDTKEYPNAYQKFKRFVQQKFDDDFSSRQLNDTRYISREAKEYLSKICKKIVVAPGQATSNLRHKWGLNGILNVEDDAKSREDHRHHAVDALVLACTKVSYVQELSNWNRHNRKPELKHFPMPWDSFRDDAENAVNQILVSHKRVNNTITVRTHKAEKNGVVHKNKGVAARGQLHMETVYGQRKAPFSEQAYHVRKSIDSISTAKHLEKVVDSKIRELVFKRIEFLGGFQNDKVPANTFFIVDENGIKQPQIFLPNKNGEPVTILKVRMKENFSGAEKLKDEVNQWVNPRNNHHVLIYKDENGNLKEDVVTFWTVVERKRNGYPAYQLPTGGKEIVTTLHINDMFLLGLKEDEINWEAPNYVLLKKHLYRVQKLSSKFYEYRLSSESSIQSNFHPYYVRIQSFGDGKTGWDSFNPIKVKISASGKIEKC

SEQ ID NO: 15211 - protein, 1137 aa, unidentified
  REGION 1..1137: note = Cas Enzyme sequence
MATVLGLDLGTNSIGWALVDDKKEKILGMGTRIFSEGVVNLGEGEGRETSKNASRTEARGARRQFYRRRLRKRYLLRKLAKNELCPLDYSSVKIWNRKEVFGDDRLLEWFKLNPYELRSKALAEEITLHEIGRIFYHMIQRRGFQSNSRSAGAENSQNSVIFKGDSKEGKIGISQTKEKIQLSKTLGSYLYELYPKDNQAYQNGLERIRNRYTTRQMYIDEFEAIWEHQKQYHPELTDKFKSELGGRKKDGYEQDGVLFHQRPLRSQKHLVGKCTLEPTKTKCPISAIPNEERRIYEWLNTLKYDKAGEPEQLTESERESIIKLLFSKEKVKFKAIRKVIDKTESYYQFNYKDDDNIYGSHTISNLSNKKFFGERWFELSEKEREDIWHVLYSFDDRDKLKQYALEKWRFTEEQADKISKFNLKDGYANLSRKAINNILPFLKQGNGYDIAVALGGIKNALGAKWYDYEQFLLDNVPEIVRSNIKGGYIKALKNVLKSECHVSDRQLTKLYHHSTSIKSNQVLERLPVSEEADKQILSIRNPIVTTALFEIRKVVNEITDLYGKPDQIKIELARDLKVSKSKRKEIRLEQKRLEKENNRVKDELAQLDQRPTSTNILKYKLWEECNKTCPYTGRNIEVNQLFSGAVQIEHIFPWSRSLNDSFMNKTLCFEDENRAKGNLTPFEFYSKQGESKWSEVKSRALSCFQNKPNYPNAYYKFKQFVKKKHDDDFISRQLNDTRYISKEAKNYLKIICDDVMVAPGQMTANLRHHWGLNTILDEVDSKTREDHRHHAIDALVMACSTRSHLQELSKWNRYDRSYELDNFPHPWDSFREDAETSVNRILVSHKKDKSILTVRMQSATKNGKKYRNLGVAARGQLHKEFVYGRRKAPNSQEAFHIRKPIDSITTEKQLQKLVDGTIRQLVYKRINALGGFKNGKIPEGTFFITDDQGAKIPQILLPNKKGNPVPVRKIRLKENIGGAEQLKDDQNNWVNPRNNHHVLIYKDYEGNLKEDVVTFWTVVERKRKGYPVYQLPPDGKEIVTTIQKNDMFLLELINEDLRWGEEDWTFLKSNLFRVEAVSSNYYEFRLHSNATKSKDINTGIYKRISSLGEGKNGWKTLNPLKVTVSVTGKIKIDNFQS

SEQ ID NO: 15212 - protein, 915 aa, unidentified
  REGION 1..915: note = Cas Enzyme sequence
QMYVDEFEKIWEIQAKFNQSLTLDLKEKIGGRKKDGYNSDGVLFHQRPLRSQKHLVGNCTFELNKTKCPISAIPFELFRIHQWINTIEYNGKLLNAEERKKAFDFLILKDKPSFKDIRKAIDKLDAAFKFNYKDEDKIVGTFTISNLSNKKFFGAKWFDFSEKEQEDIWHILYFFEDKSNLKEYAIKNWGFDDEKADVISKFNLKDGYASLSRKAINNILPFLELGEQYDVAVVLGGIKNAFGKSWDNLTDDKKSLILDNVPAIVRSNFKGGFIEHLKKFLVDEFSFSEKQLKKLYHHSINLNTAEILKKLPVNAEADNEIQAIRNPVVITALFEIRKLVNEIIDIYGKPDEIKVELARSLKASKSGRNEERRRQQKLEKENDRVKNEVNYLGKHLSHDNILLYKLWEECKKTCPYTGKSINVTQLFSGEVQIEHIHPWSRSLNDSFMNKTLCFADENRAKGDRTPFEFYGKQGEEKWSEVKNRALKLFSDTAQYPNAYQKFKRFVQQKFDDDFASKNLNDTRYISKEAKNYLTKVCEKVNVAPGQMTANLRMKWGLNSILNLEDNTKTRDDHRHHAVDALVMACSKVSYLQELSKWNRYNRTSELKDFPMPWENFRNDADKAIDAILVSHKKTNNILTVRTHKTEKNGKVYKNVGVAARGQLHKETVFGKRTAPFSEEAFHVRKPIESLTTEKQVVKVVDEAIRKLIFKRVNELGGYDKGKIPANTFFLVDENGVKHLQLFLPNKNGAPVPILKVRMKENFSGAEQLKSEVNQWVNPRNNHHVLIYKDENDNLKEDVVTFWTVVERKRKGFPVYQLPIGGKEIITTLHINDMFLLGLNEEAIDWENPNNEALKESLYRVQKLTSSDYFFRKHKSSTITDDDYKQIRGFGEGKTGWLNFNPIKVKVSVSGKIKKL

SEQ ID NO: 15213 - protein, 1097 aa, unidentified
  REGION 1..1097: note = Cas Enzyme sequence
LLYVRLSDGNFGQGLERKESWESRNWQDILENPIWKTNLFNRCKKKEIRDRKTNEVKGEKKIDTIVNDVWHVLFTYDKKSKQKEFAINYFGADDNESEAFSKIQLKQEYASFSIKALRNINQFLREGLIETYAVFLAKIPELIPDIWNNPEDQKLIRDEINYRINNFRETKRKQTIVNDLYKNFRDEFGRKDKTYLLDDKDKENTINKIISFYGKKTLSEKSNDEQEEIKEFVITNFKNCIHKNTFIKIKRVDKVIQDFFIEHPALGIDEEKANKLYHPSDIEKFKEPITKKDKDDNLIKDRNGNILEFLNSPISGSIKNPTVFRAMFQLRKVLDELIRTEKIDRETRVHIEVAGNLNDMNYRKAIEDWQAEREKENQHYKEIIIGLFKAEKNIDITDPEDDDIKKIKSWYDQYLLENDKNLFDLLPKDEKDPVKKYRLWREQEGRCVYTGKQIPLHKLFDGISFDIEHTIPRSKSNDNSLENLTICDATFNRQNKIGRIPFELGEEKHKEILGYIAHWQKKYKDLEKQIKKLAKQAAANKDNKEKHDKIVRDKHKLTFEKNYWSAKYSRFTMEEVPDGFTNRNLNDTRIISRYAQQWLKSYFDTVHSINGNITSDFRKIWGLQKEYDSKQRTNHIHHCIDAITIACITKDKYDQLSHAYQLEETGAKEVATKLKTESKPWKTFVPDLKKLNDEVIITHQFLDNLPKQTKKYLRVRGKKQYVVEYKKDLNGKYLLDVKGKRIIEKDDEDKIIYNLKDGKRIPKIQKGDTVRGQLHQETFYGAIKVAQRENNKILKDEQGEIIFEKDKEGNEIFYVIRKELEKLKKEDVEKIVDEEIKKKIKSIIGTQITFKKTGATIKHPIWQNEEKQIPIKKVRLFTNVKNPLLDFKKHRDPSKSSHKHKEQIYVTNAENYCLAIYEGENENRKVERISKLVNNIDAGKKFKLSNRNDENFPPLSDEKTGYINIATLKKGQMMLRNIMNESMEDILDLSLEEQLNRLFIIEGIDKDGIKVRYHNEARQGTELVKFMKEVISQQNIAENKLDKNGKVKESKITGPVGGVKVGEHKNFPYQKFKPGNFNAFISGVDFKITPTGKIEII

SEQ ID NO: 15214 - protein, 1293 aa, unidentified
  REGION 1..1293: note = Cas Enzyme sequence
LLTKQPKLGPVKQQISDLTEEIEKNNLKTIGQLFYNWHLEDKKIRKNYLGREEHYEAEFKEICKVQGIPENSEIYKEIYNGIFYQRKLKSQKGLVGKCTLEPKYPRCPVSHPEFEMFRALKFINNVKRKEGEEWRLLNDEEKKKIWHKFFRKKDQFDFKEIAKIINPNYPQTHKLEDDPDPKKEYFNYKGNATVTGCYTSGCLMEILGKDWKEKESWESRNWQDILENPIWKTNLFNRCKKKEIRDRKTNEVKGEKKIDTIVNDVWHVLFTYDKKSKQKEFAINYFGADDNESEAFSKIQLKQEYASFSIKALRNINQFLREGLIETYAVFLAKIPELIPDIWNNPEDQKLIRDEINYRINNFRETKRKQTIVNDLYKNFRDEFGRKDKTYLLDDKDKENTINKIISFYGKKTLSEKSNDEQEEIKEFVITNFKNCIHKNTFIKIKRVDKVIQDFFIEHPALGIDEEKANKLYHPSDIEKFKEPITKKDKDDNLIKDRNGNILEFLNSPISGSIKNPTVFRAMFQLRKVLDELIRTEKIDRETRVHIEVAGNLNDMNYRKAIEDWQAEREKENQHYKEIIIGLFKAEKNIDITDPEDDDIKKIKSWYDQYLLENDKNLFDLLPKDEKDPVKKYRLWREQEGRCVYTGKQIPLHKLFDGISFDIEHTIPRSKSNDNSLENLTICDATFNRQNKIGRIPFELGEEKHKEILGYIAHWQKKYKDLEKQIKKLAKQAAANKDNKEKHDKIVRDKHKLTFEKNYWSAKYSRFTMEEVPDGFTNRNLNDTRIISRYAQQWLKSYFDTVHSINGNITSDFRKIWGLQKEYDSKQRTNHIHHCIDAITIACITKDKYDQLSHAYQLEETGAKEVATKLKTESKPWKTFVPDLKKLNDEVIITHQFLDNLPKQTKKYLRVRGKKQYVVEYKKDLNGKYLLDVKGKRIIEKDDEDKIIYNLKDGKRIPKIQKGDTVRGQLHQETFYGAIKVAQRENNKILKDEQGEIIFEKDKEGNEIFYVIRKELEKLKKEDVEKIVDEEIKKKIKSIIGTQITFKKTGATIKHPIWQNEEKQIPIKKVRLFTNVKNPLLDFKKHRDPSKSSHKHKEQIYVTNAENYCLAIYEGENENRKVERISKLVNNIDAGKKFKLSNRNDENFPPLSDEKTGYINIATLKKGQMMLRNIMNESMEDILDLSLEEQLNRLFIIEGIDKDGIKVRYHNEARQGTELVKFMKEVISQQNIAENKLDKNGKVKESKITGPVGGVKVGEHKNFPYQKFKPGNFNAFISGVDFKITPTGKIEII

SEQ ID NO: 15215 - protein, 1565 aa, unidentified
  REGION 1..1565: note = Cas Enzyme sequence
MTKILGLDLGTNSIGWAVVDYERDYLKIANNRNVNEKFELRDKGVYIFKEGVDKDSYGNPQSRAASRTDKRSARRLKFRRKLRKYETLKALIKHKMCPLEMEDLEKWRQFKNPITGKLETFKHYPTNSDFIEWLQTDNQGEKNNAEDKKLRKSKTKNPYFFRNKAANEKINNLHQLGRAFYHIAQRRGFLSGRLDKSDIVFIEKVKAELYECIADTDNFTDLFFEINNFFNPRTSEDSNDENKELLKLQKKIENDFKKLKNDFKECKNYIVELLTKQPKLGPVKQQISDLTEEIEKNNLKTIGQLFYNWHLEDKKIRKNYLGREEHYEAEFKEICKVQGIPENSEIYKEIYNGIFYQRKLKSQKGLVGKCTLEPKYPRCPVSHPEFEMFRALKFINNVKRKEGEEWRQLNDEEKKKIWHKFFRKKDQFDFKEIAKIINPNYPQTHKLEDDPDPKKEYFNYKGNATVTGCYTSGCLMEILGKDWKEKESWESRNWQDILENPIWKTNLFNRCKKKEIRDRKTNEVKGEKKIDTIVNDVWHVLFTYDKKSKQKEFAINYFGADDNESEAFSKIQLKQEYASFSIKALRNINQFLREGLIETYAVFLAKIPELIPDIWNNPEDQKLIRDEINYRINNFRETKRKQTIVNDLYKNFRDEFGRKDKTYLLDDKDKENTINKIISFYGKKTLSEKSNDEQEEIKEFVITNFKNCIHKNTFIKIKRVDKVIQDFFIEHPALGIDEEKANKLYHPSDIEKFKEPITKKDKDDNLIKDRNGNILEFLNSPISGSIKNPTVFRAMFQLRKVLDELIRTEKIDRETRVHIEVAGNLNDMNYRKAIEDWQAEREKENQHYKEIIIGLFKAEKNIDITDPEDDDIKKIKSWYDQYLLENDKNLFDLLPKDEKDPVKKYRLWREQEGRCVYTGKQIPLHKLFDGISFDIEHTIPRSKSNDNSLENLTICDATFNRQNKIGRIPFELGEEKHKEILGYIAHWQKKYKDLEKQIKKLAKQAAANKDNKEKHDKIVRDKHKLTFEKNYWSAKYSRFTMEEVPDGFTNRNLNDTRIISRYAQQWLKSYFDTVHSINGNITSDFRKIWGLQKEYDSKQRTNHIHHCIDAITIACITKDKYDQLSHAYQLEETGAKEVATKLKTESKPWKTFVPDLKKLNDEVIITHQFLDNLPKQTKKYLRVRGKKQYVVEYKKDLNGKYLLDVKGKRIIEKDDEDKIIYNLKDGKRIPKIQKGDTVRGQLHQETFYGAIKVAQRENNKILKDEQGEIIFEKDKEGNEIFYVIRKELEKLKKEDVEKIVDEEIKKKIKSIIGTQITFKKTGATIKHPIWQNEEKQVPIKKVRLFTNVKNPLLDFKKHRDPSKSSHKHKEQIYVTNAENYCLAIYEGENENRKVERISKLVNNIDAGKKFKLSNRNDENFPPLSDEKTGYINIATLKKGQMMLRNIMNESMEDILDLSLEEQLNRLFIIEGIDKDGIKVRYHNEARQGTELVKFMKEVISQQNIAENKLDKNGKVKESKITGPVGGVKVGEHKNFPYQKFKPGNFNAFISGVDFKITPTGKIEII

SEQ ID NO: 15216 - protein, 967 aa, unidentified
  REGION 1..967: note = Cas Enzyme sequence
TYAVFLAKIPELIPDIWNNPEDQKLIRDEINYRINNFRETKRKQTIVNDLYKNFRDEFGRKDKTYLLDDKDKENTINKIISFYGKKTFSEKSNDEQEEIKEFVITNFKNCIHKNTFIKIKRVDKVIQDFFIEHPALGIDEEKANKLYHPSDIEKFKEPITKKDKDDNLIKDRNGNILEFLNSPISGSIKNPTVFRAMFQLRKVLDELIRTEKIDRETRVHIEVAGNLNDMNYRKAIEDWQAEREKENQHYKEIIIGLFKAEKNIDITDPEDDDIKKIKSWYDQYLLENDKNLFDLLPKDEKDPVKKYRLWREQEGRCVYTGKQIPLHKLFDGISFDIEHTIPRSKSNDNSLENLTICDATFNRQNKIGRIPFELGEEKHKEILGYIAHWQKKYKDLEKQIKKLAKQAAANKDNKEKHDKIVRDKHKLTFEKNYWSAKYSRFTMEEVPDGFTNRNLNDTRIISRYAQQWLKSYFDTVHSINGNITSDFRKIWGLQKEYDSKQRTNHIHHCIDAITIACITKDKYDQLSHAYQLEETGAKEVATKLKTESKPWKTFVPDLKKLNDEVIITHQFLDNLPKQTKKYLRVRGKKQYVVEYKKDLNGKYLLDVKGKRIIEKDDEDKIIYNLKDGKRIPKIQKGDTVRGQLHQETFYGAIKVAQRENNKILKDEQGEIIFEKDKEGNEIFYVIRKELEKLKKEDVEKIVDEEIKKKIKSIIGTQITFKKTGATIKHPIWQNEEKQIPIKKVRLFTNVKNPLLDFKKHRDPSKSSHKHKEQIYVTNAENYCLAIYEGENENRKVERISKLVNNIDAGKKFKLSNRNDENFPPLSDEKTGYINIATLKKGQMMLRNIMNESMEDILDLSLEEQLNRLFIIEGIDKDGIKVRYHNEARQGTELVKFMKEVISQQNIAENKLDKNGKVKESKITGPVGGVKVGEHKNFPYQKFKPGNFNAFISGVDFKITPTGKIEII

SEQ ID NO: 15217 - protein, 1336 aa, unidentified
  REGION 1..1336: note = Cas Enzyme sequence
FNNSITEDSNDENKELLKLQKKIENDFKKLKNDFKECKNYIVELLTKQPKLGPVKQQISDLTEEIEKNNLKTIGQLFYNWHLEDKKIRKNYLGREEHYEAEFKEICKVQGIPENSEIYKEIYNGIFYQRKLKSQKGLVGKCTLEPKYPRCPVSHPEFEMFRALKFINNVKRKDGEEWRQLNDEEKKKIWHKFFRKKDQFDFKEIAKIINPNYPQTHKLEDDPDPKKEYFNYKGNATVTGCYTSGCLMEILGKDWKEKESWESRNWQDILENPIWKTNLFNRCKKKEIRDRKTNEVKGEKKIDTIVNDVWHVLFTYDKKSKQKEFAINYFGADDNESEAFSKIQLKQEYASFSIKALRNINQFLREGLIETYAVFLAKIPELIPDIWNNPEDQKLIRDEINYRINNFRETKRKQTIVNDLYKNFRDEFGRKDKTYLLDDKDKENTINKIISFYGKKTLNEKSNDEQEEIKEFVITNFKNCIHKNTFIKIKRVDKVIQDFFIEHPALGIDEEKANKLYHPSDIEKFKEPITKKDKDDNLIKDRNGNILEFLNSPISGSIKNPTVFRAMFQLRKVLDELIRTEKIDRETRVHIEVAGNLNDMNYRKAIEDWQAEREKENQHYKEIIIGLFKAEKNIDITDPEDDDIKKIKSWYDQYLLENDKNLFDLLPKDEKDPVKKYRLWREQEGRCVYTGKQIPLHKLFDGISFDIEHTIPRSKSNDNSLENLTICDATFNRQNKIGRIPFELGEEKHKEILGYIAHWQKKYKDLEKQIKKLAKQAAANKDNKEKHDKIVRDKHKLTFEKNYWSAKYSRFTMEEVPDGFTNRNLNDTRIISRYAQQWLKSYFDTVHSINGNITSDFRKIWGLQKEYDSKQRTNHIHHCIDAITIACITKDKYDQLSHAYQLEETGAKEVATKLKTESKPWKTFVPDLKKLNDEVIITHQFLDNLPKQTKKYLRVRGKKQYVVEYKKDLNGKYLLDVKGKRIIEKDDEDKIIYNLKDGKRIPKIQKGDTVRGQLHQETFYGAIKVAQRENNKILKDEQGEIIFEKDKEGNEIFYVIRKELEKLKKEDVEKIVDEEIKKKIKSIIGTQITFKKTGATIKHPIWQNEEKQIPIKKVRLFTNVKNPLLDFKKHRDPSKSSHKHKEQIYVTNAENYCLAIYEGENENRKVERISKLVNNIDAGKKFKLSNRNDENFPPLSDEKTGYINIATLKKGQMMLRNIMNESMEDILDLSLEEQLNRLFIIEGIDKDGIKVRYHNEARQGTELVKFMKEVISQQNIAENKLDKNGKVKESKITGPVGGVKVGEHKNFPYQKFKPGNFNAFISGVDFKITPTGKIEII

SEQ ID NO: 15218 - protein, 1565 aa, unidentified
  REGION 1..1565: note = Cas Enzyme sequence
MTKILGLDLGTNSIGWAVVDYERDYLKIANNRNVNEKFELRDKGVYIFKEGVDKDSYGNPQSRAASRTDKRSARRLKFRRKLRKYETLKALIKHKMCPLEMEDLEKWRQFKNPITGKLETFKHYPTNSDFIEWLQTDNQGEKNNAEDKKLRKSKTKNPYFFRNKAANEKINNLHQLGRAFYHIAQRRGFLSGRLDKSDIVFIEKVKAELYECIADTDNFTDLFFEINNFFNPRTSEDSNDENKELLKLQKKIENDFKKLKNDFKECKNYIVELLTKQPKLGPVKQQISDLTEEIEKNNLKTIGQLFYNWHLEDKKIRKNYLGREEHYEAEFKEICKVQGIPENSEIYKEIYNGIFYQRKLKSQKGLVGKCTLEPKYPRCPVSHPEFEMFRALKFINNVKRKEGEEWRLLNDEEKKKIWHKFFRKKDQFDFKEIAKIINPNYPQTHKLEDDPDPKKEYFNYKGNATVTGCYTSGCLMEILGKDWKEKESWESRNWQDILENPIWKTNLFNRCKKKEIRDRKTNEVKGEKKIDTIVNDVWHVLFTYDKKSKQKEFAINYFGADDNESEAFSKIQLKQEYASFSIKALRNINQFLREGLIETYAVFLAKIPELIPDIWNNPEDQKLIRDEINYRINNFRETKRKQTIVNDLYKNFRDEFGRKDKTYLLDDKDKENTINKIISFYGKKTLSEKSNDEQEEIKEFVITNFKNCIHKNTFIKIKRVDKVIQDFFIEHPALGIDEEKANKLYHPSDIEKFKEPITKKDKDDNLIKDRNGNILEFLNSPISGSIKNPTVFRAMFQLRKVLDELIRTEKIDRETRVHIEVAGNLNDMNYRKAIEDWQAEREKENQHYKEIIIGLFKAEKNIDITDPEDDDIKKIKSWYDQYLLENDKNLFDLLPKDEKDPVKKYRLWREQEGRCVYTGKQIPLHKLFDGISFDIEHTIPRSKSNDNSLENLTICDATFNRQNKIGRIPFELGEEKHKEILGYIAHWQKKYKDLEKQIKKLAKQAAANKDNKEKHDKIVRDKHKLTFEKNYWSAKYSRFTMEEVPDGFTNRNLNDTRIISRYAQQWLKSYFDTVHSINGNITSDFRKIWGLQKEYDSKQRTNHIHHCIDAITIACITKDKYDQLSHAYQLEETGAKEVATKLKTESKPWKTFVPDLKKLNDEVIITHQFLDNLPKQTKKYLRVRGKKQYVVEYKKDLNGKYLLDVKGKRIIEKDDEDKIIYNLKDGKRIPKIQKGDTVRGQLHQETFYGAIKVAQRENNKILKDEQGEIIFEKDKEGNEIFYVIRKELEKLKKEDVEKIVDEEIKKKIKSIIGTQITFKKTGATIKHPIWQNEEKQIPIKKVRLFTNVKNPLLDFKKHRDPSKSSHKHKEQIYVTNAENYCLAIYEGENENRKVERISKLVNNIDAGKKFKLSNRNDENFPPLSDEKTGYINIATLKKGQMMLRNIMNESMDDILDLSLEEQLNRLFIIEGIDKDGIKVRYHNEARQGTELVKFMKEVISQQNIAENKLDKNGKVKESKITGPVGGVKVGEHKNFPYQKFKPGNFNAFISGVDFKITPTGKIEII

SEQ ID NO: 15219 - protein, 1336 aa, unidentified
  REGION 1..1336: note = Cas Enzyme sequence
FNNSITEDSNDENKELLKLQKKIENDFKKLKNDFKECKNYIVELLTKQPKLGPVKQQISDLTEEIEKNNLKTIGQLFYNWHLEDKKIRKNYLGREEHYEAEFKEICKVQGIPENSEIYKEIYNGIFYQRKLKSQKGLVGKCTLEPKYPRCPVSHPEFEMFRALKFINNVKRKEGEEWRLLNDEEKKKIWHKFFRKKDQFDFKEIAKIINPNYPQTHKLEDDPDPKKEYFNYKGNATVTGCYTSGCLMEILGKDWKEKESWESRNWQDILENPIWKTNLFNRCKKKEIRDRKTNEVKGEKKIDTIVNDVWHVLFTYDKKSKQKEFAINYFGADDNESEAFSKIQLKQEYASFSIKALRNINQFLREGLIETYAVFLAKIPELIPDIWNNPEDQKLIRDEINYRINNFRETKRKQTIVNDLYKNFRDEFGRKDKTYLLDDKDKENTINKIISFYGKKTLSEKSNDEQEEIKEFVITNFKNCIHKNTFIKIKRVDKVIQDFFIEHPALGIDEEKANKLYHPSDIEKFKEPITKKDKDDNLIKDRNGNILEFLNSPISGSIKNPTVFRAMFQLRKVLDELIRTEKIDRETRVHIEVAGNLNDMNYRKAIEDWQAEREKENQHYKEIIIGLFKAEKNIDITDPEDDDIKKIKSWYDQYLLENDKNLFDLLPKDEKDPVKKYRLWREQEGRCVYTGKQIPLHKLFDGISFDIEHTIPRSKSNDNSLENLTICDATFNRQNKIGRIPFELGEEKHKEILGYIAHWQKKYKDLEKQIKKLAKQAAANKDNKEKHDKIVRDKHKLTFEKNYWSAKYSRFTMEEVPDGFTNRNLNDTRIISRYAQQWLKSYFDTVHSINGNITSDFRKIWGLQKEYDSKQRTNHIHHCIDAITIACITKDKYDQLSHAYQLEETGAKEVATKLKTESKPWKTFVPDLKKLNDEVIITHQFLDNLPKQTKKYLRVRGKKQYVVEYKKDLNGKYLLDVKGKRIIEKDDEDKIIYNLKDGKRIPKIQKGDTVRGQLHQETFYGAIKVAQRENNKILKDEQGEIIFEKDKEGNEIFYVIRKELEKLKKEDVEKIVDEEIKKKIKSIIGTQITFKKTGATIKHPIWQNEEKQVPIKKVRLFTNVKNPLLDFKKHRDPSKSSHKHKEQIYVTNAENYCLAIYEGENENRKVERISKLVNNIDAGKKFKLSNRNDENFPPLSDEKTGYINIATLKKGQMMLRNIMNESMEDILDLSLEEQLNRLFIIEGIDKDGIKVRYHNEARQGTELVKFMKEVISQQNIAENKLDKNGKVKESKITGPVGGVKVGEHKNFPYQKFKPGNFNAFISGVDFKITPTGKIEII

SEQ ID NO: 15220 - protein, 1126 aa, unidentified
  REGION 1..1126: note = Cas Enzyme sequence
MTKILGLDLGTNSIGWAIVDDEQNKILGIGSRIFPMGVDNLGDGDGELSKNASRTGARGVRRQFFRRRLRKKILLKALSQHKMCPLIENDFDNWKKTKQFPSEKLKEWFVLNPYELRNKALSEKLTLEEIGRLFYHLIQRRGFLSNSRKGGSDDGTIFKGNPKEGKIGINETLESIQDKTLGSYLFEIYPKENQPFINGLERIRNRYTTRKMYVDEFELIWEKQKQFHTALNDDLKQFFGGRKTDGYKEDGILFHQRPLRSQKHLVGNCTFEPTKTKCPISAIPFEQFRIYQWVNTVEYNGKKITQEDKNKIIEQLLSNEKVDFKKLRKAIGKESAEFKFNYKDDDKIVGTHTISNLSNKKFFGKKWFELSEKEQEDIWHVLYFFDSKSNLKEYALKNWSFNEEQAVAISKFNVKDGYASLSRKAIGNILPFLKMGFTYDVAVVLGGIKNAFGSKWETLAQDKKIFITDNIEDIVRSKISGGFIETVKKVLRNEFDLNDVALKKLYHHSATIEATTILQKLPTNAEADKEIQSIRNPIVITALFELRKLVNELIEQFGVINEIKVEMARDLKISKSQRNSIRKDQKRLERENDRIKDRLEEEGQRITHDNILLFKLWEECKHTCPYTGVQIPLHKLFTGEVQIEHIHPWSRSLNDSFNNKTLCWADENRKKGNKTPFEFYGDDLGNWAAIKERALKLFSDTKEYPNSYQKFKRFVQQKFDDDFSSRQLNDTRYISKEAKDYLNKICKKVSVSPGQMTSNLRQKWGLNSILNDGNEKTREDHRHHAIDALVMACGKVTYLQELSKWNRYNRNYDLKNFPMPWETFRFDAEEAVEQILVSHKRLNNVITVRTHKTEKNGKTYKNVGVAARGQLHKETVFGKRTAPFGEEAFHVRKPIDSLTTQKQLEKVVDETIKNLILKKVNELAGFDKDKIPANTFFIVDENGVKQPQIFLPNKNGNPVPILKVRMKENIGGAEKLKDNINQWVNPRNNHHVLIYKDENGNLKEKVVTFWTVVERKRKGYPVYQLPSDGKEIVTTLHINDMFILGLNEDEIDWENPDYKALKESLYRVQKLSSKFYEFRLNTESSIQNNFQPFYIRIQSFGEGKTGWDTFNPIKVKISVSGEIKKV

SEQ ID NO: 15221 - protein, 1132 aa, unidentified
  REGION 1..1132: note = Cas Enzyme sequence
MKKILGLDLGTNSIGWALIENNIILGMGSRIFPEGVVNLGEGEGRETSKNASRTEARGVRRQIFRRRLRKRYLLKELAKHNLCPIAPSLIKDWNGTDIFKNKLIKEWFQFNPYELRAKAIQEEISLIELGRIFYHMIQRRGFLSNSRSASADVKETSTIFKGDAKIGKIGISDTLKSIEQNKTLGSFLHSIQPKESEPFSGELERIRNRYTTRQMYIDEFETIWEFQKQYHSSLDSNLKTILGGRKKDNYKEDGVLFHQRPLRSQKHLVGYCSFEPKKTKCKLSAIPFELFRIYQWVNTLSYDVNGVKKKITLEERKIIIALLLSKEKPSFKEIRKAINKLDGSYKFNYKDDDKIVGSHTISNLSNKKFFGNKWFDFSEKEQENIWHVLSFFDDREKLKEYAIKNWSFDKERAIKISKFNLKDGYSNLSRKAILNILPFLEKGFMYDIAVGLAGVKNTLSVNWEEHKQFVLDNVPEIVRSNLKGGYIEPLKNMLKNEFNCTDKQLEKLYHHSSAIETEKILDRLPVNLHADREIQKIKNPVVITALFEIRKLVNEIIDTYGKPNEIKVELARDLKASKSNRLETRKKQKELEKQNDRVKVELEKLNQRINHINILKYKLWEECNHTCPFTGKVITISQLFTGEVQIEHIFPWSRSLNDSFNNKTLCFADENRAKGNKTPYEFYSEQGDQKWEAIKLQSLSCFKTKLNYPNCYNKFKHFVKKKHDEDFISRQLNDTRYISKEAKNYLSKICTNVLVAPGQMTATLRHHWGLNSILNLEDDTKTRDDHRHHAVDALVMACSTRNHLQELSKRNRYNKNYDLKDFPDPWLNFRQDAENSVAQILVSHKKHKNLLTVRTHSTKKNGVVHKNIGVAARGQLHLDTVYGKRKDVFTKELSYHVRKPIIALTAAEIPKIVDIEIKKIFYKSIEELGLIINKKDRKPIIKTKEEKKLFEQLLNKSFFLPNKNGNPVPIKKIRIKKNFSNAEPLKEKMNQWVDLGKNHHVLVYKDIKGSLKEDVVTFWTAVERKKQGQNVCQLPKGGKEIVNTLQINDLFLLGLNENEIDWMQYDTKLFKQHLYRVQKLTSGDYFFRKHTSSKVTDKEYIQIRGFGDGKTGWFTFNPIKVKINSIGKIEKI

SEQ ID NO: 15222 - protein, 1135 aa, unidentified
  REGION 1..1135: note = Cas Enzyme sequence
MSKILGLDLGTNSIGWALIENTTILGMGSRVFPEGVINLGEGEGREISKNASRTDSRGKRRQFFRKRLRKRYLLKELAKHSLCPIPASLIRDWNGIEIFKNELLQEWLRRNPYELRAKAVSEKITLLELGRIFYHMIQRRGFLSNSRSAGSEVKESSTIFKGDTKIGKIGINETLQSIEKKKTLGSYLHSIFPKENEPFSGELERIRNRYTTRQMYIDEFEAIWEFQKNHHSELTNNLKTIIGGRKKDGYKEDGVLFHQRPLRSQKHLVGHCSFETKKTKCQLSAIPFEMFRVYQWVNTVSYDLNGERQKITPQEKEKIVALLLSKEKIKFKEIRQKINRLEAYYQFNYKDNEQIIGTHTINKLSNKMFFGKEWFNFSDTEQENIWHILSFFDDRDKLKEYAIKNWNFDEEKAIKISRFNLKEGYANLSRKAINNILPFLKLGFMYDIAVGLAGVKNVLGNSYKEHEQFVFDNVPEIVRSNLKGGYIEPLKQMMKNEFSCTEIQLKKLYHHSRSITTNEVLDRLPLGPEADKEIQKIKNPVVITALFEIRKLVNEIIDAYGKPNEIKVELARDLKASKKNRNDTRRKQQVLEKENDRVKGEIEKLGMRLNHKNILKYKLWEECNHTCPYTGQTITISQLFTSEIEIEHIFPWSRSLNDSFNNKTLCFTYENRAKENKTPYEFYSSQGDEKWEAIKLQALNCFKTKAKYPNCYTKFKHFVKKKHDEDFISRQLNDTRYISKEAKNYLSKICTKVLVAPGQMTATLRHHWVLNSILNKKDNTKTRDDHRHHAIDALVMACSTRSHLHELTKRNRYRKNHELKDFPDPWFNFRRDAEKAVEQILVSHKKTKNILTIRPHTTIKKGVKHRNIGVAARGQLHKESVYGKRKDVFTKELNYHIRKPLILLSAAEIPKIVDLEIKKIIYKAIEEIGLNIDDNRKPIVKTREDKKLFEQLLSKPFFLPNKNGNPVPIKKIRIQKKFSNAKPLKESKNQWVDLGKNHHVLIYKDFNGNLKEDVVTFWTAVNRKRKGKEVFQLPKDGKEMVTTLQKNELFLLGLKDDDIDWKNLNYNLLKKHLFKVQTLSSFFYEFRLSTDSTQNKDTKSKVFRRITSFSDGKAGWKTHNPIKVKVNSIGKIEKM

SEQ ID NO: 15223 - protein, 1434 aa, unidentified
  REGION 1..1434: note = Cas Enzyme sequence
MSRILGLDLGTNSIGWAIVDKYKEEKEFLLIDKGVRIFTEGVNIEPKTNSESSKAAQRTGYRSGRKLKYRRKLRKLELLKVLSDNKLCPKLSDEELKDWRYKKIYPNNEEFRLWLSTDNQNGELERKKQIKNPYAFRFKASTQQFNLDKQSDRYELGRAFYHMAQRRGFLSNRLDTSDNSIIEDKNNEIEEIIQQSNNSIDFLGTYDDFIKDYDKSDTNSKALFTLGRGFKIILNENTNVEFNKIKEKLSERLNRKEFLGKVKSAISDLSTKIEEANCKTLGEYFYGLHKEGIRIRNNYTHREEHYLYEFNEICDKQNLQTTLKSDIENAIFYQRPLKSQKGLVAKCPLENDKACVPISHPDFELFRMYSFLNIIKIKAEDDDKLRVLNADEKANIEALFYRKSKPNFDFVEIAKKLTPKHLNSGYYKDKNAKDFDILFNFGNYTNVSGCPTIANLRSVFGEDWKAYLIENFNKKNKDNSAKTEHQIIDAIWHVLFRFDKTDKLKQFVIDYLGCDENTASKFSKIKLKQDYGSLSLKAIRNILPYLEKGLLYSHAVFLANLKIVLPKDIWNNQENLKTINNEVFSIIDNYTIYKNKVDIVNGLIKNIKDKKETWNENNTFVIEVYKKEINKHIQDYFGDKRWGSFSEENKEEILKECFELFSAQMKLNSGRGEFIKKETLDERVKDFLRDNFNVSADKLKKLYHPSAIEVYDKAKRSDKDGKLYLGSPLISSIKNPMAMRSLHQLRKVINQLIKEDVIDENTIVRIEMARELKSANERVAIRQWQNDLQNNRKEYIEAIKKIYKEDCGLDIEPSKDEILKFQLWKEQNQICLYTGKTISISDFIGANPKFDIEHTIPRSKSLDNSQTNKTLCESIYNRDTKKDKIPTECKNHDEILPRIKHWYAKYKNLEEQIRDITKKVRVASTKENRDSYIQKRTKLRFEYIYYRSKYKTFTIIEIPKGFKNSQSVDIGIISKYGNLFLKSLFTKVYPVKGKTTANLRDIWGLDKKERINHAHHAKDAVVVACCSKDINDALAEYYHNYEDYKYYGKSKPSFKHRIPWKGFNTDAKNFDENTLISHHVPNVLPIQSKKAIRKRGIIQRNANGEIKYRQGDTVRGALHKESFYGAIKREETNKKGKTEEVIKYVLRKPLDSFKDADLKNIVDDKIKEIVTNGRNEEKLAKKEIEILKKQINKVDDIEEAKLKAQIDVLTNKIENELYVLPNKNGNSIPIKKIRYFATDVKTPLEIKKHRDVSRHDHKQFYFAKNDSNYCMAIYEGLDSKGNIKRTNLLINNLDAGSYFKKSNSNSETYPIAPETDSNNYPLKYILTKGKMVLIYDKTPKELFEMEEAQLLERLFQVTQMDVEASCIKLLYHSEAREKKVLTLFMDLKNGMKGGKNIGEHKKFPWIKVGVNSFDCLVEGYDFKIAASGKLNFLI

SEQ ID NO: 15224 - protein, 1135 aa, unidentified
  REGION 1..1135: note = Cas Enzyme sequence
MSKILGLDLGTNSIGWALIENTTILGMGSRVFPEGVINLGEGEGREISKNASRTDSRGKRRQFFRKRLRKRYLLKELAKHSLCPIPASLIRDWNGIEIIKNELLQEWLRRNPYELRAKAVSEKITLLELGRIFYHMIQRRGFLSNSRSAGSEVKESSTLFKGDTKIGKIGINKTLQSIEKKKTLGSYLHSIFPKENEPFSGELERIRNRYTTRQMYIDEFEAIWEFQKNHHSELTNNLKTIIGGRKKDGYKEDGVLFHQRPLRSQKHLVGHCSFETKKTKCQLSAIPFEMFRVYQWVNTVSYDLNGERQKITPQEKEKIVALLLSKEKIKFKEIRQKINRLEAYYQFNYKDNDQIIGTHTISKLSNKMFFGKEWFNFSDTEQENIWHILSFFDDRDKLKEYAIKNWNFDEEKAIKISRFNLKEGYANLSRKAINNILPFLKLGFMYDIAVGLAGVKNVLGNSYKEHEQFVFDNVPKIVRSNLKGGYIEPLKQMMKKEFSCTEIQLKKLYHHSRSITTNDVLDRLPLGPEADKEIQKIKNPVVITALFEIRKLVNEIIDAYGKPNEIKVELARDLKVSKKNRNDTRRKQQVLEKENDRVKGEIEKLGMLLNHKNILKYKLWEECNHTCPYTGKPITLSQLFTGEIEIDHIFHWSRSLNDSFNNKTLCFTYENRAKENRTPYEFYSSQGDEKWEIIKLQALNCFKTKAKYLNCYTKFKHFVKKKHDEDFISRQLNDTRYISKEAKNYLSKICTKVLVAPGQMTATLRRYWGLNSILNKEDNTKTRNDHRHHAIDALVMACFTRSHLHELTKRNRYRKNHELKDFPDPWFNFRRDAEKAVEQILVSHKKTKNILTIRTRTTIKKGVKHRNTGVAARGQLHKESVYGKRKDVFTKELNYHIRKPLILLSAAEIPKIVDLEIKKIIYKAIEEIGLNIDDNRKPIVKTREDKKLFEQLLSKPFFLTNKNGNPVPIKKIRIQKKFSNAKPLKESKNQWVDLGKNHHVLIYKDFNGNLKEDVVTFWAAVNRKRKGKEVFQLPKDGKEMVTTLQKNELFLLGLKDDDIDWKNLNYNLLKKHLFKVQGLSSFFYEFRLSTDSTQNKDTKSKVFRRIQSFSDGKTGWKTHNPIKVKVNSIGKIEKI

SEQ ID NO: 15225 - protein, 1128 aa, unidentified
  REGION 1..1128: note = Cas Enzyme sequence
MAKILGLDLGTNSIGWALIDDKLNKIIAMGSRIFPVGVDNLGDGEGELSKNASRTGARGTRRQFFRKKLRKKVLLKELASLNMCPLTNEDFENWKTTKKFPTQELASWFALNPYELRHKALSEKLSFEEIGRVFYHLIQRRGFLSNSRSAGKDDGAIFKGNAKEGKIGIDETREQIENKTLGSYFYEIAPKTNQPFIDGLERIRNRYTTRQMYVDEFEEIWEHQKKYHSNLTHEIKEKIGGRKNDEGFKEDGILFHQRPLRSQKHLVGNCTFESSKTKCQLSAIPFELYRLHQWINTVEYNGHKLHSDERKLVFNFLIEKEKPSFKDIRKAINKLDTIYKFNYKDEDKIVGTHTISNLCSKKFFGKRWFDFTEKEQEDIWHVLYFFDSKDKVAAYAIANWGFDETQAEAISKFNLKDKYASLSRKAINNILPFLEMGFQYDIAVVLGGIKNAYGQNWEMLNSDDKGLVLDNVYEIVRSNLKGGFIEPLKHFLKTDLHLSDKQLTKLYHHSANIDETVLLEKLPVNAKADKEIQAIRNPVVITALFEIRKLVNEIVEEYGKPDEIKVELARNLKASKSGRREERNRQQKLERENDRVKVELNNLSKHISHDNLLLYKLWEECKRTCPYTGRSISVTQLFSGEIQIEHIHPWSKSLNDSFMNKTLCFADENRAKGDKTPFEFYSLQGENKWHEVKERALKLFSDTAQYPNSYQKFKRFVQQKFDDDFASKNLNDTRYISKETKNYMSKICDKVAVSPGQMTANLRQKWGLNAVLNPEDKTKTREDHRHHAIDALVMACGTVKHLQKLSEWDRYDRKPENKNFPLPWEGFVKDAEIAVDRILVSHKKLNNIITVRTHKTEKNGVVYKNVGVAARGQLHKETVFGKRNFNGEEAFHVRKPIESLATEKHIEKVVDEAIRLLILKRVQELGGFVKDKVPANTFFVVDENGINQPQIFLPNRNGAPVPIMKVRMKENIGGAERLKEDINQYVNPRNNHHVLIYKDEKGNLKEEVVTFWTVVERKRQKQEVFQLPADGVAIVTTLQINDMFLLGLKEDEINWENPDYDVLKEHLYRVQSTSSKYYEFRLNSNSQSQLKVTPFYEQIRNFGVGKTGWTTFNPIKVKISVSGKIEKL

SEQ ID NO: 15226 - protein, 1021 aa, unidentified
  REGION 1..1021: note = Cas Enzyme sequence
LRAKAVSEKITLLELGRIFYHMIQRRGFLSNSRSAGSEVKESSTIFKGDTKIGKIGINETLQSIEKKKTLGSYLHSIFPKENEPFSGELERIRNRYTTRQMYIDEFEAIWEFQKNHHSELTNNLKTIIGGRKKDGYKEDGVLFHQRPLRSQKHLVGHCSFETKKTKCQLSAIPIEMFRVYQWVNTVSYDLNGERQKITPQEKEKIVALLLSKEKIKFKEIRQKINRLEAYYQFNYKDNEQIIGTHTINKLSNKMFFGKEWFNFSDTEQENIWHILSFFDDRDKLKEYAIKNWNFDEEKAIKISRFNLKEGYANLSRKAINNILPFLKLGFMYDIAVGLAGVKNVLGNSYKEHEQFVFDNVPEIVRSNLKGGYIEPLKQMMKKEFSCTEIQLKKLYHHSRSITTNDVLDRLPLGPEADKEIQKIKNPVVITALFEIRKLVNEIIDAYGKPNEIKVELARDLKASKKNRNDTRRKQQVLEKENDRVKGEIEKLGMRLNHTNILKYKLWEECNHTCPYTGQTITISQLFTSEIEIEHIFPWSRSLNDSFNNKTLCFTNENRAKENKTPYEFYSSQGDKKWEIIKLQALNCFKTKAKYPNCYTKFKHFVKKKHDEDFISRQLNDTRYISKEAKNYLSKICTKVLVAPGQMTATLRHHWGLNSILNKEDNTKTRDDHRHHAIDALVMACSTRSHLHELTKRNRYRKNHELKDFPDPWFNFRRDAEKAVEQILVSHKKTKNILTIRTRSTIKKGVKHRNIGVAARGQLHKESVYGKRKDVFTKELNYHIRKPLILLSAAEIPKIVDLEIKKIIYKAIEEIGLNIDDNRKPIVKTREDKKLFEQLLSKPFFLPNKNGNPVPIKKIRIQKKFSNAKPLKESKNQWVDLGKNHHVLIYKDFNGNFNQVVVTFWTAVNRKRKGKEVFQLPKDGKEMVTTLQKNELFLLGLKDDDIDWKNLNYNLLKKHLFKVQTLSSFYYEFRLSTDSTQNKDTKSKVFRRITSFSDGKAGWKTHNPIKVKVNSIGKIEKM

SEQ ID NO: 15227 - protein, 1135 aa, unidentified
  REGION 1..1135: note = Cas Enzyme sequence
MSKILGLDLGTNSIGWALIENTTILGMGSRVFPEGVINLGEGEGREISKNASRTDIRGKRRQFFRKRLRKRYLLKELAKHSLCPIPASLIRDWNGIEIFKNELLQEWLRRNPYELRAKAVSEKITLLELGRIFYHMIQRRGFLSNSRSAGSEVKESSTIFKGDTKIGKIGINETLQSIEKKKTLGSYLHSIFPKENEPFSGELERIRNRYTTRQMYIDEFEAIWEFQKNHHSELTNNLKTIIGGRKKDGYKEDGVLFHQRPLRSQKHLVGHCSFETKKTKCQLSAIPFEMFRVYQWVNTVSYDLNGERQKITPQEKEKIVALLLSKEKIKFKEIRQKINRLEAYYQFNYKDNEQIIGTHTINKLSNKMFFGKEWFNFSDTEQENIWHILSFFDDRDKLKEYAIKNWNFDEEKAIKISRFNLKEGYANLSRKAINNILPFLKLGFMYDIAVGLAGVKNVLGNSYKEHEQFVFDNVPEIVRSNLKGGYIEPLKQMMKNEFSCTEIQLKKLYHHSRSITTNEVLDRLPLGPEADKEIQKIKNPVVITALFEIRKLVNEIIDAYGKPNEIKVELARDLKASKKNRNDTRRKQQVLEKENDRVKGEIEKLGMRLNHTNILKYKLWEECNHTCPYTGQTITISQLFTSEIEIEHIFPWSRSLNDSFNNKTLCFTNENRAKENKTPYEFYSSQGDKKWEIIKLQALNCFKTKAKYPNCYTKFKHFVKKKHDEDFISRQLNDTRYISKEAKNYLSKICTKVLVAPGQMTATLRHHWGLNSILNKEDNTKTRDDHRHHAIDALVMACSTRSHLHELTKRNRYRKNHELKDFPDPWFNFRRDAEKAVEQILVSHKKTKNILTIRTRTTIKKGVKHRNIGVAARGQLHKESVYGKRKDVFTKELNYHIRKPLILLSAAEIPKIVDLEIKKIIYKAIEEIGLNIDDNRKPIVKTREDKKLFEQLLSKPFFLPNKNGNPVPIKKIRIQKKFSNAKPLKESKNQWVDLGKNHHVLIYKDFNGNLKEDVVTFWTAVNRKRKGKEVFQLPKDGKEMVTTLQKNELFLLGLKDDDIDWKNLNYNLLKKHLFKVQTLSSFYYEFRLSTDSTQNKDTKSKVFRRITSFSDGKAGWKTHNPIKVKVNSIGKIEKM

SEQ ID NO: 15228 - protein, 1135 aa, unidentified
  REGION 1..1135: note = Cas Enzyme sequence
MSKILGLDLGTNSIGWALIENTTILGMGSRVFPEGVINLGEGEGREISKNASRTDSRGKRRQFFRKRLRKRYLLKELAKHSLCPIPASLIRDWNGIKIFKNELLQEWLRRNPYELRAKAVSEKITLLELGRIFYHMIQRRGFLSNSRSAGSEVKESSTLFKGDTKIGKIGINETLQSIEKKKTLGSYLHSIFPKENEPFSGELERIRNRYTTRQMYIDEFEAIWEFQKNHHSELTNNLKTIIGGRKKDGYKEDGVLFHQRPLRSQKHLVGHCSFETKKTKCQLSAIPFEMFRVYQWVNTVSYDLNGERQKITPQEKEKIVALLLSKEKIKFKEIRQKINRLEAYYQFNYKDNEQIIGTHTISKLSNKMFFGKEWFNFSDTEQENIWHILSFFDDRDKLKEYAIKNWNFDEEKAIKISRFNLKEGYANLSRKAINNILPFLKLGFMYDIAVGLAGVKNVLGNSYKEHEQFVFDNVPGIVRSNLKGGYTEPLKQMMKNEFSCTEIQLKKLYHHSSSITTNDVLDRLPLGPEADKEIQKIKNPVVITALFEIRKLVNEIIDAYGKPNEIKVELARDLKVSKKNRNDTRRKQQVLEKENDRVKGEIEKLGMRLNHKNILKYKLWEECNKTCPYTGDPIKLSQLFTGEIEIDHIFHWSRSLNDSFNNKTLCFTNENRAKENRTPYEFYSSQGDEKWEAIKLQALNCFKTKAKYPNCYTKFKHFVKKKHDEDFISRQLNDTRYISKEAKNYLSKICTKVLVAPGQMTATLRYYWGLNSILNKEDNTKTRDDHRHHAIDALVMACSTISHLHELTRRNRYRKNHELKDFPDPWFNFRRDVEKAVEQILVSHKKTKNILTIRTRRTIKKGVKHRNIGVAARGQLHKESVYGKRKDVFTKELNYHIRKPLISLTAMEITEIVDLEIKKIIYKEIEEIGLNIDDNRKPIVKTREEKNLFKQLLCSPFFLTNENGNPVPIKKIRIQKKFSNAIPLKENRNQWVDIRNNHHVLIYKDFNGNFNQDVVTFWTAVNRKRKGKEVFQLPKDGKEMVTTLQKNELFLLGLKDDDIDWGNLNYNLLKKHLFKVQTLSSFYYEFRLSTDSTQNKDTKSKVFRRITSFSEGKAGWKTHSPIKVKVNSIGKIEKI

SEQ ID NO: 15229 - protein, 1135 aa, unidentified
  REGION 1..1135: note = Cas Enzyme sequence
MSKILGLDLGTNSIGWALIENTTILGMGSRVFPEGVINLGEGEGREISKNASRTDSRGKRRQFFRKRLRKRYLLKELAKHSLCPIPASLIRDWNGIEIFKNELLQEWLRRNPYELRAKAVSEKITLLELGRIFYHMIQRRGFLSNSRSAGSEVKESSTLFKGDTKIGKIGINETLQSIEKKKTLGSYLHSIFPKENEPFSGELERIRNRYTTRQMYIDEFEAIWEFQKNHHSELTNNLKTIIGGRKKDGYKEDGVLFHQRPLRSQKHLVGHCSFETKKTKCQLSAIPFEMFRVYQWVNTVSYDLNGERQKITPQEKEKIVALLLSKEKIKFKEIRQKINRLEAYYQFNYKDNEQIIGTHTISKLSNKMFFGKEWFNFSDTEQENIWHILSFFDDRDKLKEYAIKNWNFDEEKAIKISRFNLKEGYANLSRKAINNILPFLKLGFMYDIAVGLAGVKNVLGNSYKEHEQFVFDNVPEIVRSNLKGGYIEPLKQMMKNEFSCTEIQLKKLYHHSRSITTNEVLDSLPLGPEADKEIQKIKNPVVITALFEIRKLVNEIIDAYGKPNEIKVELARDLKVSKKNRNDTRRKQQVLEKENDRVKGEIEKLGMRLNHKNILKYKLWEECNKTCPYTGDPIKLSQLFTGEIEIDHIFHWSRSLNDSFNNKTLCFTNENRAKENRTPYEFYSSQGDEKWEAIKLQALNCFKTKAKYPNCYTKFKHFVKKKHDEDFISRQLNDTRYISKEAKNYLSKICTKVLVAPGQMTATLRYYWGLNSILNKEDNTKTRDDHRHHAIDALVMACSTISHLHELTRRNRYRKNHELKDFPDPWFNFRRDVEKAVEQILVSHKKTKNILTIRTRRTIKKGVKHRNIGVAARGQLHKESVYGKRKDVFTKELNYHIRKPLISLTAMEITEIVDLEIKKIIYKEIEEIGLNIDDNRKPIVKTREEKNLFKQLLCSPFFLTNENGNPVPIKKIRIQKKFSNAIPLKENRNQWVDIRNNHHVLIYKDFNGNFNQDVVTFWTAVNRKRKGKEVFQLPKDGKEMVTTLQKNELFLLGLKDDDIDWGNLNYNLLKKHLFKVQTLSSFYYEFRLSTDSTQNKDTKSKVFRRITSFSEGKAGWKTHSPIKVKVNSIGKIEKI

SEQ ID NO: 15230 - protein, 1362 aa, unidentified
  REGION 1..1362: note = Cas Enzyme sequence
MCPLSVEEVIEWRKSGFKKYPLNPEFISWLRTDDDKNINPYYFRDKASKKKATLFELGRALYHIAQRRGFLSNRLDPSAEGIIEQHKPDLEDIIENALSFTELQIELTDYFQDRDLIERKAADLDEGEKKLKTIYNSFLKTIKDNAKDFDKTKTLITERLNKKEDLGVVKQRIGEISQAMKLGNFTTLGQYFFSLYNKEKIRNQYTAREEHYLSEFEVICLAQGIEGIIDSEILPEKRYFGLAKELYKAIFFQRPLKSQKGLIGKCTFEKSKSRCAVSHPDFEEYRMWCFINTIKIKTPEDESLRFLTNEETLKIIPKFLRKKDNFNFEDLAKELVPSGSKSAFYKSSTATTANYLFNYNLNSSVSGCVVSTSFKNALGEDWKTKSYSYETLNKNGERVIRNVDYNDLWHLISVSTSDLYLEEFAKNNLKLDDKKANLFSKIKLKKDFASLSLTAINKINPFLREGLLYSHAVFMANIENIVDVDIWKNLEDRKYIQTKIAALIATNTFDNNLLEIINGLIKECKVGACYYSKEAEATYKADLNKKVSAFVKLNKIEDQKESIMGLLYPIFIEQLKKYEFISIKRLDEKVFDFLDGQNDDGQVFCNSKNKLKKLYHPSDIDVFRKQIVKDGNGNEKLVLGSPLISSIKNPMAMRALHQLRKVLNALIIEGQVDEKTRIHIEMARELNDANKRKGIQDYQREIENNRKVYIEEIKKLYFDDCKKEIEPTEDDILRYQLWIEQDRKTIYEEQYTNISICQIIGSDPDYDIEHTIPRSRSQDNSQMNKTLCSKRFNREIKKNKMPIELSNHNDILDRVTPWQKKYLALEYDIIGISKSIKAATTKEQKDRKIRLRHKLNLQKEYFKGKYERFTYTEPKVGFKNSQIPDTGIITKYAAAYLKSYFGRVEAVKGGMVAEFRKAWGIQESYIKDGKKYYEIKDRSKHTHHCIDAITIACMTKDKYDVLAHAWDLEDDLDKNQYKLMKSVLEQSKPWKTFTEDLKKIEDEILVSHHTPDNVKKQSKKIVRIRGKKQFVAEMEMDGNGKNIPKTDSNNKIIFKKNNKGEKIARFHQGDSIRGSLHQDSVYGAIKNPLNQEEIRYVIRKELESIKASDVENIVDEIVKEKVKGAIAAKVLQLSSNPQQKNKLDGKVWMNEGKGIQINKVRLYANSVKNPLHIKEHAMLSKSKHEHKQKVYAQNDENYCMAIYEDYDKKGKIKRSSLLINMFNAGNYFKLSNDDKTNYPIAPEKDENELPLKYILTKGKMVLIYDKSPDEFLEMSENKILERLFQITQLDVEGSCIKLLHHQEAREKKIITESMGLKIGMKGGKNLGEHKKFPWIKISENSFDCLVQDYDFKITPSGKINFL

SEQ ID NO: 15231 - protein, 1455 aa, unidentified
  REGION 1..1455: note = Cas Enzyme sequence
MTKILGLDLGTNSIGWAIVENDNKDFSLIDKGVRIFSEGVKTEKGIESSKAAERTGYRSARKIKFRRKLRKYETLKVLSEKNMCPLSVEEVIEWRKSGFKKYPLNPEFISWLRTDDDKNINPYYFRDKASKKKATLFELGRALYHIAQRRGFLSNRLDQSAEGIIEQHKPGLEDIIENALSITELQIELTDYFQDRDLIERKAADLDEGEKKLKTIYNSFFKTIKDNPKDFDKTKTLLSERLNKKEDLGVVKQRIGEISQAMKLGDFATLGQYFFSLYNKGKIRNQYTAREEHYLSEFEVICLAQGIEGIIATEKLPEKRYFGLAKELYKAIFFQRPLKSQKGLIGKCTFEKSKSRCAVSHPDFEEYRMWCFINTIKIKTPEDESLRFLTNQERLKTVSKFLRKKDNFNFEDLAKELVPSGSKCAFYKSSTASTDNYLFNYNLNSSVSGCVVSTSFKNALGEDWKTKSYSYETLNKNGESVTRNVDYNDLWHLISVSTSDLYLQEFAKNNLKLDDKKAILFSKIKLKKDFASLSLTAINKINPFLREGLLYSHAVFMANIENIVDAAIWKNLDDRKYIQTKIAALIATNTFDNNLLEIVNGLIKECKVGACYYSKEAEATFKSDLDKKVSSFVKLNKIEDQKESIMGLLFPIFIEQLKKYEFISIKRLDEKVFDFLDGQNDDGQVFCNTKNKLKKLYHPSDIDVFRKQIAKDGNGNEKLVLGSPLISSIKNPMAMRALHQLQKVLNALIIEGQVDEKTRIHIEMARELNDANKRKGIQDYQREIENNRKVFIEEIKSLYKAATTIDIEPTEDDILRYQLWIEQDKKTIYEEQYTNISISQIIGSDPDYDIEHTIPRSRSQDNSQMNKTLCSKRYNREIKKNKMPIELSNHSDILDRVAPWKIKADKLTWEIEQISKSIKAATTKEQKDRKIRLRHMLNLQKEYFKGKYERFTYTEPKVGFKNSQIPDTGIITKYAAAYLKSYFGRVEAVKGGMVAEFRKAWGIQESYIKDGKKYYQVKDRSKHTHHCIDAITIACMTKDKYDVMAHAWDLEDDLDKNQYKLMKSVLEQSKPWKTFTEDLKKIEDEILISHHTPDNVKKQSKKIVRIRGKKQFVAEMETDTNGKSVPRTDSNKKIIFKKDNKGEKIARFHQGDTIRGSLHQDSIYGAIKNPLNQEEIRYVIRKDLESIKASDVENIVDEIVKEKVKGAIAAKVLLLSSNPQQKNKLAENQKVWMNKEKGIAINKVRLYANSVKNPLHIKEHAILSKSKHEHKQKVYAQNDENYCMAIYEKDGKRDFELINNFNLAKLQKQGQGYYPLFKEKIANGKVIQIPIAKRNNRDLVLKRGQQVVFYDKEVENPNDVSELLDLKGRIYIIEGLSIQRIVRPSGKVDEYGVVMFRYFKEARKSEDLKVDKYKPDGIFKLEESKPTRKMNHNQFTAFVEGIDFKVLSSGKIEKL

SEQ ID NO: 15232 - protein, 1135 aa, unidentified
  REGION 1..1135: note = Cas Enzyme sequence
MSKILGLDLGTNSIGWALIENTTILGMGSRVFPEGVINLGEGEGREISKNASRTDSRGKRRQFFRKRLRKRYLLKELAKHSLCPIPASLIRDWNGIEIFKNELLQEWLRRNPYELRAKAVSEKITLLELGRIFYHMIQRRGFLSNSRSAGSEVKESSTLFKGDTKIGKIGINKTLQSIEKKKTLGSYLHSIFPKENEPFSGELERIRNRYTTRQMYIDEFEAIWEFQKNHHSELTNNLKTIIGGRKKDGYKEDGVLFHQRPLRSQKHLVGHCSFETKKTKCQLSAIPFEMFRVYQWVNTVSYDLNGERQKITPQEKEKIVALLLSKEKIKFKEIRQKINRLEAYYQFNYKDNDQIIGTHTISKLSNKMFFGKEWFNFSDTEQENIWHILSFFDDRDKLKEYAIKNWNFDEEKAIKISRFNLKEGYANLSRKAINNILPFLKLGFMYDIAVGLAGVKNVLGNSYKEHEQFVFDNVPKIVRSNLKGGYIEPLKQMMKKEFSCTEIQLKKLYHHSRSITTNDVLDRLPLGPEADKEIQKIKNPVVITALFEIRKLVNEIIDAYGKPNEIKVELARDLKVSKKNRNDTRRKQQVLEKENDRVKGEIEKLGMLLNHKNILKYKLWEECNHTCPYTGKPITLSQLFTGEIEIDHIFHWSRSLNDSFSNKALCFTYENNAKKNRTPYEFYSSQGDEKWEIIKLQALNCFKTKAKYPNCYTKFKHFVKKKHDEDFISRQLNDTRYISKEAKNYLSKICTKVLVAPGQMTATLRRYWGLNSILNKEDNTKTRNDHRHHAIDALVMACFTRSHLHELTKRNRYRKNHELKDFPDPWFNFRRDAEKAVEQILVSHKKTKNILTIRTRTTIKKGVKHRNTGVAARGQLHKESVYGKRRDVFTKELNYHIRKPLILLSAAEIPKIVDLEIKKIIYKAIEEIGLNIDDNRKPIVKTREDKKLFEQLLSKPFFLPNKNGNPVPIKKIRIQKKFSNAKPLKESKNQWVDLGKNHHVLIYKDFNGNLKEDVVTFWAAVNRKRKGKEVFQLPKDGKEMVTTLQKNELFLLGLKDDDIDWKNLNYNLLKKHLFKVQGLSSFFYEFRLSTDSTQNKDTKSKVFRRIQSFSDGKTGWKTHNPIKVKVNSIGKIEKM

SEQ ID NO: 15233 - protein, 1171 aa, unidentified
  REGION 1..1171: note = Cas Enzyme sequence
MGFKMTKILGLDLGTNSIGWSLVDDKKHKIINSGVRVFPEGVNIDKGKEFSKNATRREKRQGRKQLFRRKLRKLKLAEELMRHNMYPQLNNLKSELSKPRLKDELKSFFNINPYKCRAESYKGNKLTLLEIGRIFYHFAQRRGYKESLKNYGEEKGKIYDGNPKEFKIGIKETQEQIKKYGTLGNYLYNENPHKTRLRNRYTTRKMYIDEFNIIWENQKKFYPDILTNELKYKIGDPQTGILFFQRPLRSQKHLIGKCTFEPRKLKCPKSTIEFEKFKMYQFINGIECEGEKLNKEQREMISEIFNSKSKFKFKEIKKKLNLVERRFNYKDDDNIVGNNTISNFRKIFGKERWEKFTTDEKFNIWFIKYNAEDPEWLRDYSKAKWNLNDDKIKKLINFKLAKNYSNLSLKAINNILPYLKRGLLYNDAVLLGGLKSAFGLEKWNSLSKEDKKTIEDTVLALTGQKEDKKPIIEKVKGFLKSQFKLNDNQLNKLYHHSFLNQNNDKKDLLPEPENLRNPIVQQALYDLRKLVNAIINEYGKPDKIRVELARDLKSSKEKRYLMRRENKDNENRNDEIKKRLDEFGIEHSRTNIQKVILWDECQNYCPYTGQKIDFRELFNDGYVQIEHIIPYSVSLNDSMQNKTLCLADENKRKGDKTPYQFYGHDENKWREIKNRVYKLFKNNYGKYQRFISEKLPDADDFIQRQLNDTRYISKAAKEYLKNICDDVNVTQGTVTSLLRHHWGLDNILNKVYLTNSLPDGEYYAAVANNDIVEILKWNADSKEKDVKHLKKLGKVVHGKIREGKLYPYKNRDDHRHHAVDALAVALTKRSYLQQISRLSARDNNYEKIQTKIKIDKPWDGFWQDAENSIKQILVSHKINNKVLTPVKKRLYDYNGKVKKDKKTGKVIYGKGDAIRGALHKETVYGKHTDNYGNEYFHFRKPLEDLKTKKQIDKIVDNKVRNIILQKLKNDGVDITNNDFKITTDTFYKYDNNGNKIPLIFLPNKNGEPVPIRKVRIKEKIGNAEKLKEINQFVNPRNNHHIIIYKNSEGNYKEKVVTLWEAVERKKQGLPVINKYPEPDCEFVTSISRNEMFILGLKDEEYNDIKDDFAILSNYLYRVQKLSTTGYKIVFRHHKASTIENIEEMIGVSSIKNLIEINPKKVNLNILGNLIN

SEQ ID NO: 15234 - protein, 949 aa, unidentified
  REGION 1..949: note = Cas Enzyme sequence
MITLGIDYGAAYVGIALVRNHENGHDEPLFAATMVLDARRLKEKVENRAALRRLRRTRKTKKRRLRELKDKLLRLGLAPETVSQIVNFCERRGYKSLFGQEGDPDDKSRDELTYRFTREEFFQTLEGHLSRLLLSPEAKTAALAICERVLNRAGDRRLEVRPLRIENRGASRCAWEGCDRVTPRRSNAIEDAITQQLVTYFQSTLKQHQDLLDTLKVATAEMGRISHQLRSAVEKGLAPEVKALRKRARDVLKRLRVEFTEPEAAEENDEKAWKYVKEGIMNILEKARGRNAYCREHSAEYVQTVLAGRAVPFKKTIAESDILSRREQIAFSKLWRYIEARVLPLAPEGIDRIVVERTAFDVLAGNRRKIRTTSEKRVEEMYQQGPRFGFKDDGAMLREEFGGLCAYCGKPSPDLIEREHVLPRRDFFFDSYLNILPACPDCNRQKGRSRPGSAALHISEEAYANYDRYLKRIAGQRPVHFLHYEKKGILNLMRDPKRAWDAERYLGLLANNFAAIAQSQRGPRPFARLLFSKLAARQNKPPTISFFSGRHTAMYRTIAYPGFEKHKDKAEGGTMNHALDAVLLACELPNASVLEARGINVQDLETWRRRVRSRAPVPGKDGVPDIPLYEWCVPGFEEVGLNGYVEVQMAAMNWNQKDSSTHKQDPYGWSEESNKPTKRSSAVELYEKLMNEKADEKVKNIVQTIHHPSLRSAMSQGLKARPPGPAVAEAMKEWLRKSVRNSLGKSSCTSHPGDLRRRTDLQNFAENHDAKIPRVIGVKRLDTGVQGKIDLERLDPMNGRTLHRYMSDPVNREVLLAYRVGSNGQPDFLKPFTVKVKQNLALKTDLRTFQPIPPDLACGVTWGSAASLGDGWSSKLETYLSERGFCSYARIKPCCVVCYQDGSQLFIRNFDDNKDFKPSKILKNVVGVKRTPFALRMVPLKVLTPQRPK

SEQ ID NO: 15235 - protein, 1448 aa, unidentified
  REGION 1..1448: note = Cas Enzyme sequence
MKRILGLDLGSNSIGWALVQQNFENKQGQIMAAGSRIIPMDQGVLGDFEKGNTVSQTAERTAYRSTRRLRERHLLRRERLHRVLHILGFLPPHYDSQIDFSKRYGKFIDNAEPKIAYNNGNFIFMNSFNEMIEDFKKHQPQLFYKKSNGEESKIPYDWTIYYLRKKALSQKITQQELAWLILHFNQKRGYYQLRGEEETEGNDMEIISSKVLSVIKKNKDKKYDKYWYDITLENGLVYKAAFYNDLVYSWIGQEREFVVKRTLLKNGDEKIELSYLPTFDEIAKMDKKQQDKFYQKIKVKTESSIGNKTVGAYIYDHLLQNPNQKIKGKLVRTIERKYYKDELKAILAKQIALQPEFTENLLADCIRKLYRKNETQQQNLLSKDFLHLFLEDIIFYQRPLRSKKSTIANCTLEKRSYIDKETNERKDTPIKVCAKSNPYYQEFRVLQWLQNLRIYEIETNREVTAEFIETAQDYEALFNFLMSQKEIDNEGLLKYFLLTKNPQIKDKAAKSELKKYRWNYVYDVADNSSKKYPMNETGYELQRYLQKVEGLPANFLTFDTTYRLWHLLYSVKDKVEFEKALKKFAQKYQLNEVSFVDSFKNFKPYPNEYGSFSEKAIKKMLPLMRFGKHWNFKNIDVHTQKRIDDIINGVANEDIRTIIREKAEKYQLNSETCFQGLPLWLAQYIVYNHHAEATDIEKWTSVSDLEAYLEDFKQYSLRNPIVEQVVTETLRVVRDIWQQYGGGQANFFDEIHIELGRELKNTSKERERLSKQNQENENTNLRIKKLLAELKEDANIQNVRPYSLVQQELLKIYEEGVFSSTDEIEEDIQKIRKKAEPTTPEIQRYKLWLEQKYKSPYTGEVISLTKLFTEDYEIEHIIPQSRYYDDSLSNKVICESAVNKLKTNQLGLEFIQNHHGEKVRIAGNKEVTIFTEEQYKEFVKKYYANNLAKQQKLLLNDIPEKMVARQLNDTRYISKYISEILSKIVRSDEKDEGVNSKNIIPCTGKITTALKQDWGLNDVWNELILPRFERMNQLTQTQLFTSYNDRLQKNLPTVPIEYSQGFQKKRIDHRHHAMDALVIACATREHINYMNNQHALDKSKDKKEKQQSRIDLRTILCEKKNNNWQFKKPWRTFTQEAKEALEHIVVSFKQNLRVINKATNYYEKWEEKNGVLVKKKVKQEGTNWAIRKPLHKETVSGKIVLDRKIGKDKILTATRKTVDITFTEKIISSITDTGIQKILLNYLKYKGSPEVAFSAEGLEELNKNIAQYNDGKKHQPIYKVRIFEEGSKFPLGETGAKVTKYVEAAKGTNLFFGVYQGKGKRTYATIPLNGVIERQKQGLPSVPEHNEKGEPLLFSLSPNDLVYVPMVGEATDTIDFSNLSKEQKERIYKTVSFTGNQCFFVQEAVAFPIVNKMEYSPLNKMERDILGIMIKEVCIKLKVDRLGNITKA

SEQ ID NO: 15236 - protein, 1458 aa, unidentified
  REGION 1..1458: note = Cas Enzyme sequence
MKRILGLDLGSNSIGWGLIEQDFQQKEGKIIASGSRIIPMDQGILGDFEKGNTVSQTAERTFYRSTRKLRQRHLLRRERLHRVLHILGFLPPHYDKQIDFSKRYGKFVDNTEPKLAYEEGGFLFMDSFQEMLSDFKSHQPTLFYSKKNGEESKIPYDWTIYYLRKKALSQKISKEELAWIILNFNQKRGYYQLRGEEEVENPNKEVTYYSLMVTDVTAEAPNKKGEIWYSIQLENGWVYRRTSKIPLDDWKGKVRDFIVTTELEEDGSIKRDKEGKEKRSFRAPSEDDWNLLKKKTEQDINTSKKTVGTYIYDHLLQNPNEKIKGKLVRTIERKYYKEELKAILEKQIALQPELFTDQLFADCIRELYSKNEAQQRNLVARDLVHLFVEDIIFYQRPLRSQKSTIANCSLESRSYIDKDSHTRKEAPLKVCPKSNPYYQEFRVLQWLQNLKIYEIDSDQEVTHQFIKTLEDKQQLFEFLMAQKEIDCEELLKYFLNQTYPNAKEKALKSELKKWKDTYRWNYVYDIGEKSSKKYPMNETRYDLKRYLEKVANLPDDFLSQEVEYLLWHLIYSVTDKVSYEKGLKKFAQKHHLDEDSFVESFKKFKPYPSEYGSFSEKAIRKLLPLMRFGSYWDFNHIDKNTQKRIDDLITGVENEEIRTILREKAEKYQLEKETDFQDLPLWLAQYVVYNRHAEASSLDKWTSVNDLETYLNEFKQHSLRNPIVEQVVTETLRVVRDIWQQYGQGQADFFDEIHIELGRELKKTAKEREKLSKQNQKNEDTNLRITALLAELGEDSTIENVRPYSLMQQELLKLYEEGVFSSSMEIEDDIEKIHKKATPSKAELQRYKLWLEQKYKSPYTGQIISLKRLFTEDYEIEHIIPQSRYYDDSLSNKVICESVVNKAPYKDRQLGLEFIKNQGGRIVKELSKENKTIKIFTEEQYRTFIKEHYSNNPAKTKKLLLEDIPEKMVARQMNDTRYISKYISEILSKIVRGDERDEGVNSKNVILCTGNITSPLKQDWGVNDVWNDLILPRFERMNGLTQSTLFTTYNERYQKYLPTVPMEYSKGFQKKRIDHRHHAMDAIIIACTTQEHINYINNQHALEKEKEKKEKQEERDKVRERLCIKKYNNRSEGNYSWIFKKPWGTFTQDVRAALEGIVVSFKQNLRVINKATNYYERWVEENDKFIKKMVKQEGTNWAIRKPLHKETVSGKITLEREKVSGGKILTATRKVIDSTFTEKVIEGITDTGIQKILLNYLKFKKSPEIAFSPEGIEELNKNIALYNDGKPHKPIYKVRIFEQGSKFPLGEAGNKSQKYVEAAKGTNLYFGVYQGKDKRSFATIPLNEVIERQKQGLPSVPEYNEKGDPLLFSLSPNDLVYVPIEGEIIEDIDFQHLSKEQKERIYKIVSFTKGRIYGIPNKVAVSIVNKMEYTQLNKIEFIKEKEVCIKLKVDRLGNICKA

SEQ ID NO: 15237 - protein, 1026 aa, unidentified
  REGION 1..1026: note = Cas Enzyme sequence
MRYRLALDLGSTSLGWAMFRLNPAGGPSAIVRAGVRIFSDGRNPKDGSSLAVTRRAARSMRRRRDRLLKRKERMLGKLVEHRLFPEEVAERKALESKNPYELRAKGLDETLTPGEFARALFHINQRRGFKSNRRTDRKDNDSGALKTAIKSMREKLVESGARTVGELLWQRLRNGEGTRARYRETPYTTEEGKKRIDKSYDFYVDRQMVADEFDALWAAQAALNPVRFTEQARADLRDTLLFQRDLRPVLPGRCTLIPTEPRAPLALPSTQRFRILQEVNHLRILDASLNETPLTLAQRDTLVALLEAKAKVGFKEMRKQLKLGGVVQFNLEDEKRTELKGNATSAALSKKDLFGSAWKDFDETLQDEIVWRLVTEQSEDSLARWLCEATGVDEAHALAIAGAGLPEGYGSLSRPALARIVPALRAEVITYDKAVQAAGFEHHSALGFDYEADEIEDWTHPETGEIKPVFKQLPYYGKALQRHVAFGSGKPEDSDEKRYGKIANPTVHIGLNQVRVVVNALVRRYGRPAEVVVELARDLKQSREQKQETQKKQAENQRRNQRIRHAIAEVRGCSEEQVKSTDIQKWILWEELSFDVADRRCPYSGVQISAAMLLSDEVEIEHILPFSQTLDDSLNNRTVAMRQANRIKRNRTPWQARMDFEAQGWAYESMLQRAERMPLRKRYRFAADGYERWLGEDKGFLARALNDTRYLSRVAKSYLTLICPLGVRVIPGQMTAMLRGKFGLNHVLGPNGEKNRNDHRHHAVDACVIGVTDQGLLQQFAAASARARDHGLTRLVDDMPFPWPTYRDHVERAVRHIWVSHKPDHGYEGAMMEETSYGIRKDGSIKQRRKADGSAGREISNLIRIAEPEQPVRHGVDEEGYPLPYKGYVGGSNYCIEITVSDKGKWEGQVISTFEAYRIVRQNGVHQLRNPVLGQNRLPLAMRLMIGDSVRLTVDEVEKIMRVVKVNGNGQIFMAPIHEANVDARDKDKLDAFSYTSKYAGSLQKAKGRQVVISPIGDLRNSGLMR

SEQ ID NO: 15238 - protein, 1055 aa, unidentified
  REGION 1..1055: note = Cas Enzyme sequence
LKKILGLDMGVASIGWSLIEYNQDDEGNIIDSGVRIFDQNLQRDNEAQKGESKNQQRTLHRGMRRQRDRKRRRKRGLYYSLKGVRMCPVKSENEEWNKWIDLNPYELRTKGLDEQLSLMEFGRVLYHLNQRRGFKSNRKVGKDSEDGAVATEISKIRAEMKKKGMRTLGEYLFSLQENHFDPPVSPNHDDYEFKRRIRNKYTHRNMYEEEFELLWEKQTQFYPQTLTEKFKAKLSDDTIFFQRPLKSQKHLIGKCSLEPDKKKIPKGHLLFQKFRIEKTLNNLELMGEYGQSLDMTDEHKKIIREKLERSDHVSFSQLKKDLGFNSNAKFNLETSDDSKLKGDTTSKKLSSKNAFGKEWYGLDEEFKNHVVDVLIHVEKPDVVEDLALNKWGRTKEQANHLKMLQLEKGYGNFSYKVIRKIMPLIKEGKRENSAIKEVYGEVKKTPKEDVFQLPLLDPKDYRNPVVFGAMVELRKVVNAVLRKHGLPDIIRVELARDLKNSKKLRDEITKKNNKLEKRNNEAIKALKQSPFNYQNPSRTDIIKYNLWIECNKTCPYTGRVINGEALDRGEFEIEHILPFSRTLDDSYANKTLCESDFNRRKGNRTPYECVEAGLLSKEELEQRIKNNLPWRKRRKFTQKTIDTDEFIARQLNDTRYMSREASKYLKQLGSEEWPVVIQVTKGQTTSLLRHLWGLNSILSIENDEIKNRDDHRHHAVDAIVIALTSRSILKKLSDENKLIETENWMDEEESSVDRNRQIKDRASKRITNTPPWDTFWKDSQESVNQIIVSHKVSRKISGAFHEETYYGSTEESSSKKDHIKYLVVRKRVEALSEKELGWNSKTQTFDKEGKVFIRDEHIKKIVRDKIWKKYKETGDIKKAIAALETDPPKLFHKNGKDFNLIHKVRLLMEKDLSKMNEFEDEPKTPTRYALYGNNHHIAIYEYTDKNGNKKQTGEVIPTMEAARRVLDKEPIIMRDHPDYDRFLFSLSTNEMVQDAEDNIFRVQKISSDTQMTFRLNNIALKGASDPGVLRKNPSSVASLKKVRIDPIGQIFPAND

SEQ ID NO: 15239 - protein, 1327 aa, unidentified
  REGION 1..1327: note = Cas Enzyme sequence
MKNFNDDYYAGFDIGTDSVGYAVADTDYNLCKFKGNAMWGVDLFEESNSAAERRTLRSARRRGLRKRNRIEWLQMLFDQEISKVDNAFYQRLKESCLYLDDKSSNVPYAVFADGNYTDKEFHTDYPTIYHLRKELIKSSQPHDVRLVYLALHHIIKHRGHFLFDNMGSDFESESSFEALFDDLKLYLKEEYEIEFECNDSLRFSEILKDKTLKKTAKSSESYKLFGYSKRNNPYETALIDLMCGRKVKFSDMFGDKSFDSEEVNGITFESGYDDNENTYRDLLQEKFELIEKAKAVYDWAILADILNGEKYISFAKVKTYEEHNSDLKMLKDFVKERCKSLYGEIFRITKDKLDNYTAYCGKYKENGRNGVIQYRTNQADFCKYLKKKFEKLDKTGYEEMFDKIENGTFMPKIVVKDNGVIPMQVNRSELKAILKNASTYLEFLNKKDENGISVSDKIVKIFEFRIPYYVGPLNNHSLKSWLVRSDEKIYPWNFDSVVDIEQSAENFINNLTSKCTYLPTKDVIPKNSILYSAFTVLNELNNLRLDGKKPDVSLKQAIFNDLFMTHKKVRRKDLLNYLKSEKGITPDITGIDGDFKSSMRSAIEMSQFNLTDSEKEDAIKAITVFGDDKKLLKKRLKRQLGSKLSDEDIMRISKLKYKDWGRLSKEFLTEVYNVDKNTGELQFNIIHALWQTNDNLMELLGSKYGFEQSRQNYLDGIQTGQSLEKMVENLYISPAVKRPVYQSLKIMHEINKIQGHAPKKIFVEMTRKDGVKGDKGRKESRKTKLVDLYKKCGEDSGELWESLEKTPDDEFKRDRLYFYYTQFGKCMYTGEPINLSELYNQNIYDVDHIFPRSKVKDDSLDNRALVKKQVNAHKDNTYPLDSSIREKMKGFWHLLMDKGLISKKKYERLTRVTPLSDSELSDFIARQIVETSQSTKAVASLFKELYPDTEIVYVKASTVSEFRHEYDFLKCREVNDFHHAKDAYLNIVVGNVYNERCTHNKSIFIEGLKTKAYSLNKMFSFNTPNAWSIDDNKSIKIVRKTMNKNNIRFTRYALTRNGGLFKMNPLKKGSGQVSLKQNSPLSDISKYGGYDKPASSYFSFVKYEGKKGKEMRQLVAIDSYIKARYEANPEKYLSETLGLKNPVVLIPVVKYNACIEIDGFRMHISSKSNGGKKIVYKPAMQLTVSYDTEKYIRNVVKLNSKPENYNITELDKVSAEENVELFDILIFKMTDTILKVKFGDMGVKIASHRDTFEKLDVRKQCFVLAEILKIIHSNVVTGDLTLIDEAKKAGVVSTNSVLSEIKSVKSIYLVHQSVTGLFEKKIDLLNM

SEQ ID NO: 15240 - protein, 1122 aa, unidentified
  REGION 1..1122: note = Cas Enzyme sequence
MHYTLGLDLGTNSIGWALINTDKKTILDLGVRIFQVGVENLGEGENEISRNASRTAARGTRRQIFRRKIRKKLLLTTLQNHGLAPKSDLVEWYKINPYELRAMGILEKLTLHQIGRIFYHMIQRRGFQSNSRQNSSEDGKIFSGDGKIGKIGIDETRSKIEDYKTLGSYLNQIYPSHGTPFENKSERIRNRYTTRQMYIDEFEIIWKTQENFHPELTDDLKAEIGGRKKEGCKMDGVLFHQRPLKSQKFLLGKCSFEPTKTRCPISAIPFEKFRAWDWINRLQYNGKGLDFEQRAKVYALLSANDKKLEFSRIRKHLGLLGDKYQFNVKDSDRITTCPTIGSLSNKKFFGSKWNEFTDKQQEDIWHALYSFEDKDFLMKYAKDHWSFNEKQQKDISNFSLISDYASLSRKAINNILPFLEMGFMYDQAVVLGGIKNAFGNNWEMLSEDEKELIITNIPEIIKSKRKGGFIEPLKEFLKSEFKLTDKQLNKLYHHSASIQQSQILEKLPVSPSADKEIQSLRNPIVITALFELRKLINAIIDKYGLPAEIKVEMARDLKNSKNKRQEIQLKQRRNEEFNLFIKAELDKLNIQITHENILRYKLWLECQKHCPYTGKQIGLGKGGSDVLSLFEGSKVVDIEHIHPWSRSINDSFQNKTLCDPDYNRAKGDKTPYEHIYGLLGETEWNSVKERALKLFRNRFDNNEYFPDGYKKFLHFVKREHPDDFTSRQLNDTRFISKEAKNYLGKICKNVIVSPGQVTSKLRHHWGLNTVLQDSGEKERIDHRHHAIDALTLACTERKYLSEISKWNRYDRNYDLEKFPDPWNGFRSQAIKAVGNILISNRKSKKILTSRNFKIEKNGNSYTNKGVAARGQLHKESVFGKRKDYFGNEAYHIRKPLEAITTSTQISKIVDPAIRKLVLAHLESMGVDISKKFSIPKGAFFDYDNNTLIPKLYLPNKNGLPVPIKKVRLKENIGKAEQLKEGINQHVNPMNNHHVLIFKDSGEGFNEEVVTFWTAVERKRQEEQIVQLPSNHRDGKIVCSMEINDYFIIGLSNQEFENYTKEQLSDHLFRVQKLSSNYYTFRKHTASTLKFSNEELSIRSFKSWIEQNPIKVAIDVKGDLKKI

SEQ ID NO: 15241 - protein, 1080 aa, unidentified
  REGION 1..1080: note = Cas Enzyme sequence
MNTTLALDIGTSSIGFALIDFDAFRILWIGVYIFPEGIKRDKGKESKDSKNAERRTYRQARKLIWRRQARKELLLKLLQTLNYCPTDEKELLAWQVLDPYKLRKDGLDKALTPHEFGRALYHLNQRRGFKSNRKSDGGENEKKTGMVDAAIGELGQAIHTGNFRTLGEYLYSLNPHDIRRRSRYTSRDLYKEEFDSLWKKQQPTFQADLEEIMQKFVFPKFHKKVREGGWRHLLENYVIFYQRKLKSQKKLIGTCTLEPTSKRSPLSAPIAQEFRLLDKLHSIRLTGGDRKWSALTRSELQTAFHAFNIKEKWTIKQLLTLLKLKDYRSNYTDKDEFKGNRTAHALISVFGEDVWKGFEDAKKYHIWQIFHNATDNDKLMTYGKTKWELTDEQAEKMKKVSLEKDYAHLSQKAMYKLVPEMKQGLDYAQACVKVGYHHSKSEETENKPLLESPQNVRNPIVQQALYEIRKVVNAVIEKFGKPNIIRVELARELKMPKKQRLNIKDRNDDRQKAHAWIKAELMREIPAKFDHKEENISRDAIIKYKLWRECKKECPYTGKSIAIAQLFNGEFEVEHILPYSRTLNNSIQNKTICERAFNLKKLNNTPFELLQKGVISKQMYEDILKRANHFNQKKYDRFIQEELDDHFITRQLNDTAYIAKEAHKWLCTILDSSQIQISNGQATAALRHYWGLNSILSSNKKDLETTPENNESPKLHLKNRDDHRHHAVDAVVVACTTPAMLRQLSTYKVTGKDWKDNDFTPPWDTFRRDVRDAVKEILIAYRIRKRVRGGLHDESVYGAILDKDKNQQTDAKGFPIYAIRKLLSSFKTKAQINKIADPVIRKLVIERIQEMGGDINDEKFKLPVGCWAEPLYMPCKTGKKIQIKKVRTHDVSKTYVVVRQFKDVQPENTRPHKHAYVEPGSNHHIVIYETTNKKGNIIRSGEVVSLFDAVKRKKQGLAVINQDIGADKRFIMSLSQNEMVLIDNLNPPDGFPFKTAELTWNAEMHRFTDEYGTVLHHADLSPYLYRVQYIDSAQMTICFRHHLTAVLKDDEGKEVGRVFANPNTFKGIKVRISVLGEIEP

SEQ ID NO: 15242 - protein, 1161 aa, unidentified
  REGION 1..1161: note = Cas Enzyme sequence
MTYTLGLDIGAASIGWAMTTDNEISRLGSRIFPEGIERSSSGKESPRNAARRKKRLLRRQIARKAQRRETLLRAFQILGWLPTEKSDLEKIWLEDPYALRKKALDEPLQKSDLARVFFHLSKHRGFKSNRKTDTGEETLVAEETPETGEKGNSKQPKKNLLRDGDDDKQGYGELDRLIKNGTARSVGEYLASLNPHEVRIRSRYALRTHYEEEFEKICDAQRAFHAELDAPVPEKLLAELCSRKQQAAWKKKEKQSLRAFIKSYLIFFQRPLKSQKHTVDNCSLEPKSRRAPLSSLTFQTFRIWDKLATIELLKPERRFLTPDEKARAAHLLERAKEMELGKLLDKISLTFQGENNAQSESLFNDAPKPIDAKTVVCNYDLDKKLKGNDTAVQLMTMFRETSGKATKKEQEAIEAKWNALSEAEKEQRWKIIYDATDNDLLKQYGKQKWTLTDAGAEALTKIQFKQGYGSLSGRAMKKLIPLLKQGLNYPEACAAAGYHHSDKRPTQLLNKLDKAPNLRNPIVQQGLFELRRLVNALIKTYGKPDAIHIEFARELKMPKQKREDLTKENEARRKANERAADEIRKLGYPNPTGDDIRKYNLWRECNGVCPYTGKQISAEMLFRNDAIDIEHILPYSRTQDDSFNNLTLCFADFNRDKKKNLSPFEMKDLAVISEAEYEQMLDRVETFGNRAKLRRFTQQEIKTDDFVSRQLNDTAYLAREAKAYLETVCPKIVVSNGQATAKLRKLWGLNSLLHPLKEKKRNEASREELEALAEKNRSDNRHHALDAAVIAATTTRFVQMLSSYSKYKRDATADKFPLPFTAFREQLKDELDDLLVSRYQKDRVQGALHEDTFYGAVREQDGSHREDGKYKIYTIRKPVSALTGSMIEEIADKEIRLAFESLIDRLKANGVAFKESAKLPKEFFEAAKKIKMPIKRVTIEKSRVSAKTLTPRDIPNIEPPFIRAFFEKRLQAFPDLPPNQSLPDAFFENFGVPIKHVRIHKPSSTIRAIREGKQNQMFIETGNNHHIEIFREIESKKGKTKYVGRIVTLIDAAKRKREKRPVVDKTMDGHEFVMSLMIDEMVLMSEGDFNVKDVNWEKPDYKTLSQHLYRVQKMSANQIFFCHHLESTIANSISKTPNTLRGIKVKVDVLGNIKPVSEPLV

SEQ ID NO: 15243 - protein, 1149 aa, unidentified
  REGION 1..1149: note = Cas Enzyme sequence
MTYTLGLDIGAASIGWAMTTDNDLSCIGSRLFPEGLEKSREPKNRKRREKRLVRRQIARKAMRRQTTLQAFQILGWLPNDTAELEAIWHEEPYALRKKALDEPLTKSELARALFHLSKRRGFKSNRKTDTNEETLVEAAPETESKSKKSKNLLRDGDAEKHGYGEVEQLLNSGKVRTIGEYLATLNPHEVRIRSRYLLRKHYEDEFEKICNAQSAFHAELNAPVPETLLKALCSRKQQDAWKKKSDTSLRAFIKSYLIFFQRPLKSQKHTVGNCSLEPKSRRAPISSLTFQTYRIWDKLATIELLTPERRFLTPEEKARAAELLEKTKEIEVGKLLEKISLTVQGTSDGLSESLFNDEPKAIDINTVTCNYDLDKKIKGNETAVQLMTMFKETNDKPTKKEQAAIEAKWNALSEEEKEHRWKIIYDATDNEWLERYGKEKWGLSDIGAKALTKIQFKQGYASLSQRAMKKLIPFFKQGFNYADSCVKAGYHHSDKRPKALLDKLDEVPNLRNPIVQQGLFELRRLVNAIIKEYGKPDAIHIEFARELKLPKAKREELTKENEMRRKINEHAANEIRKLGIQNPSSEDIIKYKLWLECKGICPYTGKQISAEMLFRNNEIDIEHILPYSRTQDDSFNNLTLCVADFNRNKKQNLSPFEMKARGIISEAEYEQMIERVTKFDNRAKLRRFTQKEIDDDKFVSRQLNDTAYLAREAKAYLETICPNIVVSNGQATAKLRNLWGLNSLLHPLGKNRQEATLNELEALAEKNRKDNRHHALDAAVIAATTRGFVQKLSTYSKYKREPNADKFPLPFPSFREQLKSELDELLVSRYQKDRVQGALHEDTFYGAVREQDGSHREEGNYKIYTIRKPVSSLTGKMIEEIADIEIRRAFELLIATLKAKGVAFKEGSKPLPKEFYEAAKHVKMPIKRVTIKGKRVSAKTLTPNDIPNIEPYFIRAFFEKRLQDFPNLAPDQPMPEAFFENFGVPIKCVRIHQKSQARRELRPGVFIETGNNHHIEIFRKLDTKKGKAEYTGRIVTLLDAATRKRKKQPVIDKTMEGHEFVMSLMIDEMFLMSEDGFDVRTVNWEKPDYKTISKHLYRVQKMTGNQVFFCHHLDSTLDTSFGKSVNKLRGIKVKVDVLGTIKPMSEPMV

SEQ ID NO: 15244 - protein, 1014 aa, unidentified
  REGION 1..1014: note = Cas Enzyme sequence
MSGQTTLGIDVGSNSIGWALIEDGGRGLIAAGVRVFPEGVERDQQGGEVPKNEQRRAARTMRRQIARRSRRKQNLRNLLEKAGLLPSDPEQRVQVFEADPYILRRRGLDEALSPFEFGRVLVHLNQRRGFLSNRKTDRARKQEDSETLSEISALAAEIEAAGHRALGEHLASLKAGEPLIRVRGKHTRRDMFKTELDRLWEAQRRHFPEILTDAFRDQVEKLVFFQREMYWPKSVVGRCSLEPKERRCPRADRIAQRFRLLQEINNLRIIPPNAEPRELTADERAKLLELLSRSKEKTFNELRDRLGLLESYGFNLEGGERRKLLGMPTDVILAGAKLFGKKWHARPEQEKNAIVRALIDATDDALIRRLATHEWGLSEEAAGRLAEVHLPDGYASFSRKAMEKLLPHLERGLPLMKNLDGEKCALEAAGYLRPDQRTVGQHDALPQPPEITNPIVRQALHEVRKVVNGVIREHGKPDAVHIELAREVRGNEESRRRMAWEKREREARRDAAAARIEELGHKPTRRAVELYLLWEEQGGVCMYSDPPRVITPRQLFSGEVDVDHILPYGRSLDDSLMNRVVCFHSENAEKKDQTPYEWLAERNPGKYEAVLQRAARLPFEIRNRKRTKFLQKTVVLDEFVNRQLNDTQYLARQVREYVGCLGVDVVCTKGQLTAELRYQWGLNEVLRDDDLNVKNREDHRHHAVDAVAIALTNRSRLQQLAHNRGRVPLPAPWSGLRADLESAINQINVSHRVARRVSGQLHEETIYGPTSKPRRTPQGERPWATGWVEAEGQFVCRKPLEALTLAMVEEIRDPEIKRLVIERLAQFAIAPGSKQKIPKEVWKEPLYLRRKPGRTSRSPVIIRKVRLIRRDLTIQPIRGGACYVKPGSTHHIVIFEMADPRGKIRREMVSVSMLEAIQRLKNKEPLIQRAHPANADARFVMSLSRGEMVLAEFGGQERLLCYRTSASTQGQIYFVDHRDARKSADVKKFVANANTLKARKVTVDPLGRMRDAND

SEQ ID NO: 15245 - protein, 1005 aa, unidentified
  REGION 1..1005: note = Cas Enzyme sequence
MPTGVVAAGVRVFEAGLDELETDARGKSRNMQRREARSIRRRLERQARRTSRLANFLQTVGLLPLADIRDSAARHEFFKRLDCSMESPYQLRRRGISERLEPYEFGRALYHLAQRRGFLSNRRSAPKDEDEAGKVRQGILDLEREMASVGARTIGEYFASIEGGGTRIRDRYTGRHMYEQEFDALWNTQAGFAPDVLLPDLREKIREIIFYQRPLKSQKRFVGKCELEPKYRRASWEHLSAQRFRYLQTMNNLAVIDKSTGEVRALSSEEREAIIERLEATAEATYSSFRGRGGIPSLRGTVFNLERGGEKRIKGNRTAAQLAGVFGLERWRDLTEADREAVVEDVRSIVNDGALARRGQRKWGLAPEQAKRLTEIRLEPGHCAFSRQALDKLLPHLRQGAKLYDAIEAVPEYRERMNRLTEAVDELPSVLSALGDIRNPLVIRSLTELRRVVNAVVQRYGKPDFVRVELARDLRQTAKVRLELSKKMRQNEQARMRAAERIRKETGIQNPSRDDILKILLAEECSWRCPYTAEPFGIHDLLGRSPQFDIEHIIPFSRCLDDSFMNKTLCHADENRKVKHSRTPWEAYGRTERWEEIMGRVREFKGPGRWAKVRRFEMREAEHNAFINEFCSRQLNDTRYASKLAMRYLSMLYGGGRTQGVDAEGKRRIQASAGMITALVRHAHGLNGLLSRDDLKSRDDHRHHAVDAVAVALSDTRTVMRLTAAARRAEAYDKLFKDVEEPWPGFIGDIKAVIDRVIPSRRLSRRVRGALHQDTFYGARTVDGRAVVHIRKPLAALHKGDIDDIVDPVVRAAVRRRVEEAGGDVKKAFAADVEKPYLSGGGGIRIPIRRVRLAKNLVTFPVGSAHRRRHVTSDANHHITLFEVCAEGGGAVRWEGKVVSLFEATQRLRRGEPVVRRDDCNGGRFLFSLSCGDVIELDREGTGRALYVVRTVPQSKQIRFVPIHDARRLKEIPKSGMTAVPDSLRRRNCRKVVVTPLGEVRRAAD

SEQ ID NO: 15246 - protein, 1039 aa, unidentified
  REGION 1..1039: note = Cas Enzyme sequence
MKHRRAPEHILGIDLGPNSIGWALVNGNGKADKPLKAIGVRVFDAGLDSLETDGKGKSRNLERREARLIRRGLERRSRRMRNLARLLQRSGLLPPGDVDTPQGRDQLLQDLDRTLECPYKLRARALDEQLTPYELGRALYHLGQRRGFLSNRKSAPKKDEEEGAVKGGISDLRAKINAAQARTLGEYFAGLDPHTDRIRQRYTHRDMYKEEFTAIWNAQRPHHSVLLTDDLRKQIEHRIFHQRPLKSQSKFIGKCTLEPTRPRAPMADLDAQRIRYLQRVNDLRVIDQSTGEISPLTDEQRNLLTQYLETKEVVSFGGIRKLLKLRNVEFNLERGGEKKIPGNRTAARLAKIFGPDRWNALSDDEKNAIFTDWNRTVKDETVKKRGLKYYHLDEESAERFANLRLDAGYHSFSRIAIRELLPALQKGIPLQTAIKEHKKYSRQFNVSAVAMDTLPPIENDSGLPSLRNPIVMRSLTELRRLVNAIIARYGKPDLIRIELARELRQTPKQRNETTKKMRANESERIRAAGECSDKYDIPNPTERDILKFQLWEECNKTCPYTGKTISHEALFGRNPEFDIEHIIPFDRCLDNSYLNKTLCWVDENRRVKGNRTPYEAYHGTDKWDDILNRVRNFRGRLKYQKLNRFIMPPEKVRSLLDDFTERQLNDTRWASKWAKKYLGLLYGGIDDKGIDASGRLRVQAVQGHATAFLRNCWGLNTILSDDFDKSRDDHRHHAVDAVAIAMTTPATIKTLGDAAGRASAVGRRLFAQFDPPWSGFREQVETAIGGITTSHRVSNRVRGKLHKETFYGRPRKDAKGNEYVHTRVKVEDLGPKDINDIVDPLVRRCVADKLAEIGGDPKDAFKDPANHPVIEAGDGRRIPIHRVRIRMNLSTFAVGSGPYTRYVQSKDNHHMEVFAVLDDDGNVKKWDAKVVSMYDAYRRLAVKEPIIKRDHGPNTKFLFSLAGHEIIELDVDAGRGLFVVRTITQTKQTKEILFVPVNDARTRKNIGKIGLTAKPNSLRTRNCKKLLITPLGEVRNAND

SEQ ID NO: 15247 - protein, 1008 aa, unidentified
  REGION 1..1008: note = Cas Enzyme sequence
MGVDEIEKDGRGVSRNVERREARQIRKQLERRSRRKEKLLHLLQREGLLPDGSLECSADRHAFLNKIDKEIGCPYKLRARALDEKIELRELGRILFLLGQRRGFKSNRKSEPKKNEKLGAVKGGIKSLEERVVEAGCRTIGEYFSTINSHKERIRTRYTSRKMYEDEFELIWDKQRTFYPELLTDSLKKTVRKTIFFQRPLKSQKGLIGECELEPKRKRAPWALLISQRFRYLQMLNNLELIDPNGEIRNLSPEERAKVIDKLEYEGDLTFAALKKLLGYKRNEPTTFNLERVDDKKLIGNRTASKLMPIFGRKRWQSFSEDERDAIVEDWRSITKDEVLKKRGMTRWGLDEESAEIFSHVSLQDGYCNFSKVAIEKLLPALEKGTPLQTAVRELYPDRWERATEPLSFLPSIEKSGLTSLRNPIVERALTELRHLANAIIKNYGKPGTIRVEMARELRQTSGQRGETHKANKARKKEREEAAGKICEEVGIENPSRDDILRVLLADECDWKCPYTGKQIRMSDLLGDHPQFDIEHIIPFHRCLDDSYLNKTLCCADENRNVKKDQTPYEAYHGTANWGDIIARVAKFKGNAARKKLERFKMTPEEFQEFAKGFTARQLNDTRWASRWAKQYLGLLYGGIKEDGIDAAGKQRVQTTSGPVTAFLRNTWGLNGILGDGDFKTRDDHRHHAVDAVVTALAEPSTVKMLSDASKCGLYGSRRLFSDMEAPWPGFRDEVEKTVKAIVTSHRVSKRVRGALHDRTLYGKPRYDEDGNQRVYLRKSLKELNSSEIELIIDKGIRDKVQEIVDGSDPTKVFDDDSKLPRFNLGNGVKAVVKRVKVRHKFTKPFPLNSERYVMLKDKHHIAYFRSCKSGKWEAEVVSIYEAYCRLCDGQPRRADYSSKEEWKEAWRAFRSRKQIVQRESYEKGEFLFSLSGGDIIELDSENSASRDLFVVGTIEQDKRVSYVPINDARPKKKIGTKGFRSGPGKLQNKNCRKVVIGPLGNIQYAND

SEQ ID NO: 15248 - protein, 1079 aa, unidentified
  REGION 1..1079: note = Cas Enzyme sequence
MKTTKVFAFDLGANSIGWCVVLLGEDGLPVEIIDAGVRIFDNSRDPKTNTPLSVEKRIISGASTRRDRQLMRTRYLCKLLKEFGLLSDKNPRSEVSRNPYKLRSLGATKKLDLYGLGRTILHINKRRGFKSNRKADKKSDEKESQGIKAGISKLREQLVNKTLGQFLYERQKSGDGTRMRAKIIKNKNDYEIYADREMYENEFWQIWHTQQKFYPSLTDEKGQKIFDTLFFQRPLKTPELGWCQFEDERRAYKAYPISQRFRIYQEVNALEIVDISDNNNRLTVEDRQKLIKALLENDPKIVDKKGKATFAKIKKFLNIKNFSFNFESEKRKDFASDLTAFVLASPDNFGEKWRTLDDSICEEIIDAIIQNEENVFIKLVEKYFGFDSNKAKSILDDAIINLPEGTTNLSTKAMQKIMPYFESGMRYDLACKAAGYNFNANYQGEIFDTLPYYGQILRKLALGGDKQKYSPEENPEKYYGKINNPTVHVALNQLRKVVNKLISVYGKPDRIAIETARDLPLGVKGLSELKKEQNKNQTKNEEIAEELKKLGVANNARNRMKYKLWEDLNPDFIKRMCPFCGRQIERTQLFESDFEIEHLLPFSDTFDDSRANKVISCRSCNRIKAKRPPHEAFFNRTGYDWDEILARVSALPKSKQWRFKADAMEQFKEKYGDFIARMLNDTRYMSKVSREYFTAIIPTENIITLTGSTTAMLRGTWGLNSILEPDHNVPETPAEAEQNSQSDNSDKDKSESAPKKNRADHRHHAVDAFVISTVGRKLISIISQCAKRNEQALLENILKSMPSPFTHIPFDVLKEKILNINVSHKLDRGDVKGAIKQGKTVASLHKDTAYGRIGGNDTDEKITLVKRVPLDSIELKEDKIEEIANLKIRNDLLNIFHEIHSTPTTEKAKQNEWLSRLQQYAQENKVRRLRIHIANREIKKLIPIKDKKSGKVYKYMDNAESYCIDIYKPSNSDKWQFEVINMFEAHKNEMPQWRKNDSHAKLVMRLFKRDTIAYEENGEYKVAVITNIATHGQLGMLGLMQANVEGNHPKKMPGALQKLNARKVYVDEIGRIFDPKRNS

SEQ ID NO: 15249 - protein, 1223 aa, unidentified
  REGION 1..1223: note = Cas Enzyme sequence
LFWQRPLRSQKHLLSKCTFEKRIMFDKTTNKWIETGPTPCPISHPDFELYRAWQLINNIRYGRKEQPLDASQRQTVLNVISYQDKVFDFKVIIDALKLQNEYFNYDADQKVSGCPTIKKLKSLFPTEIWVQNKHEIWHDFMFFEDEELLTQRLIKKYHFTEEKAQKSAKITLEDGYASISLKAIHNILPFLEKGFIFQQAVLLGGIKNTFGSRWEYFKDYHSDIEQFIKDLCNGKKYHEGEIIQNIKEYLSSTVNNFGFNPNDKAFLKLYHPSREVGPEKKGDYISPVENLRNPLVQIGLNEMRRLVNYLLKKYRSMPEFGPDFCFDRIHVEVGRDLKNNKKRRQEIRKENAINEQKNKEARERIIEAGLKPSRDNIIKYLLYSEIEQKNGIVICPYTGKTIRLSDLLGPHNFFQIEHIIPYSVSLDDSFGNKTLCEANFNRSKGELTPYQFYLKNSSKSLWNADSWEEIEQRVFQILPYKKARRFTSKKPAMLDDFIQRQLNDTRYISKKSVQILREICDDVRSFPGQLIADLRRLWGLNDILSEPITDIPLNDLNINESEPTIHYLIVDENNHVKKAIPKINFKPIPMDNELAIPGEIKKETGNKFYFESDSKYYASLKIPANGFETGKYWAFIKAQAAQEFIPRFTPQPQISENVIIIKGNLKKKRFINESHGINFNTNKIIEDGYYWAIIPVIKAEIKQNDINDNRKNENKISIQGRVSNQKFISSIYSCEAQLINGFYTALLDFDVNNADFLPALNLPRPPENYYTLNGTVDSQGIFCPDMDYNWKLKADVAPGRYFIYFKIQEIINFQPIENPKPIIDKNNNEKIIESLIRVDTETGEIIIDPKKNREDQRHHAIDAIVIASATTSYYQKLSTYFGNLKNKQRNLAPKPKFEQPNPHFQNAVKEAISKILVSYRTNYRVLVPVYKRIRKNHDTYVSKGYSVKGQLHKDTFYGGYILDQGEGKIVSAAKYLPGIKPQQYHVRCNITEIKDHKHVAKIVDTTIKKLIENRLQNVFNIDISKPYNIPNGFFFDKDKNPAIRLPNRKGGDPVPVYTVRIFEYKGNAVKLKPNINCYVDPRNNHHCIIYKDVEGNLKFEMVKFWDAVNRLRHKQPLYQLPPDGSQIIATVQENDMFIFNYLYASDISEDMKIPYEELSKYLYRVQKISSTEGGIFLTFRHHLASTIKNPEEELRIQSLRSWERHQPIKVKINMDGTVNKIIK

SEQ ID NO: 15250 - protein, 1413 aa, unidentified
  REGION 1..1413: note = Cas Enzyme sequence
MKEKVVGIDLGTSSLGISVRNLSLGESLEKQLEWFSVTTFESGTSSDQTGEHTLAADRRSHVQSRRLKEHSRWKRWSTLSLLIDYNMCPMSRQSLERWCTYDKSRGLKREFPVDDNAFMRWLRMDFDGDGKSDLTAFQLRRKMVEEQFDFTKPINRYKLGRAIYHIAQHRGFKSSKGETLSGQEEDVKDVQVNADNLEETMKKSEERKSKDLSEYMAKHGFKTVGQAFASLEDAGIRVRNSRYQAVRSQNVAEVDEYFHFQEGLREYEDLHKRLVSTKKGEGTLFYKLPLRSQKGHIGKCTFEKNKRRCPISHPEYEKYRAWGFINNIKYRESANDCWQELPLELKKLLYQKVFTAYVRKDFPFEKIREFLEKQLGMTFKNVEGTKTINYKDKTLVAGCPVTARLQNIAAILNTNIEQLHLQSTKTRLSHSVKNTEKHAVTYNAEDLWHFCFEADEIEDVKRFARSSLGWEDMATDALCKLWASIEQGYAPLSLKALKNINRMLEYGLKTSDAIFLAKVPDIAGIEESSIPQLIELYEKDVKAPVDRSLRIGRIVNTLISKYKSLAPRDRFADHDFGYQLQDDDKDDVVQCIMDNDSLFALMDAGEQQQMINEVTRLYQSFFADIHRDYVKTPKFANTLAEKLKEKFPAVDESKWKLLYHPSMVSDFPRNKEDEGLLGSPRIGAIRNPTVLRALNVLRKTLNTMIVDGLIDPQETRLVVETTRVNNDINKRWAIEKYNNERRDANKAIWNILKEYYPDKNIKDEDVDAARYVLEQSGEDLFTDDNPDDLHYRNQLKRYKLWLEQGCCCLYTEHDISLSNMFSENYCDLEHTIPRSLSFDSSDKNLTICDAYYNRHIKQNRIPTQLPNYEHDVTIDGQVYTAIKPRLKNWEEKVERLSQNVLFWKSRARRAQTEDSKNACIRQKLLWQMELDYWRQKLYRFKMKPENLTDGFRNSQLVDTGIITRYAVLYLKTLFSSVDVQNGQSTSAFRKIFGIPQKDRSSNYHHAVDATILTMIPQSAKRDRMLKLFYQIDELKRDCHDVSGLQFQLNKEIEDCDLGRGLAGIDDFIARQVMVDFYKQDRTLQKNVRPVIRKGKPLMKKTAAGKLEPVTFCSDSIRGELHKQTFFGAIRRREDQKTLFVVREPLKYKTSNKDSGFKDWKELNDRLVDLNFKDKSSDLKPMVKMMMNQFRKGTSFKEACEQGIYMLDKDGRKVNRIRHIRCYGKNVTNPMRVKRHTYPSDKEYKQYVWAALADGSVYALCEYVNGSSKVYKRYTYMDISENRKVGVEDIPVCLTDKKGKRFNLRRKICKGDMLLIYKDAPEELLHLDSTDLSKRLYKVQSFERKNDIILRHHLLSTAKTNSEDGKERIRDRGESIKSFTKLPNIIRSSITSFKFLQKDVDYVFNKEGLLLITI

SEQ ID NO: 15251 - protein, 1345 aa, unidentified
  REGION 1..1345: note = Cas Enzyme sequence
MGNKLRNVDDYYLGLDIGTESVGWAVTDKDYVIPKFKGNAMWGVHLFDEGETSVKRRGFRSARRRTQRKRERLALLEALFDEEISKKDCTFFRRLHESNLWPEDKSGDDKYAVFADENYTDKDFHKEYPTIYHLRYELIKNKEPHDVRLVFLALHHIIKNRGHFLFDSLSSAEDFNSAYETMCSYLSDNEIQLNCSDIEQFKAILKDRRQGKIEKTKNLASLFGITKKSDPVSYAVMAVLSGSTVKMCDLFGDDELKTVEKNNISFASGYEENEEIYASVLGDRFELVNILKAVYDWAVLADILDGKKYISEAKVAVYEKHKNDLKTLKKYVKTYLPEKYNEIFKISDGKKDNYVAYSGHIKESGKTGELKKTCDSENFCAYLKKTLGKNADLSYKEMFDEIENKTFMPKQVTKSNGVVPMQVNEEELKAILDNAKDYLPFLNSCDENGISVYDKIIKIFEYRIPYYVGPLNTHTEKSWLKRKDGVKIYPWNFDDVVDIDSSAEEFINNLTSKCTYLPECDVIPKCSLLYSKFTVLNEINNLKLNGEDVPVELKQGIYNDLFMTRRKVTVKQIKDYLKARGCYDNNDVLSGIDTTVKSSLKSYFDFKDFESLTFDDKESIIASSVIFGDDKKLLKKRLKKLFSEKLTDEDIKKICKLKYTGWSRLSKEFLCDVEFTYKKTGEVMNVITALWETNYNLMQILYSEDFCCDGDEKKNLNDKLDELSYTGDQHSLRKAVDALYVSPKVKRPILRALLIAKEIEKIQERPPKKIFVEVARGIDNREERHRDSRKNRLMELYKNCKKEAEKFCPYFDAMSKKLSDEDESKLRSDKLYFYYIQLGKCMYTGEEISLGELMNGNGRFDIDHIYPQSKIKDDSLTNRVLVNRTVNADKTNVYPIDSAVQAKMSPYWQMLRSSGLISEETYKRLTRKTPLTDDELSAFVSRQLTETQQSTKAVAHILEQLYPKPKTEIVYVKAALAHAFRQSNDMLKCREVNDLHHAKDAYLNIVVGNAYNVKVTHNKVNFIKGLQNNDKGYTVNPEKFFSHDIPGAWSVKDSMNTVCRFMNKNNIRYTRFPRKKQGGLFKINPLKKGNGQVPLKASGARSCIKKYGGYDKATSAYFSYVEYTDKKGKAVRQMFPVNLYEVKEYEADMQGFVTSRIDGASNVKILIPCVKYDACISFDGCRMFITKKAGNQIGYKPGIQLVLGYKYEKYIRNITNYLTKHKDREIIPRDNISSEENIELYDVLTGKMLNTVLSVRFSGIGKKLEKCREKFVLCSPEEQCYVLNEILKILHANVLLGDLRLIGESPNAGAMLTNAKFSEIKDVHSIKLINQSVTGLFEQEIDLLK

SEQ ID NO: 15252 - protein, 1087 aa, unidentified
  REGION 1..1087: note = Cas Enzyme sequence
MYPYAIGFDIGITSVGWAVVALDVEDKPFGIINMGSRIFDAAEQPKTGASLAAPRREARSMRRRLRRHRHRLERIRHLLVAENVISQAELDTLFEGRLEDIYALRVRALDAAVSNTDFARILLHIAQRRGFKSNRRSGTSKEDGELLAAVNNNRALMAEKGYRTVGELLLKDPQYRDNKRNKSGKYIATVGRDMAEEEARAIFKAQRELGQAFAAEALEAQYLEILLSQRSFDEGPGEGSPYAGSQIERMIGKCTLEPEEPRAAKACYSFEYFTLLQNINHLRLIRGGESSPLSDAQRDALIALAHKTKDLNFSRIRKELDIPADTIFNTVSYKNADAYEETEKKTKFCYLKAYHQMKAAFNKLSKNHFDTLTRQQKNELGRVLSTYKTSANIRPRLAEAGLSEPEIDIAETMSFSKFGHISAKACDKLIPFLEKGMKYNDACAAAGYDFKAHGGEPLTRLLHPAEDDFSDITSPVVRRAISQTAKVLNAIIRERGCSPTFINIELAREMARDFAERSKMKKDMDANRARNEKIMERIRTEYGKETPTGQDLVKFKLWEEQHGECAYSQKHLSIEHLFDPDYAEVDHIVPYSISFDDSYMNKVLVLAEENRNKGNRLPLQYLQGRRREDFIVWVENSIHDPRKKRRLLKETITSEDEKKFRERNLQDTKTMSRFLLNYISDHLEFSAFATGRKKHVTAVNGTITSYMRKRWGITKIRENGDLHHAVDALVVACTTDVMIQQLSRYSALRECAYVQTETGSVAVSMHTGEVLKHFPYPWPEFRRELEARLGDDPRRAVISQRFPVYVNGDIPVRKLFVSRMPRRKVTGAAHKETVKSPKALNDGIVVVKRALTDLKLDPKTGEISNYYMPQSDRLLYEALKEELKKHGGDGSKAFAAPFHKPKSDGTPGPVVNKVKVCEPTTLNVPVLGGAGVADNDSMVRIDVFHVENDGYFFVPIYIADTLKAELPNKACVAHKPFEQWKEMSDENFVFSLYPNDLLRATHKTRLKLAKAQEDSTLPDTYETKQEMLYYISADIAAASITCRNHDNSYRIRGMGIKTLENLEKFTVDVLGEYHKVEKEPRMAFSRK

SEQ ID NO: 15253 - protein, 1082 aa, unidentified
  REGION 1..1082: note = Cas Enzyme sequence
MNYVLGLDVGIASVGWAVLELNEEDNPIRIEGLGARIFDKAEVPKTGASLAAPRRMSRGIRRVIRRRRFRLQRVRSYLKRHNILPAEKVDHLYDVPSAIDIYELRKRALTEKVTAEEWARLLIFFAKHRGFKSNRKKASGDADEGEMLKAIAANAEILKNYRTVGEMLCDNEKFRKRKRNRDGAYNFTVSRAMLMEEIHTLFEIQRNLGQKFADEKIEEEYVILFAAQRKFDEGPGENSPYAGNQIEKMIGSCTLEGKKEKRAPKASYAFMAFNLWQKINHLKINRRGSERFLTEEERRRIADLAWKKEKLTYGSLREVLFLDPEDRFVGLRYDLKKEKEEDLEEPVSEAEKMSFSWVKDYHSIRKALDKVEKNRILKLSHEQLDTIATAFSVYKNEETIEKYLEEGGIEKADREALLERLSGFSKFGHLSLKACYKILPFLEKGEVYSRACERAGYDFSKSSLENIDDIPNPVVKRSISQTLKVINAIILRYGNPVEVHIELARELARNFRDRKKMEKGMQENQAKNEKIRQRLISEFGVLRPKGMDIVKFKLCEEQNGECAYSQKHFDMEKLLRDPSYAEVDHIIPYSRSFDDSYNNKVLVLTKENREKRNRIPMEYLADAPERKNRFIHWVKSTIRNSRKRENLLRIDYTETTENEWKRRNLQDTQYISKYLYNYLRHHLVLAKGYTERKRRIIPVNGAVTAYFRKRLGINKIRENGDLHHAVDAVIIACATQGIVNKVSRYSKSRELWDYEVDMETGEVLQKKNKNTKDVFPEPWLNFRYELEQKVRVRPLDIPKTADITEMEEPFVSHMPNRKIHGPAHKETIRSGRLKEEGYTISKTALIDLKLTEDKEEIKGYYNKESDRLLYEALKKQLQRYGGKAKEAFKEPFHKPKADGTPGPIVNKVKIMEKSTMLIPVNGGKGLASNGNMVRIDVFRVEEKGKKKYYFIPVYVADTVKEELPNRAVLAHKPYEAWKIMKEEDFIFSLYPNDLIFVDAGKEIPFKAALKGSTLDPEKKASRFLMYYKGADIATGSISGVNHDETYKARGVGIQSLREIKKCCIDVLGNISFASKEKRQTFR

SEQ ID NO: 15254 - protein, 1100 aa, unidentified
  REGION 1..1100: note = Cas Enzyme sequence
LQGIPLERGDICFLGMFYGKIATMKRDFDYTLGLDLGIASVGWSVVELAYDEKEKVYSPKRLIDCGVRLFDKAEIPKTGESLNKTRREARSARRIVRRRKARIRALRKIIEDAGFIPAKEDLSTLPSDKDIWEIRGKDVFNRVLTDREITRLIIHIAKRRGYKSNRKKLDSDDTDSEKKKVLSAIKKNQELLKSKGLRTYGELVYHLYGGSAKRDTLKHNTADQYILSFDREGILEELQIVLNYQKNLGNSKVTDQFINNVLEIVSFQRPFATGDQIKDMVGKCEFEPNELRAPKASISFLEFQFWQSAFNNLKLIDIEKGRYGKKIDLTLEQKEKLFKEVFDSKKDKITFAFVREVLNIPNNYIFYNFKHELLYRAGDKSIEKEKIFLNLTDFQNIRKAVNKIDESLWEKIHEDRFVYNTLVEALTLYKTDSDIENYLKEKGLDEYIEIAKSLPTFSKFGHLSIKALENILPYLKENDYTKACELAGYGNKLKEQKSEILPLIEYDEIRNPVVFRGITQGRKVVNAIVRKYGSPTFINIELAREFAKNSQERRKMERMMESRHKDNEKALEEIRGLGISNPSGFDILKYKLWKEQDCKCAYSGETIPIERLFEDSYCQVDHVIPYSQSMDDSYNNKVLVLTKENQEKRNETPFQYLNRIDPSGKRWEEYKARVENNAHYYQHKKDILLIENADKYTIEDFIERNLNDTKYISRFFKNYLESNLKMKELKYGKRQVFTFHGRFTSELRRIYDISKDRQGSDRHHAIDAIILAVANQSMLQDIVRYRELEEEHKKDWEIFKEEQKIKHPEPWENFRQDIYNRVFEDTFEGISNISNFESLYGDIKNEIKPLFVSRMPRRKVEGPAHEETLYSPKHLDEGFVLIKKSLSDLKPEDVENIYGDDVVKNLIKERFKKNPEKPFEEPLYKPSPKNNNPNQIKSVKIKKPTGGGGVLLNGGRAFAPHASMVRIDIFSKDEKYYIVPIYVADTVKKELPNRAILQGKKEKDWTLIDDSFKFKFSLYPYDLLSLDMSDGKLDGWYYIKTHRNTGVITLRSHDGSKEIERGIKTALNLTKYQVDVLGNISKVRAEKRHGFQKRHNHKTV

SEQ ID NO: 15255 - protein, 1069 aa, unidentified
  REGION 1..1069: note = Cas Enzyme sequence
MKNEINYALGLDIGITSVGWSVINLDVNRIEDLGVRIFNAAENPKDGASLALPRRTARGRRRLLRRKAYRINRVKNLILEREILSKDELDTLFTNKEVISVWEARIKGLDQQLSGKEWSKILINLCKRRGFKSNRKNESKDKEAGQIISSINNNIEKMKEANARTVGEFIYNEVMNSEDKYRPLRNKFGEYNMCVSRNMIREEIHMLFEKQREFGSEFATDEIEDDYLNIFNSQRPYANFEDLEKLVGFCTFEKKKYKRAPKNCISAEEFVLYENLNKLSIIKNGDGRKLTQEERILIADEAFKKKEIKYTHLRTLLNLKEEELFSTLTYSIDKDKSKTENTKFISLKGYHEIRKSIEHGVSKEYWEEIKTNRKMLNDIAYVLTLGKTDEDIKRQLKLRNISNEKVIQSLLDISFSKFNNLSIEAIDKILPFMKKGYQYNEACEMAGYDFKAIYKGVRSKKLPVIEIDEIVNPVVNRALAQTRKVINSVIERYGSPVRINIELARDLAKNFKDRKAIEKEQKENRNNVNKIREEIKSLMGKEPTGSEILKYRLWEQQKGECAYTQRPIYIEKLFGYGDCEIDHIIPFSRSFDNSLSNKVLVLGVENQRKGNRTPYEYFGEDEERWNRFQTWVNGSHLNYKKKVNLLKKKFTQEEQNQWKARNLQDTKYICKYIANYINNRLEFKESDSKQKVITVNGSATAYLRGKWGLSKIREDGDKHHALDATVVAVTTQSMIQKISRYNKAHELRYIRANEDFVDVETGEAVELQKYRDELKEILPRPWRGFSEELMMRLSENPIGKLQKSPIESYDLDFIQNTVKPIFISRVPFRKIGGKLFGETIYSSKGFKGEYFVKKKNLDELKKEDLNNFYNYNCDKRLYDAIIDRMEKFDYNAKKAFESEFRKPTKSGEKGPIVRSVKIKTKVPFKNGIELENVKGLVAKDGIVRIDIYEKEEKYFAVPVYRYQLAQRIIPKKAALAKKSEEEWPIMDESYKFKFSIYKNDLIEIRYKTKGGYFGYFDGFDINSAGITIENHDGSERYRGIGIKSGVLEFNKYEVDVLGKYYKVKVGDRS

SEQ ID NO: 15256 - protein, 1353 aa, unidentified
  REGION 1..1353: note = Cas Enzyme sequence
MAAFKYYLGLDMGTNSVGWAVTDPNYNLFKAKGKDLWGIREFNEASTAVERRTHRISRRRRQREQVRIGLLKDYFHDAIGEVDPDFFQRLANSKYHLEDKDTEVRYKNNVFNDDDYTDKDYFDQYPTIYHLRKELIESTDKHDVRLVFLALLNMFKHRGHFLNSGLGENGGENNINNAYLELTNLLSEFTQYNLNETIDGKKIEDLLSRRDMSRTRKAEGLAEILGVDYKNKPYKELIRGLCGLKFNACAIFPEIQSDEVPKLDICLSEASFDEKSDEIANILGEDYFEIIMAMKDIYDIGSLAGIRKGYNYLSQARVASYERHKEDLKLLKEVIKKYCSKDDYDSFFNSDADGSYASYVGSYNSKTKQRRVGNKRSSEELYKAIKKLFKNVPVEDADVQSILTSIENETFLPKQLTVSNGVIPNHVHAEEMKKILSNAENYLPFLKEKDETGLSVSEKILKLFSFQIPYYVGPTTEKSNKDGGNGWVVRKEEGQVLPWNIDEKIDMKATSEAFISRMVRRCTYISGEPVLPKASLEYQSFCVLNEINNIKIDGERISVELKQDIYKEVFQKGKRVTKKQLCKYLHTRGIIEAEEQVTGIDVTINNALTTYGKFKAILGDDISKDSVQKMIEDIVFWCTVYGDSKKFLKDRIEEKYGEKLTKEQIKRIVGFKFKDWGNLSKNFLELSGADVSTGESVSIIRALWNDNLNLMELINSRLYNYKERLAEYQNTMMKTLSDIEAEDLDEYYFSAPVKRMIWQTILIIKELVKVLGCEPDRIFVEMTRRPDERKMRTESRRKKFEELYKKVKDEDVDWMKVIAHADETGSIRSKKMYLYLTQKGRCMYTGKHIELSDLFNNNLYDIDHVYPRHFVKDDNIDNNLVLVCKEKNAHKSDIYPLEDEILASQKNMWSELRRSGFITEEKYNRLIGRNPFTDEQKAGFIARQLVETSQGTKGVANILQQLLPESKIVYAKASNVSEFRNTRDIPKSRLINEFHHAHDAYLNIVVGNVYYVKFTQNPLNFIKNDYDRDKTKNNYNLSKMFDWDVERNGEVAWIAQKKDGEAGTIATVKKVLERNTPLMTRYSFEKKGRLTKEERHSAIDAKKDQYLPFKTSDSKMQDVTKYGGFNDIAGTYFFLVEHTEKKNRIRTIESVPLYIAKKIDQNPIELEKYCEQVLGLVDFDIRVRKIKIGSLIKRNNYFCYITGKKPGRLIVRNAVNLCLKNEWIKYISKLEKYNEKNVIDEMITKEKNQLLYLELINKFRNSIFSKRPNGIGKKLEDARNIFNDLSTEEQCIVLYKVLQLSAVMGYEADLSLIKYSKSAGAMQISKKIGDEDIYLINQSVTGLYEKKINLRTV

SEQ ID NO: 15257 - protein, 1048 aa, unidentified
  REGION 1..1048: note = Cas Enzyme sequence
MGTNSIGWAVIDANQDDSEAKILDMGVRIFGDGRQPGRKGEPGDPLNQTRRMKRAQRRQLERRKRRKQAMYRFLKSSEYLPLDKDDYEKWRLLDPYQLRAEAINRELNRYELSRVMMNLSTRRGFKSNRKTDAKSKDVSIYKDKIKAFAIELGDKTLGQYLYEKRQTDPNALIRFRPGTQFYPDRSMYEKEFQAIRDKQSIYHPAFDWDRAYRIIFFQRPIRRPQRGNCTFYPDEARAFFVQPSTQLFKALQDINNLSYLTDREHMLEPSQKETILEAIRVKKKLSFSQIRNMLNLPNDAVFNLEKGTKDVLEGLATDIEFSKKLGSRWKELNLETRDNLVELFIVEDDDQKIKEGFAQYGFSEQTIHEAINTIDLRAGVSSLSTRFMRDCIELMQSKWIRYDEAVTQLGLRHYRPFEQDELLEKLPYYGKVLPYMTFSSRPINRSNIENQDETKNDEEKYGRISNPTVHIALNQLRKLCNILLDLFGKPEQIIVETATDLKNSRKKIAQINAKQRENREKNTRIRGEIASIIKCSPDEIGSSDILKYQLWEELGNNSASRNCIYCGNPISAHQLFNGEVEIEHILPFSRTLKNNRNNLTVAHRWCNNIKGDRTPYEAFGSSPNGYTWAEIEARVSDLFRSNFQKRANFLKEDLEQNLSEESSFLESQLSDTAFITRAVKQYLSSIIVNSNIITTPGQLTSILRSKWGLNGILSQYDDKNRCDHRHHAIDALVISLTTRRMLQRFASANARNYAYKIMPPPFPVDRQDLKERLLAMLISYKPDHGLEGPLFDESAYGYNLNEKPPQEFFIRKPLASLTWKIIQDEDVLSKSIRKKISEFLQEQGLSKANSDDKALQRAMLVFMDQNHLHPRSVKIRAKNAEGYMLLEPGKNGRTGHKAYPKKDVLCVDIWQIPVGNKKYKFVGDFKKRADVHSMGGIIEKNRPHPAAKFLMRLYKNDIIRIQNGQIYTYALVAGLPASNKKLDLRPIYASSDIKSWLQYTRKEFCGSFWRPIETTQNFESINKLFGTQGNNISHVNITIDGKLSCRKI

SEQ ID NO: 15258 - protein, 1293 aa, unidentified
  REGION 1..1293: note = Cas Enzyme sequence
MKHTIGLDVGTNSIGWVLLKENEIIDKGVNIFPIGTNLIKGVQEETKNHQRGGYRRAKRNLFRYKLRRKELRKQLNELGMLPNFAKLNKIKDEYQASELYQLRSEALYKQIPIDEIGRIFLLINKHRGFKSNSKILSEKTDEEGVVKDGISQLKEFMKKHNARTVGEYFHKMYIKAKELFDDGKWHNVDEPYDERAKDKDDNFILQNNRGIRRENGRYVERAMYENEFDLIWDEQKKYYPQLTGGRKEYDEIYKLPIEQKRDKLKLFKSTAYWQIRFTTIFFQRQLKSQKKFIGKCQYEKNKRTAPASSLLFQEFRIWKQLADVRYTDKINEIIKQPLPFAWKQKLVNYLQIHPKLNLREGNKKKDGTKNTDVMDVLEFTNKKNFEFNFDNNEDDKIFEGNKTLYAIYSACGEESYKQLAQETKLEKLWHILYMAKDDEWLKDTLICSWGFKEDVANSLVEMGLEEGFSNYSSKVLKSILPFFKEGKDEFDAKVLANYEKAPDEVKDEIILGSKIIQLKNNELRNPVVEKAVTQTIKLVNAILENKDYGINQENLIIRIESTREFKKPKTEREKIRRGNTETDKKRGEFAIFLNEKRKEGTLNFAREIYKNDSIIGKFELWLELGGDKNDLNFKEFEKLAEKKDRVKHALWLECNRICPYTGKVINLSKLFSSDIEIEHIIPYSRSLDDSFTNKTVTFSEVNKEKGDMTAYEYIKGKGEQTFKEFKSRIKVFGKEKEENKFLLEKVPSEFSNAQITNTSYIAKYVQKKLHEVCRDVQFTNGSATGELRKNDWRLGSVLDKIRYEEEKGIDIDNYIAELSLYKKDFEGWRRRKANSTDILRTDWQNITSEITSEYEAETKNPIYEWWTKTQDFEAFRSANGKKDRSDHRHHLLDAIITACCSRSVIQLLSTLNHTREKQGYAMYDDRGNLTREKIKCPLSYEQIKEALKNNLIYHKSDQRLITSKINRVKRKKESEEDPNFVKQKAYSVRGSLVGDNFYGKLKNPRHQGFDKDIVYIKRVALNGENFKDDKALDKIVDANIREILKRRLEDVKYGGKGDKAFSEEALTNNPVYVYSIQEYPNGIPENPTSKEGNPLPVIKKVRVANKNARNLIQLVAKSDEKDVNGKRIIVNENRYAEADGNYIMALYERKEMDKKGKEKVKRDFEIVSFYEAVKKRSNGEKLFSDEKNGMGLMNSCPYLRAGDMVIMYDENEEEINWDDIDILKNKLFKVTELGSADINGYLYGVLKFSQHNKCGSNIKYTSTGFFIKKYHSQLNAIKVKINQLGKIEKILND

SEQ ID NO: 15259 - protein, 1426 aa, unidentified
  REGION 1..1426: note = Cas Enzyme sequence
MKNILGLDLGTTSIGFAHIVEDENKEKSEIKELGVRIVPLTTDEQSDFEKGKSITTNANRTLKHGARLNLDRYQQRRKYLIDLLQKANLITSSSILAENGKNTTHSTWQLRAKAVTERIEKEEFARVLLAINKKRGYKSSRKAKTEDEGQAIDGMVIAKRLYDENLTPGQLSLQLLQQNKKLLPDFYRSDLQREFDLVWNFQKQFYPDILTDSFYKELQGKGKDATSKAFSKRYHFDTAENKGSKESVRLQAYQWRAEAISKQLSKEEVAYVLTEINNNLNNASGYLGAISDRSKELYFNRQTVGQYLYAQLQENKHNSLKNKVFYRQDYLDEFERIWETQASFHKELTEELKKQIRDVVIFYQRKLKSQKGLISFCEFESKEIEIEKDGKTITKSIGARVVPKSSPLFQEFKIWQILNNVTCKRKGIRKKKSSAKSTELDLFNESSQAIFSLDMECKQLLFDELNLKGDLKSDKVLKLLGYSPQEWEINYNQLEGNRTQKALYEAYLKIVEMEAHDVKDILQIKSAKDDWSLDESPLSASEIKEKVKDIFQALGICTKILYFDPLLPVKEFEKQDSYQLWHLLYSYESDDSTSGNETLYRILEKKYAFKREYATILANVALQDDYGSLSTKAIRKIYPNIKENQYSTACEMAGYKHSKLSLTTEELEARELKNIIPLLKKNALRNPVVEKILNQMINVVNALIEKNSERDAEGKITKYFHFDEIRIELARELKKNAQKRYEMTQNINKAKLEHQKISEILQKQFGIKNPTKSDIIRYRLYQELEHNGYKELYTNAPIARDMLFSKNIEIEHIVPKARVFDDSFSNKTLTFHRINSDKGESTAFDYITSLNSEEELNQYLTRVENAYKTKSISPAKYKNLLKKASEIGDGFINRDLRDTQYIAKKAKEILFQVTKNVLSTSGSITDRLREDWGLVDVMKELNMPKYQSLGLTEVEERKDGNKVTVIKNWTKRNDHRHHAMDALTVAFTKPSYIQYLNHLNARKDENNENYSVILAIEEKETIKVPTNNGKNKRVFIEPIPNFRQVAKKHLEEIFISHKAKNKVVTKNVNKPAGTDKQQITLTPRGQLHKETIYGKYQYYVNKEEKIGVKFDKETIAKVSNPVYREALLKRLQANDNDPKKAFTGKNALSKKPIYLDEAKTKTLPEKVNLTYLEEDFSIRKDISPDNFKDLKSIEKVIDQGVKRILIKRLQAYGNDPKKAFVDLEKNPIWLNKEKGIAIKRVTISGVNNAQPLHIGKDHLGKTTLNKEGKEIPVDYVSTGNNHHVAIYRDKEGNLQEQIVSFFDAVVRAQQGLPIVDKTYKQAEGWQFLFTMKQNEMFVFPNEATGFNPAEIDLLDPKNKKQISPNLFRVQKIATKDYFFRHHLETNVKKDNILKNVTWKREGLSGLKDIVKVRMNHLGDIVSIGEY

SEQ ID NO: 15260 - protein, 1426 aa, unidentified
  REGION 1..1426: note = Cas Enzyme sequence
MKNILGLDLGTTSIGFAHIVEDENKEKSEIKELGVRIVSLTTDEQSDFEKGKSISTNANRTLKHGARLNLDRYQQRRKFLIDLLQKANLITSSSILAENGKNTTHSTWQLRAKAVTERIEKEEFARVLLAINKKRGYKSSRKAKTEDEGQAIDGMVIAKRLYDENLTPGQLSLQLLQQNKKLLPDFYRSDLQREFDLVWNFQKQFYPDILTDSFYKELQGKGKDATSKAFSKRYHFDTAENKGSKESVRLQAYQWRAEAISKQLSKEEVAYVLTEINNNLNNASGYLGAISDRSKELYFNRQTVGQYLYAQLQENKHNSLKNKVFYRQDYLDEFERIWETQASFHKELTEELKKQIRDVVIFYQRKLKSQKGLISFCEFESKEIEIEKDGKTITKSIGARVVPKSSPLFQEFKIWQILNNVTCKRKGIRKKKSSAKSTELDLFNESSQAIFSLDMECKQLLFDELNLKGDLKSDKVLKLLGYSPQEWEINYNQLEGNRTQKALYEAYLKIVEMEAHDVKDILQIKSAKDDWSLDESPLSASEIKEKVKDIFQALGICTKILYFDPLLPVKEFEKQDSYQLWHLLYSYESDDSTSGNETLYRILEKKYAFKREYATILANVALQDDYGSLSTKAIRKIYPNIKENQYSTACEMAGYKHSKLSLTTEELEARELKNIIPLLKKNALRNPVVEKILNQMINVVNALIEKNSERDAEGKITKYFHFDEIRIELARELKKNAQKRYEMTQNINKAKLEHQKISEILQKQFGIKNPTKSDIIRYRLYQELEHNGYKELYTNAPIARDMLFSKNIEIEHIVPKARVFDDSFSNKTLTFHRINSDKGESTAFDYITSLNSEEELNQYLTRVENAYKTKSISPAKYKNLLKKASEIGDGFINRDLRDTQYIAKKAKEILFQVTKNVLSTSGSITDRLREDWGLVDVMKELNMPKYQSLGLTEVEERKDGNKVTVIKNWTKRNDHRHHAMDALTVAFTKPSYIQYLNHLNARKDENNENYSVILAIEEKETIKVPTNNGKNKRVFIEPIPNFRQVAKKHLEEIFISHKAKNKVVTKNVNKPAGTDKQQITLTPRGQLHKETIYGKYQYYVNKEEKIGVKFDKETIAKVSNPVYREALLKRLQANDNDPKKAFTGKNALSKKPIYLDEAKTKTLPEKVNLTYLEEDFSIRKDISPDNFKDLKSIEKVIDQGVKRILIKRLQAYGNDPKKAFVDLEKNPIWLNKEKGIAIKRVTISGVNNAQPLHIGKDHLGKTTLNKEGKEIPVDYVSTGNNHHVAIYRDKEGNLQEQIVSFFDAVVRAQQGLPIVDKTYKQAEGWQFLFTMKQNEMFVFPNEATGFNPAEIDLLDPKNKKQISPNLFRVQKIATKDYFFRHHLETNVKKDNILKNVTWKREGLSGLKDIVKVRMNHLGDIVSIGEY

SEQ ID NO: 15261 - protein, 1047 aa, unidentified
  REGION 1..1047: note = Cas Enzyme sequence
MRVFGLDIGTTSVGFAVIDLDEPRGSGQILRMGARIFPEARDVDGTPLNQQRRAKRMMRRQLRRRRQRRRSLNELLAAHGLLPRFGSPEWAKIMAADPYALRDRGLAAPLAPHELGRALYHLSKRRHFKERDLAESEGERSDKEKPEEVEDAKSRDSFVAALRLSGETLGEALARRDPIKERKRGEHATRAIVLDEFKRLADAQTPHHPILRDRAFVGAVEEAIFAQRPVFWRKSTLGRCPLVAEAPLCPKGSWLSQQRRMLEKVNNLAVAGGNVRPLDPEERAAILAALVAQKSMSWTGVRKVLKPIFEARGESEKNVRFNLEYGDERGGLKGNLVEAALAKVFGDAWANHPRKQALRDFLPDALWQCDYGEIGAQRVVIRPEPDRARRRAVLVDRLAADYAVSREEAEALTKLHFPQGWEPYSTKALKRILPELEKGERFGTLLASPEKEAWRDAKFPERDRPTGEILDKLPSPSPKNRDEERRIASLRNPTVVRVQNEMRKVVNNLIDLYDKPDLIRVELAREIGLSKREREERTAGMRANERRRAKAAEDLRANGVADPSDIDIDKWVLWQECQKKCPYTGDAIGFDDLFRSGRFQIEHIWPRSISFDSALRNETLCRQDVNIAKGNRTPFEYFRSQPPEEWARAKDRLDAMVREKAMPRGKAKRFVAETMKDDFAARQLVDTGYAARQARAMLQRLWPDLGPTAPVNVQAVTGRVTAQLRKLWHLNHILAEDGEKTRADHRHHAIDALVVACAHGGYTQKLSRYFELEDVHRKGLGAKPNEAECPPPWPTIREDAAKSVAEIVVSHRVHRKVSGPLHKETIYGDTGREERANGPTYRLFVRRKPLEALTKGELQDIVDMRLRAIIVDWVAAHGGDPKKAFATFPRLGADSPFIRKARLYVKQQLALMAPVSTGYADMGNNHHVAIYQLANGRTDFDVVSLFEASRRLARREPIVQRRRDDNATFVMSLSIGDTLRLAKNPGQQPTMWRVQKIASKGQISLLDLADASPMEPSLFEPMVGGIVSRKGVKLSVDPIGRVRPAGD

SEQ ID NO: 15262 - protein, 1099 aa, unidentified
  REGION 1..1099: note = Cas Enzyme sequence
MDANTAIWGCQVKYRLGLDIGTASVGLVALELDGEGRPVKPVHHSVRIFDEPLLPPKSGGVGKTKKSGRRVHRQQRKLHMRRARRLQRIAQLAPLMGLDPKTIPADKGQRVHKLRAQAAAVEIPLEDLLLVFLKMAKRRGYHGGFKVKKSGDAGMVEPGIGKLKAEMNNAGCGTLGEYLLHRIQNGQHLRFKEEGLFAHRDMVEEEFNRIWDVQKAHHERLRDEDLRKNFHKVIVLQRPLKSPAHMVGNCSLEPMLPRAPMAQPIVQAFRIEKQLADLRWGASSRAEPLSPEQKGVIREQLQAKPEVKFPDLSKALEKAGYPAPQGRELNYERGDRQAMTGDRTFAAMKGLKGRVLEDWNALDAGHQISVINLLADMGSPDAFDDSQWAEKLVGAKAGANKTPRKIKPEVKRFIDQMVETGKFDRLSKMEFDGGRANYSIKALNKLVPIMREKGLDEHDAIAAAYPPDDKEMDAKLEKEKSLPPHRSTGNTVIDVALGQVRREVNAAIKKLGTPPSQIIVELSRDMKVGLTKRSKINDKMRANEKRRKVAAATIKEHNNGRVATESQIRRYLLWQEQGENCPYCERHINNLSDALNGNETEYEHILPRSLTRIGKKRDFLVLAHKSCNQEKGKRTPRQAWGRDEERWNIIERRAEQFEKGRKVTIEGKERTLFKHRGKARQLLMKGFENEVLSDDIIDNFTDRQFQETAWIAKACGKWLRSVCADVSFSRGLLTAHLRRNWKLDTVIPEVRFEEDLPVFDEDYRSNTKESSQQGCAVSKDDFKKYRSYWEGHHGDGIPRTHRRLNKRVDHRHHLVDALVIALTTRRMYQRMAKHYKQVTDSGKNSLRLYAEPGIKGICALALDMVRECQPSHRPDRWPGGGFFKDNPGAIVEENGERFYARRKKLTDLGKTDMDKILPESVREIVGNAYKSRIQKGADHESALKEPIFHPHWKTPIRRVLVRRNKAEDDVLIEHGDSQRIQGKAADSKSSLHKYLEPDGYAYLEYIPGDLTTEPRLVRLHEAKSTSSQTVRLYKKDTVRDSQDERRYVIHQIMAEGPALFLSPVTESIADIGKVRGNRKRKIFGKQIAKRLTLVKDERP

SEQ ID NO: 15263 - protein, 1099 aa, unidentified; identical to SEQ ID NO: 15262
  REGION 1..1099: note = Cas Enzyme sequence

SEQ ID NO: 15264 - protein, 1113 aa, unidentified
  REGION 1..1113: note = Cas Enzyme sequence
MKNFDNDNNVWGFDIGKGSLGEAVRIGNEFKHVESLLIDADFAEIKTAATARRQYRTRAAHKAREAFLEKCLKDAGIEILKRREVGIVDGQWKLLSLGDIRLEKEFPSADETICYNSIALRCKLILGEKLESWQIFKALNSAIQNRGYDADIPWKETETEKNNSEEEYSQKLQLFEKEKDQMLSNLSNLSTEEYSKYNYPCFFKAFKMGLWNPTDPTKVSLRIDHNADKAKGYVVPRSYVEREFVRLVEMASIQYPKLKNKALFILYGITEKAYASYNPQLRERFNLKRGTESDWTALGQKIPRFDNRIINKCKLIPRFNVCKVKKLNEIKNENDLLYYEITLAMKLLNLRFFRNLNIESLDFENFKKLFKIGQENKYKISKTNLKKFLKSISAEILNENQSEIDTPKESGRTSFSRPAMALLKELIFSGTKPSEFHTKKLSTITNTELKKGIVAKDLDFIKLMGDIQWNNIYIPDIQTFNYTQQSIGNSAEKINKLIGSQNDPIVRHRLSFFYERIKYLESQFGVPDRIILEFVRDDFISKKDKDDLHEKMQKRRKEKLKLAEKLDEIKFKGNKMLLKLELFEKQGGVCLYKKNDTFMPSEIPDLEIEHIVPRSRGGPDAIYNYVLTRKETNKEKGDKTPFEWLGGTSEWTSYVDRVNTRKKLLGAKRCQLLLEENAVKLVEKYTALAETAWIAKLAQKIVCIHFGFQFGGTEGKKRVFTVSGGMTSRIRSAYKLNRILHKDITSEEALTYINELKEKLSSDSDNESVKKYLKKSDDLIKAINETGFLRKYLNILEEIEKEALSNTERIIKTEKLDEKNRKNKKHHALDAMCLCFAPVGEDIKKIKFSEIFPIEIRNNIEGIFRSYLDKIIPNNVAKMKPRLEETIYSKRKVGKKECIVRKFDLKSLGYKGRNPKYDLSALQKLVNKDDIINPVTRQIIRDFVNTNPSEQDWINFCDTVRMPSKFGKGALIKRILVYVGKPTEFKNLSKDGCGAYRKGNTHKGQIIWKTKSNKYKVEPIYAHASKTKLEKELKNNPDFLEIVGFFKSGCLVHIQNDVVNNKDEFIIPSGIYSLNTIKTEGRIVLTNSNGEEQNAININYIMKAGMTRITINH

SEQ ID NO: 15265 - protein, 998 aa, unidentified
  REGION 1..998: note = Cas Enzyme sequence
MGTVLGLDVGPNSIGWALIFPEGKEIIATGVRIFPEGVENFGKGGQQESKNVARRIARGMRRRNQRYKMRRDHLIKKLKQIGMYPAEEKEIKRYFSIDPYEVRARGLYEKLTLLEFGRALYHINERRGFKSNRKTGDSEKSKIYESKEGLIGISETEQAIQDGNYRTLGEYLFHLNPNEQRRRARYTKREMYENEFCLLWEKQKQYYPDVLYEETKEIFSQIIFSQRKLKSQKNTVAKCKFEPKKRCSPKSSPVFQYFRILEQVSRLRLIRENGKEDFLSEKERNLLIEKLNTRDKMTFKQVTKILGINETIKFNLEHEGSLRGNRTSHSLAKVFGKKNWQNFTPDEQYSIWHTLHFSDDPDWLRKYAQKQWHLNEKAIENLLKLSLEPGYCRLSHKAMLRIIPHLEKMVTEDGDPITYDKAVEAAGYRFTHVHDRGGKMSKLPPPENIRNPIVQQALFEIRKTVNAIVDEYGNPDCIKVELVRELKLPRKRREQLFYENRKRRAENDRIRKILQDDLGIPEPSNDDILKYKLWEECDKICPYSGKKINSVAQLFNGEFEIEHILPLSRSLDDSYMNKTLCHHTKNVEKGNQTPWETWGDSGEYEEILSRAKKLPYPKYHRFLQKELKEDEFVHRHLNDTAYIAREVRNYLTYICTDVRTVPGTATARLRRFWGLNSILSKNIDIKNRKDHRHHAVDALVVANTERKYIQHFSTFYHYNREARSEHFPLPWDSFRTDAAAAVNQILVSHKIKNAVKGKLHKESYYGLIRDDHGQPQFDSKGQKIYGLRKAVTTLKETEVHKIPDRVIRDTIRAWRDQPKETRPDFPRLPSGRVIKRVRIHDVHTNVIELKKGVFVEPGSNHHIIIFENIKTGKRMGQVVSLFEATQRQKKGSPIIDKTPPDEKHRLLLSLSINEMVLLGEEFEAMDTEHLPPFEELSSKLYRVQKIPASQQISFRLHTVSVLKNDEGQQPGLVTKTPNSFHGIKVAIDNLGHLHRLYD

SEQ ID NO: 15266 - protein, 1419 aa, unidentified
  REGION 1..1419: note = Cas Enzyme sequence
MKKILGLDLGTNSIGWALVNEAENENEKSSIVKLGVRVNPLTVDEQQNFEKGKSITTNADRTLKRSMRRNLQRYKLRRENLIEILKEHNFICDDTILSENGNFTTFETYKLRAKAATEEVSLEQFARILLMINKKRGYKSSRKAKSNEDGVLIDGMEVAKMLYNENLTPGQYSYQQLDKGKKHLPDFYRSDLQREFNKIFEKQQTFYSEILTEELKKELEGKKRDAVWAICAKAFKEKDIELVGIKRQGTTIEQKIENFLWRTKGLSEKLSLEQIVVVLQQINIQINSSSGYLGAISDRSKELFFNKIKKSDGSFRGQTVGEYQMEVLNKNPNASLRNMVFYRQDYLDEFNTIWEKQAEFHTELTEKLKQEIRDVVIFYQRPLKSQKGLISFCEFESRKIEVEVDGKKKIKTVGSRVIPRSSPLFQEFKIWQVLNNVEVFAKGIKRNKQKEAILFDQNEDPLQFGGRRELYQEEKELLAAELTIRKELKKAEILKLLFDNTKNLDLNFNSIQGNLTQSLLFDTYERIVQLTGHDINTNKKFASEIIKLYEEFFVAIGYNADILKFSSDISLESQAMFRLWHLLYSFEGDDSKTGNEKLVKKISELCGFESEYASILANITFQDDYGSLSSKAISKILPYLKAGHKFDVACEYAGYRHSASSLTKEELENKTYKDRLIILPKNSLRNPVVEKILNQMINVVNTIIDNYGKPDEIRIELARELKKNAKEREELTKSIAETTRLHEQYKEILSKPPYSLSYISRNDIIRYKLYEELKDNSYKTLYSNEYISPSSLFNGDFDVEHIIPQSRLFDDSFSNKTLELRRINIEKGNKTAYDFIKEKYGETGDENSLDNYLNRIDNLHKMGVLSRAKYNKLKIQEKDIPDGFIDRDIRDTQYIAKYAKTMLSDLVKFVVSTSGSITDRLREDWQLVDVMKELNWEKYKSLGLTEDFMNEEGNRIRKIKDWSKRNDHRHHAMDALTIAFTKRAFIQYLNNLNARSDKSSSIYGIEQNELYRNGKGKMLFKPPMPLDEFRTEAKRHLENTLISIKAKNKVVTQNINTTKKSGGTNRKVQLTPRGQLHNETIYGSYKKYIVKEETINAKFDAKKIATVTKILYRNALLQRLYEFGNDPKKAFTGTNALSKKPIWLNELHTEKVPEKVKTLSIETVYTIRKDISPDLKIDKVIDKRVKEVLEARLKEFNGNAKQAFSNLDENPIWLNKEKSISIKRVTITGVSNAEPLHDKRDKEGNIILSNDGKKQAVDFVSTSNNHHVAIYRDADGNLQDYVVSFYEAVCRRNLGLPIIDKEFKVKEGWTFLFSMKQNEYFVFPNEKTGFNPLEVDLLNSDNYALISPNLFRVQTMSKVIYGNNIIRDYKFRHHLETSVKDIIELKNITYKQYKTLNFINNIYKVRINHIGQIVSVGEY

SEQ ID NO: 15267 - protein, 1062 aa, unidentified
  REGION 1..1062: note = Cas Enzyme sequence
MTSIRYRLGLDVGSTSLGWWIWEEDVTGEVIRSVDGGVCIYSDSREPKTGTSKATARRVARGIRRRRDRYLKRRDRLMNQLVEFGLMPSNSSKRKELESLDPYKLRVRALDEQLQPFELGRALFHLNQRRGFKSNRVVDSATEQTEQGSIRSGISTLDKVLMDRKYRTIGEYLLSDHKSKKSVRFRPGVESYPSRKHYQDEFNFIRRIQEPLQHLPSEHWDALEQTIFFQRRLRPIEPGKCTLFPDENRAPWALPIAQQFRVFQEINSLQVIQIGERNRRLSTEERERAFHILSTQTKVRFESLRKKLNLRLDSRFNLEGETRNHLDGDKTAAILRKKENFGKSWDQLDLLEQTRTVKILLTRQREDEVIRILQEEQKLSKASARAISTLRLPKGYGNLSEYAMEAIVPHLKQGLLYHEAVTAAFPDRDHSQVDEHKKVDLLPYYPVLLDRHVSRGSNDPNDDLFKKLGKIANPTVHVGLNRIRRVVNAIVMQYGPPAKIAVELARDLKNSFEEKQKIKRRQAEERNKNERRREDLENCGRNPNPEYLRKIRLWEEQGPCHARCCPYCGRILSYEMVLDDRTQIDHILPFSRTLDDGLSNKVVCCNSCNQIKRNKTPFEAFGFSENDKFDYDKMLYRISSNWPKNKKWRFYPDAMARYEDEECGFLARQLNDTRYLSRITKTYLQFLCDSPTQVSVTPGHLTALIRGKWGLNFVLADSNYKDRTDHRHHAIDAAVIALIDRSMLQRVSSAAAAGVNVNRFLPNMPEPTKCRNFRDQIKDHALNHIFVVHRPRHVNTRQSANTTSGQLHNDTAFGIVNSSDSNVSFVGVRRLLLSDLNEAEGRKLLLGKAGPGERIRKTVRDESLRRQLLKVWLSFSERKQSWREFCEYVAKPGRVTKYGVRKLRYTEHKDSLIKIRDINGRVYKGFKPASNARMDIIRLPNGKYKGQCVSTFDANQERLELERSRNHPEVKCVSHLFQNDLIAIGAGNNREILRVVKLAKSGRVCATHHYEGGKLDARDKDVNDPFKYIDMTAQRFVEAGLRKIKIDPIGKIYDPGPIITRA

SEQ ID NO: 15268 - protein, 1104 aa, unidentified
  REGION 1..1104: note = Cas Enzyme sequence
MQYIVALDIGVASVGFAVIDKKTETVIEAGSNIFPEASATDNQMRRGMRQARRLKRRKRTRLDDFTKLWEEYAFAIPQVQENDIVGLKVKALRESISLDELYLILYSYLKYRGISYLEDAEDTSLSGTSAYANGLKLNAKELETNYPCEIQKQRLEQVGKYRGQIQIEDAQGEKLDLSNVFTIGAYTKEIQQVLCTQKNYHSEISDEFCEDYLEIFTRKRKYYEGPGNEKSRTDYGRFTTRLDENGDYITEKNIFEKLIGKCSVYKEELRAASASYTAQEFNLLNDLNNLTINGRKLEEHEKRIIIDKVKTSNTINMRKIIADVMGEKIEEFYGARIDKSEKEIFHKMEVYNKMRKALAEIHVNIEEFSRENLDEIGYILTINTDKEAMMEAFEHANVKLSEEIKDCLISLRKTNGALFSKWHSFSLKIMKELIPEMYQQPKEQMTLLTEMGVMRGQMDKFEKNKYIPVDAADEDIFNPVVRRAVRISFKILNALMKKYGTLEEVVIEMPRDQNSEEQKKWEKERQKKNEKELAYIEKKLAAEYNILLSPTDFSNQKQLGLKLKLWNEQDGKCLYSGKTIEPEDLIKHSELFQIDHIIPRSISFDDSRNNKVLVYGEENQKKGNQTPYYYLIHANNQWSFEQYKALVMKLSKKKEYGISKKKVQNLLYSEDITKAEVLRGFINRNINDTGYAARVVLNTVQGYFRAKEINTKVKVIRGSYTYQMRVNMKLDKNREESYAHHAVDAMLIAFSQLGYEAYRKLQGEFIDFETGEILNAEKWNAQMSDEIYEQYLYGKKWSNIRTQITKAEKQVKYWYHVDHKSNRGLCNQTIRGTRTYEGKTYKINKLDIRTKEGAALFKKLAFSEKESDREKLLVYKNDKKTYENLIQIAQEYSDSNNPFVQYEKETGDCVRKYAKNHNGPRIDKLKYTDGEVGSCIDISHKYGYEKGSQKVVLESLVPYRMDVYYKKEEQTYYLVGIKQSDVKCDNGEYVIDEDAYAINLVREKMIQPGQKRGDLEALGFEFQLSFYKNDIIEYEKDGEIVRERFLSRTMPKVKNYIETKPIDRAKYEKQKLVGLSKTKMIRKYRMDILGNYYMCSRENFSKYC

SEQ ID NO: 15269 - protein, 1457 aa, unidentified
  REGION 1..1457: note = Cas Enzyme sequence
MKHILGLDLGSNSIGWALVQQDFENKQGKIMAAGSRIIPMDQGILGDFEKGNTVSQTAERTTYRSMRRLRERHLLRRERLHRVLHILGFLPPHYDAQIDFTKRYGKFIDNAEPKIAYNNGNFIFMNSFNEMVEDFKKHQPQLFYKKSNGEESKIPYDWTIYYLRKKALSQKITQQELAWLILHFNQKRGYYQLRGEEETESPNKEVAFHSLKVVEVEAEAPNKKGEIWYTIRLENGWIYRRTSKIPLDDWKGKTRDFIVTTDLNDDGTIKVDKEGKEKRSFRAPEENDWNLLKKKTEHDIDFSGKTVGAYIYDHLLQDPNQKIKGKLVRTIERKYYKNELKAILTKQIALQPELFTENLLAGCIRELYRKNERQQQNLLSKDFLHLFVEDIIFYQRPLRSKKSTIANCTLEKRSYIDKETNERKDAPIKVCAKSNPYYQEFRALQWLQNLRIYEIETDREVTAEFIETPQDYEALFNFLMSQKEIDNESLLKYFLLAKNPQIKDKAAKSELKKWLTTYRWNYVYDVADNSSKKYPMNETGYDLQRYLQKVEGLPANFLTFDTTYRLWHLLYSVKDKVEFEKALKRFAKKKQLNETSFIESFKNFKPYPNEYGSFSEKAIKKMLPLMRFGNHWDFNRIDVSTQKRIDDLINGVANEDIRTIIREKAEKYQLNSESCFQGLPLWLAQYVVYNRHAEATDIEKWTSVNDLEAYLEDFKQHSLRNPIVEQVVTGTLRVVRDIWQQYGGGQANFFDEIHIELGRELKKTAEERKQLSNRNQENENTNLRIKKLLAELKEDASIQNVRPYSPVQQELLKIYEEGVFSSTDEIEEDIQKIRKKADPTTPEIQRYKLWLEQKYKSPYTGEVISLTKLFTEEYEIEHIIPQSRYYDDSFSNKVICESAVNKLKTNLLGLEFIQKHHGEKVRVAGNKEVTIFTEEQYKDFVKKHYANNLAKQQKLLLDEIPEKMVARQLNDTRYISKYISEILSKIVRSDEKDEGVNSKNVIPCTGKITTALKQDWGLNDVWNELILPRFERMNQLTQTQLFTSYNDRLQKNLPTVPIEYSQGFQKKRIDHRHHAMDALVIACATRDYINYMNNQHALDKSKDKKEKQQSRIDLRTILCEKKNNNWQFKKPWSTFTQEAKEALEHIVVSFKQNLRVINKATNYYEKWEEKNGVLVKKKVKQEGTNWAIRKPLHKETVSGKIVLDRKISKDKILTATRKAVDITFTEKIISSITDTGIQKILLNYLKYKGSPEVAFSAEGLEELNKNIAQYNDGKKHQPIYKVRIFEEGSKFPLGETGAKTTKYVEAAKGTNLFFGVYQGKEKRSYATIPLNEVIERQKQGLPSVPERNEKGEPLLFSLSPNDLVYVPMEGEIAETIDFNNLSKEQKERIYKTVSFTGNECHFVKSTIASLIKSYDAKSKIGELGSLNKLEVTISGDSRIKEVCIKLKVDRLGNITKV

SEQ ID NO: 15270 - protein, 1070 aa, unidentified
  REGION 1..1070: note = Cas Enzyme sequence
MNYRLGLDIGITSVGWAVLEHNEEEEPVKIVDLGVRIFDRAENPKDGSSLARSRREARSARRRIRRHRHRIERIKRLLEDYRVISLAELESLYHSSQSLTDIYELRYYGLERRLSNQEWARVLIHLAQRRGFKSNRKKENEKEEGKLLAAVKSNQDIMHDKGYRTVGEMFYLDPKFALHKRNKADDYSHTIGRQQVLDEISLLFARQRELGNPHTTIEFENVYKDIVSGQRSFDLGPGDPSPYAGNQIEKMRGNCTFEKDCPRAAKACYSFELFNLYQKINSLRIESAQETSRFLTAEERELIVQLAHQKADLNYSTIRNILELRDEQWFNNLTYGLDNTKETEKKSKFNYLKSYHQIRKAMDSVSKGRIQQFTVSQLDLLGETLTLYKNEGSISRILSEAGFSKQDIDAVLSLNFRGFSHLSLKAIRNILPWLEKGQVYSEAATSAGYNFRGHDSQPQKYLPLKNEQLDNITNPVVRRAVSQSIKIINAIIRKYGSPQLICIELSREMGKSFDERKVIEKQIKENNALNEQVRQKIIEFGHSNPSGQDIVKMKLWQEQDGRCAYSGDPIPIERLFEPGVADVDHIVPYSISFDDSYANKVLVRSSENRQKGNLLPYEYMKNDPVKLERFIVWVNTSVKNYHKKQRLLKKSITDEDRNKWNERPLNDTKYISRFMLNYIRNNLQFAPAEYLGKRRVITVNGSITAFLRKMWGLKKERLAGDLHHAQDAVVVACVSESMIQKITRYYQYYETRYSSNHFVDRETGEIINARQEKFGIKFVEPWEGFRFELESRLSDDPVFRIKAYNLKNYLNPDEVKPVFVSRMPTRKNRGLANEATIRSPRLVEEGFFISKVNITDLILNANGEIKGYYQPQSDLRLYEALKSRLREFNGDGKKAFKEPFYKPTKTGKLGPLVKKVKVIEKSNLNVLVGSGIAANGDMIRIDVFKTEEGYFWVPIYVADTVKKTLPNKAALQSKPYELWPEMSDDDFIFSLYPNDLIRFQREKDKDEFMYYKKAGISTASITVESHDRSYSIPSLGVKTLLLLEKWEVDVLGNRYRVKKERRQYFPGQVR

SEQ ID NO: 15271 - protein, 966 aa, unidentified
  REGION 1..966: note = Cas Enzyme sequence
YGLMPEKEMERKQLEHLYPYFLRAKALDEEISLYELGRAIFHLNQRRGFKSNRKLDSAEKETSRMKDSIKELKKNLNEAGARTLGEYLYKLNIDVPHNAQHKKRPQRIRDYGKDYNFYTDREMYSDEFDLIWKKQSEYHTELTDKKKEHLKEIIFFQRPLKPQPKGKCRFELEEFRAPVAFPIVQKFRIYQEVNNLILLDFDRNEHELTNEQKEIIIQALLKQKTATFKSLRKKFGKEYDEYIFNLESEKRKDLKGDETTFIMKKDLHFGKKWDLFSDSEQDEVIRRIINEDNDIEIEATLITWLQENFGLNEENAQHIKEVRLPQGIASLSKKAINKILPYLMEGYIYSDACAKAGYHHSDFRTGEVYDEGNLPYYGKVMPHHVAFGTNDEDDIDEIQYGKIANPTVHIALNQLRKFANALVKKYGVPTQIVIELARELKLGQKRLKDIEREQTANRRHNEFVAEEIKKIGIENTYQNRLKYKLWEELDNDPAKRCCPYTGKQISISELFSNKFETEHILPKSKTFDDRPLNKTVSYYLANRFKGERSPFEAFGESPENYDWEAILERGMNLPPNKRWRFYPDAMKNYEDQGVLISRMLTDTQYMSRTAREYMSYVCGPDNVWAIPGALTSKFRAKWGLNQLLSDDNEKNRADNRHHAIDAFVVACTDRALLQKVARATEKSRERFIKKMPLPFKDFSHDKMQKKVNDIVVSYKPDHGNAKEATKKNRTVGQLHDETAYGFVSETENKIMLSVHKPLRGLNTLKKINEIADGNIREALIGEINKNKEKKIDDILDAFIQKTGTKRVKIHVEKDKKTVIPIRNKMGNIYKYYTSGNNYCADIYCSDKGKNAGKWQVEIIPMFYAHQQDFEPEWHTKHPTAKKIMRLFINDYVAYDDNENRKIVRVKKMNIDGRLFFIDPTISKSEKDPNATSVKQLQERSARKVGIDILGNVFDPQRHEHNRDKKE

SEQ ID NO: 15272 - protein, 1140 aa, unidentified
  REGION 1..1140: note = Cas Enzyme sequence
MNGLVLGLDIGIASVGVGILKKDIGEIIHTNSRLFSAATADSNIERRGHRGGKRLTRRKKHRSIRLHDLFEDFGLLTDFSKVSINLNPYQLRVQGLDNQLTNEELFIALKNIVKRRGISYLDDASEDGGTVSSDYGKAVEENRKLLAEQTPGQIQLDRFEKYGQVRGDFTVVENGEKRRLINVFTTSAYSKEAERILRKQQEFNKKITDEFIEDYLTILTGKRKYYHGPGNEKSRTDYGRYTTKKDPEGKYITLDNIFGILIGKCTFYPDEYRASKASYTAQEFNLLNDLNNLTVPTETKKLSEEQKKTIIKYAKTAKTLGASTLLKYIAKLIGASVDQIHGYRIDPNKKPEMHTFETYRKMQSLETISVEELPRKVLDELAHILTLNTEREGIEEAINATLKDTFSQDQVLELVQFRKNNSSLFSKGWHSFSLKLMMELIPELYETSEEQMTILTRLGKQKSKETSKRTKYIDEKELTEEIYNPVVAKSVRQAIKIINEATKKYGIFDNIVIEMARENNEEDAKKEYIKRQKANLDEKNAAMEKAAFQYNGKKELPDNVFHGHKELATKIRLWHQQGEKCLYTGKNIPISDLIQNQYKYEIDHILPLSLSFDDSLSNKVLVLATANQEKGQRTPFQALDSMDDAWSYREFKSYVKDSKLLGNKKKEYLLTEEDISKIEVKQKFIERNLVDTRYSSRVVLNALQDFYKEHQFDTTISVVRGQFTSQLRRKWGLEKSRETYHHHAVDALIIAASSQLRLWKKQNNPLISYTEGQFVDKVTGEIISLSDDEYKELVFKAPYDHFVDTLKSKKFEDSILFSYQVDSKFNRKISDATIYATRKAKLDKENREYTYTLGKIKDIYALGTKSPSKTGFYKFLDLYNKDKSQFLMFQKDRKTWDEVIEKIIEQYRPFKEYDENGKEVDFNPFEKYRIENGPIRKYSKKGNGPEIKSLKYYDNLLGKFVDITPSESKNPVALLSLNPWRTDVYYNTETSKYEFLGLKYADLCFEKGGAYGISEVKYNKIREKEGIGKESEFKFTLYKNDLILIKDTETNCQQIFRFWSRTGKDNPKSFEKHKIELKPYEKARFEKGEELEVLGKVPPSSNQLQKNMQIENLSIYKVKTDVLGNKHFIKKEGEEPKLKF

SEQ ID NO: 15273 - protein, 1322 aa, unidentified
  REGION 1..1322: note = Cas Enzyme sequence
MSIVMKKKMNYSIALDIGNTSVGWAVIDENNNLLKHRGRNMWGVRLFEEGQTAATRRNFRATRRRLLRRRQRLDLLQELLAQDVLAKDESFFMKLKESFLVKGNGNKIYNFFNDSDFTDQNFYDKYPTIYHLRYKLITNKEKEDIRLVYLALHHIIKYRGNFLYEGQTFNIQDSTIITDLENLLEYLKENFEYDIEFTKDDLKEVEKILTDSSVIKSDKVKEASEVFKADKDSQKVLKEVFKAVLGNKFDFLVICNLGEAENQEDYKTNLSDEEKEPLFETLLGDHFEVYSLLKNIYSSIILREILGTDEEGKVRLLSQAMINRYDDFKKDLAILKRLIKEHFKGKYNYIFREVDDKTPNYYNYMNRPGKTSQIDFYNFLKKVLNQKREELADNDDYKYCIKRIEDKNFLLRQRIKVNAAIPYQIHKQELIAILENQAPYYETIRKNKDKIISLLEFRIPYYVGPLNYDRNNNKYAWVVRKKNGEKIYPWNFEEVVDVKASAEEFIRRMTNKCTYLPKEDVLPKYSLILMEFNVLDELNKITINGDKLSYELKLEIIEECFKKYKIVRESHLVKVLRKYYKYYNSEKLDIRGYRKEKQFAGSLTSYIDFTNIFGEVNDSNFEMIETIIKWITIFQDKKILKEKIKENYPEITDAQLKKILALNYSGWGRLSRKLIYGITTPDQSGLESTILHIMRKTNQNFMQVINSNKYCFAKKIEKIQKESIQKKEKVTLADVQDIPGSPAIKKAIWQAIKIVNEIIKIMKCDPQNIYIENTRSSGKKERTRSRVTWLKECYKKLKVETDIYNQEVARELNEHLETIDNEKLFLYFIQNGKCMYSGETLDPQRLIDYEVDHIIPRSLIKDDSIDNKVLVLKKYNQLKADRDVLPYDIISKMKPYWEKLKDCGLISNKKFYNLCRKEFNEEDIAGFINRQIVETSQIVKHVVNLLYANYPNTKIHTIRPLLVSILREQLSLYKIRDINDYHHAHDAYLTGCVANFIRIRYPKLEKEILYSEYLRLPTERRKYNSGFIVNSFVRNHIDDTTGEVVWDANEQISKIKKVLNYKDCFITKKVEESTGVFYNQTLVGPNMATAPIRASLDPKIYGGYTNVNIAYMVALEYRKGTQMKKVLAGIPIMFAQRFKRDQEALIEYLKEQFRTNEIIILKPKILKSQLVDFDGHLLYLASSGEFNNAKQLILDYEFNELVYLIDKDKLSESDENHKRLNKFYQVFIEKLEKHYPFYQNIARKFKNATNDFEKLDFTKKCKFVLEMLKITQANSTNAYFKNFGIGKLGDRMDRLNGKSLDFDKTIFIDQSVTGMYEKRYRL

SEQ ID NO: 15274 - protein, 1202 aa, unidentified
  REGION 1..1202: note = Cas Enzyme sequence
NTDSGDVNFEMVKDAGETVMNYLYDSMEESTAKISYTEVIEILADKGISRSTKKDKISSLLGIKKSNKEQTELVKCLCGMEADARVLFRIEAEEKIKIAFQQASFEDEKEEIEVAVGEDNYAIIEYMKQLYDYSQLQSVLKGFEYLSDARVEMYDKHKEDLILLKKVYKNNLSQEKYNIMFRSSEDGTYSAYCNSLNAENSLAATKKYRRNMKKRGKEDLYARIKKDLKGVEDAEAEKILKEIELEAFLPKQITGANGVIPNQVHRKELKKILENAENHLPFLKEKDSSGYTVSERILMLFSKNIPYYVGPVGKGSQNGWAEIREEGQILPWNMEQKLDMEKTSERFITNLVRECTYLSGEKVLPKQSLLYERYCVLNEINNLQINGKRIVPELKQDIYQDIFMGSRLGKKVTKKVLSSYLLNRGLISDESEISGIDREIHAYLGSYGKMYAVFGEKLREEAIRNAAEEMIYYGTIYGDSKSMFRKKLKQYISSGIITDVQAKRIAGYKFKDWARLSKNLLCLNGCDKHTGEIISLIRAMWEYNLNFMELINSEEFTFRDELEGRKRVLEKSLHEFQFEDLKDYYYSAPVKRMIWQTVLALQEITQIMRHNPKRIFIEMTRTEEEKGEPGRKASREKRLLKLYENIRESRDWTSEIKNAGASGSLNSKKLYLYYLQMGKDAYTGEEIDIEELFTDNRYDIDHIYPRSLTNDNNIDNNLVLVSKKINQDEKKNDYPLPEKVRSNPKVWELWSSLHKRGFMNDEKYNRLTASTPLTDEQLAGFIARQLVETAQGTKGIADLFKAMMPEAEIVYVKARNVSGFRKQSFLKSRLVNEHHHAKDAYLNIVVGNVYYTKFTRNPMNFIKNEVQRSSNKYNYNLSKMFENDVVRNGEIAWSVQKNHKPGTMQVVSEVMCKNTPLITRQAFEQKGELFNIQPVGKYSAKAGNYVPLKVKDTKLQNVEKYGGYTSLKPAYFTFIEHGSEKKRKRCFEVVQSYYASQIKKESDLIEFLEKNGYKNPRVIAGKTKKNSLIKYNGYLLYVIGMDARKNIEFSNATPMCLENKYIQYVSKLEKAYNEIILSERKKTEPRLSEKVTIENNLKLYRELTDKHVNSIYRNHPRSIGDILEKGEDKFESLDLVHQIKILYNLVLYTSFNRGTFSLTDIGGPKEVGRIRISGNMTEAKELKLIHYSVTGLYKKEIDLLNQ

SEQ ID NO: 15275 - protein, 1444 aa, unidentified
  REGION 1..1444: note = Cas Enzyme sequence
MKTILGLDLGTNSIGWALIKQNFENKQGEILGLGSRIIPMSQDILGEFSKGNSVSQTAERTAYRSIRRLRERQLLRRERLHRVLNILGFLPEHYAKSIDWEKRLGQFLPETETKLVYNQDNQFIFKKSFEEMLEDFKKNQPELVLNNRKIPYDWTLYYLRTKALRQKIEKEELAWILLNFNQKRGYYQLRSEEEEEEEEEENPNKLVEFHALKVVDVIADGVQKGKSDIWYSVVLENGWIYRRSSKTPLSDWVGKTKEFIVSTDLNDDGTVKIDKEGKEKRSFRAPSENDWTLLKKKTEADIEKSHKTVGEFIYNALLQNSNQKIKGKLVRTIERKFYKQELREILNKQKEFYSTLNDKDLLNKCIEELYPNNEDRRKSLQNIDFTRFFIDDIIFYQRPLKTKKSLISNCKFEYRTYKDSSGNMQKKHIKSTPKSHPLYQELRLWKFVKDLRIYEREKIIEDKLYTDVNVTNEFIKSEDELVELFDWLNQRKEIKQDTLLSSYFRVKKRNKGDERLPYRWNYVEEKEYPCNQTHSQIAGCLNTALDISPDFLTKEKETALWHILYSVSDKIELEKALKSFARKNNLPEENFTNAFKKTPPFKNEYGAYSEKALKKLLPLMRLGKYWSFNDIDEKTQRRIGRLITGEVDDSIKNRAREKAINLTDISHFKGLPEWLAAYVIYNRHSENEECEQWKTYEDIDKYLEDFKQHSLRNPIVEQVIMETLRVVRDIWKKYGNFHEIHVELGREMKNDKKERERLSKIIIENENTNLRIKALLMELANDGNTENVRPYSPMQQEIMKIYEDGVINSDIEIPEEISKISKLSQPTKSELIRYKLWLEQKYRSPYTGEIIPLGKLFTHHYNIEHIIPQSKYFDDSLSNKIICESVVNAYPYKDNLLGYEFISKNEGRIVPELSSTNKTVKIFTLQEYQNFIQQHYSKNQAKRKKLLLEEIPDQMIERQLNDTRYISKEIIRILSNIVREENETEATSKNLITTTGKITNELKKDWGMNDVWNRIVTPRFERMNTLSNSNLFGQWENKEGKRVFQTNVPLEYQKGYSKKRIDHRHHAMDALVIACATRSHINYLNNKSAKSDAKDSRFDLRKKLCFKSKSDENGNYKWRFEKPWNTFTENAQNELEKTVVSFKQNPRVINKTVNYFQHYVNGKKVTDKQVKGDNWAIRKSLHKETIYGKVDLPHIKVPKGKILTATRKTLDTSFNLKTIESITDIGIQKILKNYLQNKENNPDLAFTPEGIEDMNRNIAQYNDGVQHKPIYKVRIFEIGSRFALGETGNKKYKYVEAAKGTNLFFAIYANEDGKRNYETIPLNTVIERLKQGLGAVPEINEKGDKLLFYLSPNDIVYVPVNEDDRLIISGDLSKEKCENLYKMVSSSGTQCFFIKSEVATSIVNKMEYSPLNKMEKSIDGIMIKEVCWKVEVDRLGKITKYSND

SEQ ID NO: 15276 - protein, 929 aa, unidentified
  REGION 1..929: note = Cas Enzyme sequence
DLSPWQLRKQGLERLLTDEEFARVLVHFAKHPGFQTNRKSAPPNEETTFTKAGNDLYQAMQADGGKTMGSWLADKPKQRNDHGDYGRTIIRDHLREEIKILFKAQSDFGQCKATDRLCKDVIKFAFYRRELQSSLGMVGNCAVYENELRAAKKAYHAELFVALSRLVNLKILSRHGVGRTLTIDEIALFEKTVLTNNSITFAQARKLLSLHDDETFNLASYTYKPDEDITHDEIKLRAEKACLVEMKGFHDLRKGLEKLSKMDWHAIASRPDDLDQIAYALSFFESEDDIRFQLASLNLSEQQIVALLKIPDFSKTIDISIRAAKDIIPYLRCGKTYMTAVLDLCPDHLKRSGDQALLPPLSQSTKNPIVDRSLSQIRKVVNALIRKHSMPDYFHVETARELGRNFKDRKKIEAENNERKKFKDKTRKHALEIFGYEPNGDELARFRLWKEQKMYCPYSGEQIKPHHLSNGTDTQIDHILPYSRSFDDSWSNKILCFSAENQAKQNLTAWEYMDQKNMTSALEAFAKGQNQHRSKKLLIQDFNTDKEKEWKSRHLNDTRYVARALAAYLEQNLLPNKGVKKIVRTRKGALTSKLRHLWGLPEKDRDNDHRHHGVDAVVIACATQSMVGRVARWNRYQRKTKNDPGFFADAPWENFRKQVLAKRDEMFVTRQPSRKTKGQLHDATIKSLRENDDDTWRAVKRIKLPSLKLGDLKNIIDVDFECGNAIGRNAVLYNVLHERLTAFDNDPKKAFAEPIYMPLKAGKTGPNGENHGPEIKRVRVYDNAKAGFRLPHKSIADNSEMAWTEVYEKDGKFYLLPIYTWQVATKKWPKALITAGKDEANWPLVDETYDYHFSLYKNDFVRVEKKSEIIEGFFKGTHRGTAAIRIEEHKGSKTDEPGTKTLKSFKKYNVGIFGDRTEVKESAPWRGEP

SEQ ID NO: 15277 - protein, 1125 aa, unidentified
  REGION 1..1125: note = Cas Enzyme sequence
MIPHPANLPTRGMMMDWRLGLDLGTNSLGWAALRLKPLATTDDVADRQDTRREPDGILAAGSRIFSDGRDPKSGASLAVDRRDARAMRRRRDRLQQRQRALMKYLVADGLFPADVAERKALEREDPFALRARALDEALPLPLLGRAIWHLNQRRGFKSNRKTDKPDEDAGKIAIGIGRLREKIAEDEAACDAEPGSWTFGKWLHERRQPTEDHPDGRSVRTRLRPEDGADAKGTGYDFYPDRALLEEEFDAIWTVQAPHRLGVLTREVHDRLYEIVFHQRPLKAPVVGTCTFGSGETRLAKAHPLFQRRRLLEEVNALKIVRAGEIAERLTPEQRDLLVLKLKDKNEVSFESLRKTLRLDPDARFNKESENRTKLKGDEVAAVMGAKTRFGTRWQHLSPDEQWTVVSKLEAAQSDEDVAAFRAWIVDTYLFTQEQAKAVSAARLPQGHGRFGETATRGLIEALTFERDSQGRVVVYSEAVTALGSGRHHSDFRTGEIHDSLPYYGTVLERHLLPGTGNASDPDEKRIGRLTNPTVHIGLNQLRRTVNRLIERFGPPAEIAVELARELKLTDEEKKKRNRENNENRLAAEMRSRKLLEIGQPDTGANRALLKLWEELDGNALGRQCIYTGQVISPTMLFSGEVEVDHILPFQATLDDSNGNKLVCIREANRLKRKRSPFETWGHTDQWEDIAARAARLPRGKRSRFEPDAMERHKEDGGFLARQLVDTQYLSRLAREYLSSLYPGSGEGSSKVWVSPGRLTEMVRRKLGLNDLLPDHNFAGGADQPKNRLDHRHHAIDAIVIAIVDRGMLNAIARASGLEGQEGRERIKIPAPWEGFRDAVSETVRAITVSHRADHGTAGHGNSSTAGRLHNDTAYGLTGATDAKGNTIVVRRKPLGSIKPADIPTIRDPDLRAELHKWIDGLDGKALDQALAAFSGTGPLQFRGVRRVRVTEPLSVIPIRDREGRIYKGYKGGSNYRYDVWEMPDGKWITTWKDCEGVIRSSVVSMFDAHQPGELARPHPAAKYVLSLMQGDMIAIERQVGVREIMLVTQFWQNGQVRLVAHNEAGKLDDRNKSPDDPYKNFSPTCGGLKKLRARKVGIDEIGRVRDPGFPARTRRRPTRPKAAA

SEQ ID NO: 15278 - protein, 1099 aa, unidentified
  REGION 1..1099: note = Cas Enzyme sequence
MQLGLDLGTNSLGWCLYLLDDHGFPFAIKAMGVRIFADGRNPTSKDSLAVERRIARGMRRRRSRYLQRRDALFAALVLHGLMPAGRAEAEKLKGEDPYDLRVAALTRALQPYEVGRALFHLNQRRGFKSNRKADRRRNDKDDGKIKQAEIALDQAMAEAGVETLGEFLHAQDTKRVRMAADGSGYEFYPQRRHYEHEFDRIWHEQARHHPDLLNSDARAHVRGIIFRQRELKSAKVGKCTFLEELRIAKAHPLFQERRLYEEVNQLRIRVGGEERPLTRDERDKLVMALKAKKKISFESLRKRTLRLDPDARFNKESDARKELLGDEIAVEMGRADRFNTRWAHFDMAKRWTIIERVLNEPDHAALTEWLVAEHGLDTGAADQVAAVHLPEGYGRLGETASRLILASLKDEVIDYDKAVERNAAILGHHSDRRPEEGRDDLPYYGEVLQRDLAPGSSDPDDPDDLRYGRVSNPTVHIGLNQLRRVINEIIAKHGKPDRIILEMARELKQTDKQRARASADIATNTRRAEERSRILIQHEIEDNGANRMRLRLWQENAPASVMDRFCPYCGTTGRPIGIRQLFHSSEVEIDHILPYSRTLDDGPANKVIVHSACNRQKGNLTPHEKWGPDSVHHDPVRWDAIVDQVSRLHSSKQWRFLPTAMDKFENDGGFAARQLVDTQYLSVLAGRYLGSLYGKRADAELGDKRAVFVIPGRLTSMLRRVWGLNSITSDHNKVDNRHSDAPKNRLDHRHHTIDAAVAGLMTPALLHQIASVAAHAERDHLKRLFGDLPQPWSTFRDDLKQAIDSVIVSHRPDHGLKPKAALKQSGPPHMTAGRLHNDTAYGLTKRVNANGIPLVVHRVPIASIKPEHLIDGGAGRKPAWIVDDKLREALAFATRGKTEKVEFARAVQAFADNHDQFGGIRAARVVEAQNLILIRDRSGKPYKGYKGDSNYRYDVWEMPDGRWVTGWKDRDSVAHCSITSMFDAHQPGDEPRPHPAARKVLSLHRDDVIAFDRGSGRELMRVVKFSPEQLALAPLHEANVDARSRDKESDFKYTFPAPSRLKEWKARQVVVKATGIVRDPGFPARTARRTTRPKQQPAE

SEQ ID NO: 15279 - protein, 1045 aa, unidentified
  REGION 1..1045: note = Cas Enzyme sequence
MYKKDFRLGIDMGSTSLGWCMLELNEHNEPCNVIKMGVRIFSDGRKAKNLEPLSVTRRSYRSQRRNLDRYLYRIRNLVQFFMEEGFLPIEKEVRDKFFTIDPYEIRVKALDEKIELPELARAIIHLAKRRGYKSNRKTDKDDKDNKDKKNSYTEAINNLKENLEATQARTLGEYLWQKNVDLPEKKQHFKKPLKFRYDKKETDDEIMLVQKKFHPTLTEEIIAKIRHTIFFQFPLQPQKVGKCQLLPEFERCPKAHPLFQEFRLRQNINNLKLIDISDNSVHELSAEQKNLLFDFAKTKANAALKNMRKKILAKEADNFIFNFESEARKDFQGDLTFCEFHKDKNKQLAPIWDNADLKKKELIIEAINGDTSDEIAISKLITLGISQEIAEELINVNLPDGHGNLSKEALEKLLPAMRNGEIYAKACELNGLKFSDDYNGEIYDEGNLPYYGELLRKETLELARKSGDTNADEFGKINNPSVHIALNQLQKMVNAITKQYGAPKQIVLELGKSIKLSTEQIKDLNNKNLKNQKYNEKIAEMLEKAGIENNYENRLKVKLWEELDQDPLNRRCIYSGKQINFTELFSPKYEIEHILPKSKTFDDSIANKTISYYIANKYKGERSPEEAFGNSKDGYDWNQISARSQHLPNNKKWRFLADAMDKFNDENEVIARLLNDTRYMARVAAKYMYYVCGKDNVWTVTGKHTAMLRGKWGLNSILGDDDNKDRSDHRHHSIDAFVIALTSRSFVKQLANTIKNSRDRFIEKLAPPYPDFDYDNFKNTVHSIVVSHKPDQINSKTLQKRNQTTGPLLQEQAYSYLGPNPENKNQNLYLIRKKIQKLTLKDVENIYSPEWREKISSISDLCNDEKEFKEKLNELAKIRNIKKLKMIEPKDPQTMIPIKNKEGKIHKYQASGENAYAEIYLPRPQEPNCKWEMEVVNSFFANQPDFIPQWKKDYPKGKKIMRLYKNDIVALDTSINNRKLLRVRKIRISGIYIRDLNISQKDDDKGEFYSVRQLHLKRACKAGVDILGRFFDPKAGKENANAGNQ

SEQ ID NO: 15280 - protein, 903 aa, unidentified
  REGION 1..903: note = Cas Enzyme sequence
MIACFIVFVKQQFSGSRVMQTITTLGLDLGTNSLGWCLIETTGEPGEREEGRIVDIGVRIFSQAEMAGRDPQSKTSLAVARREARGMRRRRDRYLRRRTRLLDLLTRHGLMPAGEAERQRLLRDTDDGKGGDLSGTVLALRARALDHALEPHELGRVLFQINQRRGFKSNRKADSNDPEQGKIAEAIGRLDAQMGESGARSFGEWLHLRRLDGQPVRARMTGDGKGYTFYPSRDVLEREFDLICRRQRAFHAGLLDEDLIAELREAIFFQRRLRPVLPGKCSYNPKEARLPKAHPLFQAFRLVKEVNELEIVGEDQQHRKLTPEQRDTLLLLLRTGLNKRGTLPFSKLRRALKLGKETRFNKESDNRPELEGDVVHFRLSRPGCFGNGWAGLPPARQAEIVERLRTEADRDALIGWLRVDCGLAAENAREVADTVLPQGFCRLGPTALAALLDEMTAGRDENGFVITEAAASIRVYGRTNSQVDPDRAALAELPKYQEVLERHIPPGTGGEARPEDPEWDEAMGRITNPTVHIALNQLRRVVNRLIAKHGRPNRIAIELGRELKLNEQKRLEVNKRIGENTRAARARSEQLANVHEQTDNGYNRLRLKLWEELNPQPLNRVCIYCGGTISASMLFNGETDIDHILPYSKTLDDSQGNKLLCCAPCNRTKGNRAPADVPQWTMRYDDILARATTLPRNKQWRFAEDAMSRIGDEEGFLARQVTDMQYMSRLALTYLAALYPAEQADVDGVFRRHSRVRALPGRMTEMLRRNWGLNDLLHDHNHAEVAKPKNRLDHRHHAIDAAVIACTSRALIQKLATAAGRAEADGAERVAREVAMPWPGFRDELRARVREVIVSHKPDHGTVSRAGDARGRGKTAGKLHNDTAYGFTGETDEKGNALVVRRV

SEQ ID NO: 15281 - protein, 1421 aa, unidentified
  REGION 1..1421: note = Cas Enzyme sequence
LKKKTEKEALAFNFEKGYINEDTKEPKKYISTRIYGILKQDAKTGNRTKIIGGMFQVVDRDFYREELNQIIATQRKFHKNLEDKKVFEQCVNTLYPKNKNHQEALLKNKNAIQHLLVEDILLYQRPLKSKKSEIANCKYEIRYWKKIEDKNGIPIEEVDIETGELKVKTEPIYRKVISASHPYFQEFRIWDKLHNLRLIQLEKEIDGKKLTNQDVTKEYFKSEKDYQDIFEYLNNRKSLSQDQFLAYCKKKYKIDYKKKDSNYTWNFPEDEELKGNETRVSFATRFNRRGFKEYNDFLTLEKEKELWHYLYSVNYKERKENNSKSIKTFFDRFLEDSGITDDIKEKIIEDFTNYPKFASRFCAYSEKALKKLLPLIRLSEPKVTDRWSTEQWYLIWKEKLAKRKEEILRKLKEIDFNAENIDYNKVVNTNVDLQKGEIPFPKGLFNTFKSFEKLEDFIKLNLTQASYLVYGRHSELAQAKYWTSPNDIRKQLHQELKQHSLNNPVAEKVLLEMMQVVADIWDYYGEKEEGSDSPKKLFDRIHLEVGRELKKSAKEKESESKRMSGNRAQNKRIRQVLEDFLSQNPYNANPKNSDHFERLKIIEEGAEYIKNTDKEFFNNKSYNKKDIEDILKKTNITKADFEKYKLWIEQGYKSPYTNLMIKLTDLFDGNKYNIDHIFPQASVTNNSLSNKVVCEREVNKLKSDQTGRNFINNPKQREIYCVAHSRKVSVVNDDTYVGIVKTQFSGTKRYILLSKDIPKGFTSSQMNNARHIARKAMELLSHIVREPREVEFRSKNVLPVTGRVTTLLKRAWKLNEVWTELVSPRYIRLNKLTQSNLFGEWQVSKNGQKYFDCNLDESIREKDESYDIKRIDHRHHALDALVVALCTEEHVNYINNINANANAKSGDYGKQKRIEKYRQTLKRKIKFTKKDDEQDENNWYYMLPGEIRQTGAENSRRDSVLEKAYLYKEFDSFGQDYKKMVLTALQDTIVTFKQNLRVINKTVNRYNNTPNKNKFEKQNTDNGQQQNWSIRRSLGKDTFYGKKNINGEEKIVIRKDLDTSFNRDKIKTITDMGIQKILFNHLKQYDTVELPFEEAFVYFDALLERQEFEAIINDDENEFQSVEDLIEHLKENKNKYDKTDYSKLNVFVEKVAERDFRNENEIKEHSEIAFTPEEIEEMNKSENLQKLNGGKNHAPIRKVRISRGFGNQRALNEEDKESVKSKQYVVNDAGSNLYLGFYERVYQDDNGNEVRDRKFKDIGLMELIETLKQDKAKRLNPLPDKIYDDKLNEYNWKFTLSPLDLVYVPTDEEVETPEKVDFNNLPKEQTERIYKYVDGSEDIANFVPYAVSKPIWRFHGKKNKEIFKELTESNNIDISEKELIQNEFGLGSQQNKNQNMLDGQTQVKKICWKLKVDRLGNISKA

SEQ ID NO: 15282 - protein, 1114 aa, unidentified
  REGION 1..1114: note = Cas Enzyme sequence
HYLYSVNYKERKENNSKSIKTFFDRFLEDSGITDDIKEKIIEDFTNYPKFASRFCAYSEKALKKLLPLIRLSEPKVTDRWSTEQWYLIWKEKLAKRKEEILRKLKEIDFNAENIDYNKVVNTNVDLQKGEIPFPKGLFNTFKSFEKLEDFIKLNLTQASYLVYGRHSELAQAKYWTSPNDIRKQLHQELKQHSLNNPVAEKVLLEMMQVVADIWDYYGEKEEGSDSPKKLFDRIHLEVGRELKKSAKEKESESKRMSGNRAQNKRIRQVLEDFLSQNPYNANPKNSDHFERLKIIEEGAEYIKNTDKEFFNNKSYNKKDIEDILKKTNITKADFEKYKLWIEQGYKSPYTNLMIKLTDLFDGNKYNIDHIFPQASVTNNSLSNKVVCEREVNKLKSDQTGRNFINNPKQREIYCVAHSRKVSVVNDDTYVGIVKTQFSGTKRYILLSKDIPKGFTSSQMNNARHIARKAMELLSHIVREPREVEFRSKNVLPVTGRVTTLLKRAWKLNEVWTELVSPRYIRLNKLTQSNLFGEWQVSKNGQKYFDCNLDESIREKDESYDIKRIDHRHHALDALVVALCTEEHVNYINNINANANAKSGDYGKQKRIEKYRQTLKRKIKFTKKDDEQDENNWYYMLPGEIRQTGAENSRRDSVLEKAYLYKEFDSFGQDYKKMVLTALQDTIVTFKQNLRVINKTVNRYNNTPNKNKFEKQNTDNGQQQNWSIRRSLGKDTFYGKKNINGEEKIVIRKDLDTSFNRDKIKTITDMGIQKILFNHLKQYDTVELPFEEAFVYFDALLERQEFEAIINDDENEFQSVEDLIEHLKENKNKYDKTDYSKLNVFVEKVAERDFRNENEIKEHSEIAFTPEEIEEMNKSENLQKLNGGKNHAPIRKVRISRGFGNQRALNEEDKESVKSKQYVVNDAGSNLYLGFYERVYQDDNGNEVRDRKFKDIGLMELIETLKQDKAKRLNPLPDKIYDDKLNEYNWKFTLSPLDLVYVPTDEEVETPEKVDFNNLPKEQTERIYKYVDGSEDIANFVPYAVSKPIWRFHGKKNKEIFKELTESNNIDISEKELIQNEFGLGSQQNKNQNMLDGQTQVKKICWKLKVDRLGNISKA

SEQ ID NO: 15283 - protein, 1794 aa, unidentified
  REGION 1..1794: note = Cas Enzyme sequence
MKKILGLDLGTNSIGWALVEIDHDKGIVKIMGLGSRILPMDAGEIKDFESSGKIKSTAAQRTEKRGPRRLNERYLLRRDRLHLILDLLDALPKHYKIEINFKTKKGEKCGQFKKNTEPKLAYLPKPKGKKAEFLFMDSYNEMIDDIGCKGVKNKKGNRIPFDWTLYYLRQKALSEEISLEELAWVLLSYNQKRGYEKTEVEDISTKENEIIEELDLRVNEVISKVDAKGKQYYEIYLDGNDKFVYNEYSDIQMTFKDDLKELIKTSKVDRQGNIDDKKTEFTVVDIYPLEIKNVHYEKVDGKHKYTLKYHNGWEEIKPHKKNYTFKYKNALNKSYDYIVETVYDNNGELKTQQGKERKLREPDLSDNSSDWTLLKKKTEKEALAFNFEKGYINEDTKEPKKYISTRIYGILKQDAKTGNRTKIIGGMFQVVDRDFYREELNQIIATQRKFHKNLEDKKVFEQCVNTLYPKNKNHQEALLKNKNAIQHLLVEDILLYQRPLKSKKSEIANCKYEIRYWKKIEDKNGIPIEEVDIETGELKVKTEPIYRKVISASHPYFQEFRIWDKLHNLRLIQLEKEIDGKKLTNQDVTKEYFKSEKDYQDIFEYLNNRKSLSQDQFLAYCKKKYKIDYKKKDSNYTWNFPEDEELKGNETRVSFATRFNRRGFKEYNDFLTLEKEKELWHYLYSVNYKERKENNSKSIKTFFDRFLEDSGITDDIKEKIIEDFTNYPKFASRFCAYSEKALKKLLPLIRLSEPKVTDRWSTEQWYLIWKEKLAKRKEEILRKLKEIDFNAENIDYNKVVNTNVDLQKGEIPFPKGLFNTFKSFEKLEDFIKLNLTQASYLVYGRHSELAQAKYWTSPNDIRKQLHQELKQHSLNNPVAEKVLLEMMQVVADIWDYYGEKEEGSDSPKKLFDRIHLEVGRELKKSAKEKESESKRMSGNRAQNKRIRQVLEDFLSQNPYNANPKNSDHFERLKIIEEGAEYIKNTDKEFFNNKSYNKKDIEDILKKTNITKADFEKYKLWIEQGYKSPYTNLMIKLTDLFDGNKYNIDHIFPQASVTNNSLSNKVVCEREVNKLKSDQTGRNFINNPKQREIYCVAHSRKVSVVNDDTYVGIVKTQFSGTKRYILLSKDIPKGFTSSQMNNARHIARKAMELLSHIVREPREVEFRSKNVLPVTGRVTTLLKRAWKLNEVWTELVSPRYIRLNKLTQSNLFGEWQVSKNGQKYFDCNLDESIREKDESYDIKRIDHRHHALDALVVALCTEEHVNYINNINANANAKSGDYGKQKRIEKYRQTLKRKIKFTKKDDEQDENNWYYMLPGEIRQTGAENSRRDSVLEKAYLYKEFDSFGQDYKKMVLTALQDTIVTFKQNLRVINKTVNRYNNTPNKNKFEKQNTDNGQQQNWSIRRSLGKDTFYGKKNINGEEKIVIRKDLDTSFNRDKIKTITDMGIQKILFNHLKQYDTVELPFEEAFVYFDALLERQEFEAIINDDENEFQSVEDLIEHLKENKNKYDKTDYSKLNVFVEKVAERDFRNENEIKEHSEIAFTPEEIEEMNKSENLQKLNGGKNHAPIRKVRISRGFGNQRALNEEDKESVKSKQYVVNDAGSNLYLGFYERVYQDDNGNEVRDRKFKDIGLMELIETLKQDKAKRLNPLPDKIYDDKLNEYNWKFTLSPLDLVYVPTDEEVETPEKVDFNNLPKEQTERIYKYVDGSEDIANFVPYAVSKPIWRFHGKKNKEIFKELTESNNIDISEKELIQNEFGLGSQQNKNQNMLDGQTQVKKICWKLKVDRLGNISKA

SEQ ID NO: 15284 - protein, 1472 aa, unidentified
  REGION 1..1472: note = Cas Enzyme sequence
YTFKYKNALNKSYDYIVETVYDNNGELKTQQGKERKLREPDLSDNSSDWTLLKKKTEKEALAFNFEKGYINEDTKEPKKYISTRIYGILKQDAKTGNRTKIIGGMFQVVDRDFYREELNQIIATQRKFHKNLEDKKVFEQCVNTLYPKNKNHQEALLKNKNAIQHLLVEDILLYQRPLKSKKSEIANCKYEIRYWKKIEDKNGIPIEEVDIETGELKVKTEPIYRKVISASHPYFQEFRIWDKLHNLRLIQLEKEIDGKKLTNQDVTKEYFKSEKDYQDIFEYLNNRKSLSQDQFLAYCKKKYKIDYKKKDSNYTWNFPEDEELKGNETRVSFATRFNRRGFKEYNDFLTLEKEKELWHYLYSVNYKERKENNSKSIKTFFDRFLEDSGITDDIKEKIIEDFTNYPKFASRFCAYSEKALKKLLPLIRLSEPKVTDRWSTEQWYLIWKEKLAKRKEEILRKLKEIDFNAENIDYNKVVNTNVDLQKGEIPFPKGLFNTFKSFEKLEDFIKLNLTQASYLVYGRHSELAQAKYWTSPNDIRKQLHQELKQHSLNNPVAEKVLLEMMQVVADIWDYYGEKEEGSDSPKKLFDRIHLEVGRELKKSAKEKESESKRMSGNRAQNKRIRQVLEDFLSQNPYNANPKNSDHFERLKIIEEGAEYIKNTDKEFFNNKSYNKKDIEDILKKTNITKADFEKYKLWIEQGYKSPYTNLMIKLTDLFDGNKYNIDHIFPQASVTNNSLSNKVVCEREVNKLKSDQTGRNFINNPKQREIYCVAHSRKVSVVNDDTYVGIVKTQFSGTKRYILLSKDIPKGFTSSQMNNARHIARKAMELLSHIVREPREVEFRSKNVLPVTGRVTTLLKRAWKLNEVWTELVSPRYIRLNKLTQSNLFGEWQVSKNGQKYFDCNLDESIREKDESYDIKRIDHRHHALDALVVALCTEEHVNYINNINANANAKSGDYGKQKRIEKYRQTLKRKIKFTKKDDEQDENNWYYMLPGEIRQTGAENSRRDSVLEKAYLYKEFDSFGQDYKKMVLTALQDTIVTFKQNLRVINKTVNRYNNTPNKNKFEKQNTDNGQQQNWSIRRSLGKDTFYGKKNINGEEKIVIRKDLDTSFNRDKIKTITDMGIQKILFNHLKQYDTVELPFEEAFVYFDALLERQEFEAIINDDENEFQSVEDLIEHLKENKNKYDKTDYSKLNVFVEKVAERDFRNENEIKEHSEIAFTPEEIEEMNKSENLQKLNGGKNHAPIRKVRISRGFGNQRALNEEDKESVKSKQYVVNDAGSNLYLGFYERVYQDDNGNEVRDRKFKDIGLMELIETLKQDKAKRLNPLPDKIYDDKLNEYNWKFTLSPLDLVYVPTDEEVETPEKVDFNNLPKEQTERIYKYVDGSEDIANFVPYAVSKPIWRFHGKKNKEIFKELTESNNIDISEKELIQNEFGLGSQQNKNQNMLDGQTQVKKICWKLKVDRLGNISKA

SEQ ID NO: 15285 - protein, 1444 aa, unidentified
  REGION 1..1444: note = Cas Enzyme sequence
MAILLSHVLKGKNDGFVRKQLVPYLKADGRSAIGPLATPKDASHPWLLAARVLRSKGSYKLKSWDELWSVLRWYAHNRGYDGNARWSADFQMDGFSEQLADAQAELTRQKESAELREKESGEDEEVDSDASKLDAAGKLVSLYGFTTNTFAECMAKLLLGPAREIQAGDHKKAGKFLDNKDFPEQDFDRLLFDLPTEFTSHPRHLSNSYKKMRATFPRRVPLPETRTLAGGVEWEVRFILRAHFDSLPGCDALLERALCGALPEDDKQPDWMAFAGQLPQMYLGAAEKVRLTGDLKIPRMVKTAAEIELKKTILAARHEFLNSKLILPKRYRGGLLFGQLVPRFDNRIIGVCPFAFAEIREAVELIDDPDLETRGRSILSLYGLTVIGRDDLRAKLPQRVTESDEVYAYRLARKMAKLPSKHSFEFLEYRWAMVLANIRIGRQVETYGVENGKPILSRPLTLSERRKVDAAVKKRGVLEYKEAETKPKKDKATGDVRMVTKPCINELREIVIRECGLIPEDRDNLDALMLAPNAKEALKLVPSLRGGKDAEAAFQLAWSELGEPQLDSKGHWVDAPLRRRFTRWLLDNASDKGKGRPLSLAIILEELRKLGEGKCDGSIVAFAIEGALSKAACDKKGRPDAKRREELLHAEFRGKKLQGRAPYSRHKLVAAAQQVFGAKLPPGSADDVTPLHPKQRQGALEETQDILASQVGRPLAEMTNNQLVRHRLLILCGEEASVLNRKRGLLDDIVRDYAGDDKTLIKRVTVELARDLQTMSGMSNKDKLKELSGRNASHSFTAKKLAEMIVDVKINGRQVVVGGGLLKKARIADDMLQNTRALSWPCPYSENVLFTAAQIANGSYDKDHIIPRSKRLSDALEALVITKKVINQKKANRTAMEFIKWANSDDPDARSFKQEHAIRSIASYRAFVEALPTRGHAEDRKRQKRRKQLLLVESWEEKEFTPADLAKTRHLTKLAAQKISAYFGGTGVAAERKDGDFKAAGEVPVITLPGMVTKVFRDQTWKLLPLIGKANPEVLKLHERCQQAKAQGKDFNFKKEVRGTSHLHHAVDAVAIAYVTELLVPTAEKSRTGNEHLSLNGDLARLIAKGKLSVAERQQFESLCASFGLPRFYRWASKTCEDKPQPPIDSGDALLCIKSLDEVFPPAERRFTDIIRDRLAELRIVQHVPSDQSGLGRKVGQNTRSIQAVRDSSGLVLWQHGLDDLSVLDEIRNRTNVESFELKLAGGADVGESGGDSDDSDDEEEKGDVWTSVAQVVGFQPTNGIGKLKELRGVRLIRDNYGLAILQNAQPDQRFKVVSWFKVSEQLRKLKRANKGAAPILLRIGMWIQVEDFKRKGIQYKSTHFMVNTIERKGMNDALFALKPRDVVRLRFKEFIPGKDKPKNATTAGCLLGITLEQLVRGGFAVLRPGTNIDLCGTTLEEPEMIRE

SEQ ID NO: 15286 - protein, 1090 aa, unidentified
  REGION 1..1090: note = Cas Enzyme sequence
MEDTDVPLLSAVKAMYDWSLLIDVLKGQKTISDAKVCEYEQHKSDLKALKYIVRKYLDRAQYDEIFRTAGEKPNYVSYSYNVTDVKLKQLPSNFKKKNSEEFCKYIKSKLEKIKPESDDEAVYNELIEKCNSKTLCPKQVTDENRVIPYQLYYHELSMILDKASAYLDFLNETEDGISVKQKILTLMKFRIPYFVGPLVKRNETDNVWIVRKAEGRIYPWNFENMVDFDKSEDGFIRRMTCKCTYLAGEDVLPKYSLLYSKYTVLNEINNIKVNGEKISPELKQDIFNELFMKTSRVTVKKITELLKRKGAFSEEKGDSLSGVDINIKSSLKSYLDFRRLLENGSLSENDVERIIERITVTTDKPRLVSWLKAEYSDLPAEDIRYISRLSYKDYGRLSAKLLTGCYELDTNTGEIGGRSIIDFMWAENINLMQILSDSYGYKSFIEEENKKYYMINPTGSIAQTLREMYVSPSVSRAIIRTMEIVKELRKITKKDPDKIFVEMARGGKPEEKGKRTSSRREQIEKLYDSAKAFVSDEDISHLRSQLGSLSDEQLRSEKYYLYFIQFGKCMYSGEAIDFSRLGDNHCYDIDHIFPQSKINDDSLHNKVLVKSQLNGEKSDDYPIKAEIRNKMHPLWKNLFYRDPKNPTDKVKYERLTRSTPFTEDELAGFIERQLVETRQSTKAVATLLKEMFPDSKIVYVKAGQVSEFRHDFDMLKCREINDLHHAKDAYLNIVIGNVHDVKFTSNPMNFVKNADKHYTIKVKETLKHKVSRNGETAWNPETDFDTVKRMMSKNSVRYVRYCYKRKGGFFNQNPDRAGNPDLARLKKDLDPVKYGGYNSKSISCFSLIKCTGVGAVIIPVELLCEKRYFSDDSFASEYAYSVLKNALPAKNIAKISIDDISFPLKRRPIKINTLFGFDGYRVNIRSKDSYHYFTISSAMAAIYSKDTSDYIKAVSSYIDKSDKGSKFKPGEAFDVLSNLKVYDEIAKKCISEPFSKINKLAEAGKKMEEGRDKFAELSIIEQMKTLLLLVDILKTGRINTCNLKPVGGVESYHTERMSAILKNTKYSDIRIIDQSPTGLYEKKSDNLLEL

SEQ ID NO: 15287 - protein, 998 aa, unidentified
  REGION 1..998: note = Cas Enzyme sequence
MAGRRQKRAMRRSRTSARHRDYLFRLWCKEFGLPVVDGDAKARTDAWAIRYRACTKGVASAEAVSVALRHCLSRRGFSYHRDGDAQFPWGDEMEYTPIAKWLNNAFFDLKYANELKWKLDGLDWMSSEKKRQAILEAIDACVAKYDTGPLVAHIKAHLDAPIHRRPRAWDIILPRDLIEQHTADIIQKHSKFFGSPEKSELARIAYFKILNYARNKPGALAERKVKKCPYLAKLDEGYSGKILCAMASNHSVRRLNLIEFLAQRGFADSGGSKLKANRDIFEVLDKHLAADANAIDSARTKERTPRPKLGLVELKKIFTKAYGVKLEKDTEGLNGHYFEQLKDIVTPPMSTLSGRANLSEKAAKILLERALSHGWDGLDLKDTWGDFFVWRRDVDRGIGLYPQVEFLMGRRSKKGVQAVQGVIRKIFAKLAPELGQDRPDVVIAESVRDVPRNADHRKDRERKMLERREARKELFERYGLADGGTDQDRRRVSLYEQQKGLCPYTGKELGSPLNPSLQVDHIFPRERGGVSEMDNLVLTLSEVNRKKAKRTPHEARSDFPEFSKFAQNCRWGTKKLELFLRKEADIPDWKNLTRTSQIARELREEIAQWLGIKGDAEKVRARIGAPSGLQTAICRRSKAWRAKLPEVDGKKDRTNMRHHLWDAAVLSHIPPGEGTQSVAFGGIFYQEKEDKPGDLGWQALGLGPDLLAFEAATAQQCLVEKPRQRRSKQSRTEETIYGMNDQGRLTVRKALIDGLGMVNKNAAKWLEHSGIPAAQLPKKRLEKFLEQEADAKRLELNSGSFVDKVRIVAPEESPVSMLPHRNRQGDVIGWKIMGSPYTRMEIWKAPDLDKKGLPVFQRRFVPNPRGLAALHRLAKEGKGPWWKQKPSADTASLRRKVIGAPMAKFSKKLTSVQLGDLLFVPYNGLGESISSAWNPKTMKFERPKAAHWVWLRVSSINSSGQIHTSISEKLAVDTIKPVNPSSVSVIAAYRQFALEQKS

SEQ ID NO: 15288 - protein, 1331 aa, unidentified
  REGION 1..1331: note = Cas Enzyme sequence
MKENGNDRRQGTYYIGLDVGTNSVGWAVTDENYQVKKFHGNAMWGVRLFEEAQPAADRRTSRVARRRLARRKQRLMLLEFLFAEEIHKVDPNFFRRLHESDRWEEDRATRCPYSIFHDAGFTDIDYHRNYPTVYHLRSELLQSTQPHDVRLVFLAIHHIMKTRGHFLYETGDNGDEILTVAQAFDQLNQYLQDEYDQMLEPVDQNAFLDLLQNNGMGITAKKKALHGAYGLVSDISILKFSALIDLIAGASVKPDVLFGDQTLKDLTSINLKNGLDELEQYREALGERFALLEFTKTLFDAARLSQIRKGYTYISQAKVAQYQENASDLRKLKQYVRAQIPDQYRMIFSEKKKGLDNYAAYSQYKLTQKDYRCDQEKFCKFLLGKQVGLPEPQESDREMCEIYRKIKDGAFLPKLRSSENGVIPYQLNRQELVQILKQASLYLPFLNHVDSDGLSVSDKIIKTFEFRVPYYVGPVSDQAGHHWAVRFQGKENEKIYPWNFEQVIDLERSAAGFMEDLVGRCTYTGEPVLPKDSLLYSEFMLLNEVNLIKINGKSLPVNVKKQLVQDLFYHSSKKVTKKGIVHYLTSKGLMTQSDELNGVDDRIKSTLRSYHDFKDILKRTGDRDMVENIIRSILVFGNDLTMLQRWLKNNTHDLTEEEIRRICNLRSKYKEWGRLSRTFLTEIYSPDEWGEAKSIMDYLRDTSCNLMQLLSNQYQFADQAKAHFDALMGNGQTLSQKLDDLYVAPAVRRSIRQTLRIVDEIVDIEHGVPKKIFIEMARDNAQEVKKSRTESRKDKLIALYRACHEDSGELFQQLEQEEDSRLRSDKLFLYYTQFGKCMYSGEPIDLESLLRGELFDIDHIFPQSKVKDNSLDNRVVVINTLNREKSNIYPIQGEIRRKMQPFWAMLKSKGMISEKKYDRLVRNTELTEEELSSFVARQLVETRQSTKALATILQETYGDQVRLVYSKAGNVSDFRQQFELVKCRDVNDLHHAKDAYLNIVVGNVYDTKFTEVFFRNIKKEKYSLKKVFEFDTPGAWDKTESIKTVKKYMAKNNVLVTWMPQEKHGKIFDLMLVRAGKAKVNKKQGLDQEKYGGYTMRYCAYFCLVEHRIGKKRVRSIKPVYMYQKVAYEQDPLEYCRNILMLHEPRVIVQKILVGALMELNGKRLTLTAGEEGRIKLNHTYQLIVGEKYNQYIKNASKYYDRCTAQKAELPVTQFDGISDKDNIDLYHELIRKCKTSIYYSCFGAFNIIAEEMEKCEDIFTGMSTLDQIKILLEVIKAFRCNAVYANFKQLSGQQVRGRIRINDKISELNTAYLINQSVTGLYEHRIDLLK

SEQ ID NO: 15289 - protein, 1373 aa, unidentified
  REGION 1..1373: note = Cas Enzyme sequence
VVLENNYLGFDIGTDSVGWAVSNSEYKILRYKGNMMWGVNLFDAASQAAERRGFRTARRRLNRKKQRLSILKKFFCDEISKVDEKFFDRLLESSLMPEDCENRKYNIFFDDKDYTDKEYNKQYPTIHHLICELMGNPEPHDVRLVYLACAYILGHRGHFLSEVDKDKISDVLEFKPLADEFFEYFTSLETDAPFERNDDVFSEILKMKKGVSVKEAEFKTRFFNGKKISQPEEYPVDISVLIKFICGGTIALSKLFMNDSYEELENNKVTVSSADFSDKLEALANDLEESDTQLLLIVKKLHDWSLLVDILDGESEISKAKKKVYETHQKDLADLKMLCRKYLSKNDNNEIFRLQNDKPNYVKYTKNVKSAITPKKPAKYSSCNQEDFCKFVKGYISKITPDENDTEIYNRVMDKLETNTLCPKQVTSDNRVIPYQLYYYELKKILENASRYFDFLNVSDEYGTVKDKILQTMLFKIPYYVGPLVSEEKSDFAWFERKAEGRITPWNFEDKVDLDKSEDKFIYNMTAKCSYLVEEDVLPKNSLLYCKFMVLNEINNLKINGEEIPVKAKQSIFEKLFKEKRKVSVKMIKDLLKIENYFDDKKDNLGGIDTTIKSSLKSYHDFKRLLTSGVLSEGDVEKIIVRLTVSTDKPRIKKWIKENYPHISKEDVNYIAGLNYNDYGRLSEKLLTGIYETDKKTGETTGENIITKMYNTNLNLMQILADNNGYKHVIDAKNDEYYSANPKTLEEKLKAMYIPNAVRRSVIRTLDVAKELKKVLKEPPAKIFIEMARGEGETKKGDRTKSRREKLKEQFRNAKSFVSAEEIKALENRLEGLSDSELRSEKYYLYFNQFGRSMYSGKPINFEELGVSKLYDIDHIYPQSKVKDDSIDNKVLCLSEENGFKKDNYPVPDTFRKEMSAFWKNLLDKEIISEKKYNRLTRATRFTNDELSGFINRQLVETRQSTKAVAQLLGEIFPGSEIVYVKAGLASEFRHEYELLKCREINDLHHAKDAYLNIVMGNVHDVKYTKNPMNIINRGEQYSLKLKSLLGHNIERNGVKAWNPETSFKTVREMMSKNSIRYVKYSYVKKGGYFDQMPLSAKDGLVPMKNGRLTSKYGGYANPTASHFALVNVKNIGNVFIPVEVISMKNYISDVEFARKYAYDMLSVILSEKLFASVCESDITFPLNKRIIKANTMLEADGFRFNLCGKSNKGKYITISSAVPVVMDRKYEDYAKRISSFNEKRKTMKLVVSESDKITKEENLELYDLYTKKCFTKPFSLWKTFEGAGKTLENGRDKFISLSVDEQVTALMSVMSILKTGRSTACDLTPVGGVKMACVSNFNAIIKSNKGFASIRIVDQSPTGLIEKYSDNLITEV

SEQ ID NO: 15290 - protein, 1177 aa, unidentified
  REGION 1..1177: note = Cas Enzyme sequence
MEYRLGIDLGSSSLGWCCLKLQDGKVVGILDMGVRIFPDGRNDKTKDPLCVARREARGSRVRLNRFKQRQKQLIIDLQESGLLPQSMEEFKALENLNPYELRANAVRKQVSLYELGRALFHLNQRRGFLSNRKEERDKKGNTKTQQAMDNLQMLISEKACATLGEYMYEVEEHRRFKNSTDANGKLKINWYPNRQMYKDEFTVIWDKQKEFYPDILTDKLKNKIENDIFFQRPLKKQQTGFCWLEPEQKRSPRSYNIAQQFRIMSEIANIRIGYPHDRELNKPEREALFEFLNNAPADSFDKDHYVSWEKILEVLHLDKDVVLNLMRQDKTGLLCNITNALLGNDKVFGDKWYSFSDDLQNQIIDILQDYSLQDGEAETKLKELNLGFDQSQIDNSLENSLSLPDGYTNLSAKAMRKLLEDMKLCGSDYATAVENVYHQTAADVGFFEERDELPPYQELFTESLIGGDKELYDKELDYDNYMGRITNVSVHIALNQLRAVVNELIKKYGKPSGITIELGRELTKGKKALAEIDKKQKESAKIMEEARAEIRKAGATVTSFNIEKYKVWHNLNEDITKRIDLYTGKNISVSQLFSNEYEIEHILPYSWTYDDSYNNKIITRANINRQKSNQLPYVFFSDERQLKAVAKDDEELKEMSIDNVIRRAKEIDKSRKNIKKTFNFNALTWRFSKNARDIFNRNNKNMARDLTDMQYMSKLAKKYLTCICPPNKIVSAKGQMTDLLKAIWELSDVSPEDYRLWTPQEWQKRDITEWKKKQFILTNPEWNADEAEKEAKKFVQGLTDEEIHNMTHVGKNRTVHYHHALDAFVLANITTKVMQEMSTEAFANAVEEYAEAHNVTIREAQKSLLTQSSDISYKPYSTFDKENLSHMLRDVVISYKNPIDKLKSIIKKAEITGQNLAHFSFAPICEDTAFGFKKIIKISKNDIDIEFSVRKDGKKKVETHKLSTMVPVFRTKEQKQSFLDLYVQWQRAVMRQKFIGKGKYEEIEKAFIETFTRDKAFKWFASAGNYGAQIYQIQKNDKFAPNKNEDWSLEILPNYYAFERKGKFFWKDIYPTAKLITTLKINDVIEATFERNDNLESGFSKIRNWVKEQFENHPDKEQLQLLFRVKKMSGGSIFLRPLHIAQEDNGDVKSWQCTIGKFKQYQCRKVCITPTGKVLRG

SEQ ID NO: 15291 - protein, 1028 aa, unidentified
  REGION 1..1028: note = Cas Enzyme sequence
QRRRRDRYLRRKAALMKRMAMVGLMPADPVVAKELELLDPYELRANGLDQSLPLTHFGRALFHLNQRRGFKSNRKTDRGDNESGKIKDATARLDQAIMANGARTYGEFLHMRRCSATDPKLVPSVRTRLSVARRNHSEKEESGYDFYPDRRHLSEEFEKLWAVQSKYTPDVLTDELHDEIVTIIFHQRPLKEQEVGLCLFSGHHGIPQQDKRIPSAHPKNQRRILLETVNNLRISARGKPARRLTREERDQIVHALDNKGHTKSLSGMSIKLKALGKIINLRSDQSFTLETANRDAIACDPVRASLSDPDRFGPRWSTLDCDAQLDVVERIRKVQSDSEFASFVDWLIATYTLDQNNAEAVANAPLPEGYGRLGLTATSNILEALEAEVVTYSAAVAACGWHHSDGRTGEVLDNLPYYGEVLERHVIPGSYDPQDDAVKRYGRITNPTVHIGLNQLRRLVNKIIEVHGRPDEIVVEVARDLKMSEDQKAEATRNIKKNTEAAKARGLKLEEIGVPDNGANRMVMRLWEELNDDVMSRNCPYTGQRISAGMLFDGSCDVDHILPYSRTLDDGFANRTLCLKEANRFKTNKTPWEAWGGTDQWDLIAANLKNLKANKAWRFASDAMERFEGENDFSARALKDTQYLSRIARSYLDTLYDGGDGKSHVWVVPGRLTEMLRRHWGLNGLTALTDSDAQTVKAKNRTDHRHHAIDAAVIAATDRGLIKRISVVAQRDEVGGAEQVARSVVPPWENFRKDVGAQISKIIVSHRADHGSIDPTARKFGKDSTSGQLHNDTAYGIAQDSTVVSRKPLTSIGPNVIASTTGGINIRDKDLQQHLARVTRNLEGKAFEAALVAFAASPKLPDHSDNPYFGLRRVRLEETLQRSARIEVTDKSGQAFKAYKGDSNYCYEIWRLPNGKFEAQVVTTFEAHQQDADKKPHPAAKRLMRVFKRDMVMLERDGEEIVGYVQSLHVKNGLLIAPHTESNADARHRNKLDSFKFIQMSAGTLLKANARRVYVDELGRVRDPGPAI

SEQ ID NO: 15292 - protein, 1049 aa, unidentified
  REGION 1..1049: note = Cas Enzyme sequence
MKEKKNYRLGIDMGATSLGWCMLKLDKDNKPCGIIKMGVRIFPDGRDDKSKEPLNVTRRIARSIRRNRERYKRRRLSLLRILRENGLMPEDIADSKKLEKLDPYELRVKGLDAKLSLYELGRAIFHLNQRRGFKSNLIIDKADNDSSAMKNSIEELKNKIKSSNCRSLGEYQLKINLDLGKHEQHKREAIRVRVTGTEKNKIYSIFPERPMIEDELKLIWEQQQSYYPKLLTDELLTRVRDRIIEQRPPKPQEKGKCIFEPKEDRILRCNPEFQMFRILQTVNQLELRDDNGECFDLTLEQRQILIDYLKTKKKAKFSSLKGKLGKQYKEGYTFNLESEKRQDLQGDETAAVMAKKDNFGVQWHNLSRAEQVKIIRLLMGEEQDCTTREQIGARLKKAYVLSEEQIDNCLETHLVTGTGNLSEKAIRKIMPGLEKGLMYHEACEEAGYKHSGDIIKAEYQSGNLPYYGKVMPNHVIKRESAHLDNEETKYGEISNVTVHIALNQLQKLVTAVSKKYGAPKQIVLELARELKLNGKQKEELKKRQNRERAENERIREELEGIGIKNNYQNRLKFKLWEELNSDPQKRCCPFSGKTISISELYSEKAQIEHILPKSKTFDDRRINKTLAWYKANQDKRERSPYDAFGKSPAGYNWDEILMRAENLPKVKYERFFSDAMERWGDEGEILSRMLNDTRYMSRIAKEYMGNVAGSNNVWAIPGGMTSRLRYHWRFNKFLSDENVKNRDDHRHHAIDALVVALTSRAMLQKISHQIGRGNDRFIENMPEPYPDFEYEKTQTIIDNIMISYKPDHKFAEGKRSSFISGGRLHKDTAYGLREIVDKREYHLHVRKPVSEFTKSSKANLIADPHIRADVENLIIETGNADDYFREKRINKLRIIENKNLETLVPITNEQGEKYKYFLSGNNYCCVVYCPDKGKKAGKWQKETISMYNAHQKDFIPQWKIDNPTAKKIMELYKLDIVIIKQDNLWKVKVVKRIYLSKNQICFHDINIANPTKDNLEFIAIRDLQKYQAFKAGIDILGRINPQVPTGEDS

SEQ ID NO: 15293 - protein, 1069 aa, unidentified
  REGION 1..1069: note = Cas Enzyme sequence
MAAIAIDDDGKPTEILSAISLIHDSGVDPDSAKSAATRLATSGIARRTRRLYRRKRKRLAKLDKFISSQGWPLKEFEEYEDPFYPWRVRAELATTPITDKQELGEKLSIALRHIARHRGWRNPYSKVTALYAVAEPSDALVSIQEQCATELGRPIPPTTTVGQLVASMNLGKTRLRGEDSLLAARPRQSDNANEIHAIARVQGLSNELVKQIIDHVFAAESPKGSAAERVGKDPLQPTKKRALKASDAFQLYRIAALIGNLRIRGGKKNRRLTTEETRLVFDYLRSLPAKQEPTWQLVAEQLRIDRGNLVGTAIMTDDGERAGAKPPVHETNRLMESTKIKPLAAWWKSADADARAAMVKALSNAEVDDFDSQAGAQVQEFFFGISDEDQEKLDGLHLPIGRAAYSEDTLVRLTKRMIGEGMDLYEARQAEFKIPNDWAPPAPEIGERVGNPAVDRVLKATARWLNAAERQWGAPKSVNIEHVRAAFMSESSARELDRDNQQRAKRNVKVVAEMQEKLGIEGRPSRADVWRFQSIQRQNGKCAYCGTQISYMNSEMDHIVPQAGEGSTNTRDNLVAVCRECNSSKSNIAFAVWAENTSRPGVSVQKAVERTRHWVTDSGLRKPEFDKFRKQVCDRLRRKATDEPIDARSLESVAWMANELRSRIAQKFKDGDTKVRVYKGALTAEARRASGISGKLEFVDGKGKSRLDRRHHAVDAAVVAFTSNYVAETLALRSNMKFDQELRRKAPQWREFTGSDHVHQVEWTKWKYRMQALAELLNNALVQDRIVVMHNLRLRLGNGAAHEDTIGKLTRLKVGDAISTTDIDRASSEALWCALTRDPDYDPKTGLPENPNRTIRIHGTHLTASDEITVFPVAAASIPIRDGFAKLGSNYHHVRLFRVPNGKKYNYFLMRVYTIDLLKFRKEDLFTVELKPQTTSVRKCLPKLREALANGTAEYLGWLVNDDELLISASASIEKPIAKLQEQYGPTKRWRFAGTDSESRILLRPLQLSAEGLPSDVEKDIREIVEKRGWRISINNLFNGARVTIIRRDALGRPRLHSAAHLPTCWEVK

SEQ ID NO: 15294 - protein, 1069 aa, unidentified
  REGION 1..1069: note = Cas Enzyme sequence
MAAIAIDDDGKPTEILSAISLIHDSGVDPDSAKSAATRLATSGIARRTRRLYRRKRKRLAKLDKFISSQGWPLKEFEKYEDPFYPWRVRAELATTAITDQQELGEKLSIALRHIARHRGWRNPYSKVTALYTVTEPSDAFLAMQEECAKQLGRTIPETITVGQLVTGMNLGKTRLRGENSLLAARPRQSDNANEIHTIAKVQGLSNELVRQIIDHVFAAESPKGSAAEQVGKDPLQPTKKRALKASDAFQQYRIAALIGNLRIRGGKGNRRLTTEETRLVFDYLRSLPAKQEPTWQLVAEQLKIDRGNLVGTAIMTDDGERAGAKPPVHDTNRIMENTKIKPLATWWKSADADARAAMVKALSNAEVDDFDSQAGAQVQEFFFGISDEDQEKLDGLHLPIGRAAYSEDTLDRLTKRMIGEGMDLYEARQAEFKISNDWAPPAPEIGERVGNPAVDRVLKATARWLNAAERQWGAPKSVNIEHVRAAFMSESSARELDRDNQQRAKRNVKVVAEMQEKLGIEGRPSRADVWRFQSIQRQNGKCAYCGAEISFKNSEMDHIIPQAGEGSTNTRDNLVAVCRECNSSKSNIAFAVWAENTSRPGVSVQKAIERTHHWVTDSGLRKPEFDKFRKQVCDRLRRKATDEPIDARSLESVAWMANELRSRIAQKFKDGDTKVRVYKGALTAEARRASGISGKLEFVDGKGKSRLDRRHHAVDAAVVAFTSNYVAETLALRSNMKFDQELRRKAPQWREFTGSDHVHQVEWTKWKYRMQALAELLNNALVQDRIVVMHNLRLRLGNGAAHEDTIGKLTRIKVGDAISTTDIDRASSEALWCALTRDPDFDPKTGLPENPNRMIRIHGTHLAASDEITVFPVAAASIPIRDGFAKLGSNYHHVRLFRVPNGKKYNYFLMRVYTIDLLKFRKEDLFTVELKPQTTSVRKCLPKLREALANGTAEYLGWLVNDDELLISASASIEKPIAKLQEQYGPTKRWRFAGTDSESRILLRPLQLSAEGLPSDVEKDIREIVEKRGWRISINNLFNGARVTIIRRDALGRPRLHSAAHLPTCWEVK

SEQ ID NO: 15295 - protein, 1069 aa, unidentified
  REGION 1..1069: note = Cas Enzyme sequence
MAAIAIDDDGKPTEILSAISLIHDSGVDPDSAKSAATRLATSGIARRTRRLYRRKRKRLAKLDKFISSQGWPLKEFEEYEDPFYPWRVRAELATTPITDKQELGEKLSIALRHIARHRGWRNPYSKVTALYAVAEPSDALVSIQEQCATELGRPIPPTTTVGQLVASMNLGKTRLRGEDSLLAARPRQSDNANEIHAIARVQGLSNELVKQIIDHVFAAESPKGSAAERVGKDPLQPTKKRALKASDAFQLYRIAALIGNLRIRGGKKNRRLTTEETRLVFDYLRSLPAKQEPTWQLVAEQLRIDRGNLVGTAIMTDDGERAGAKPPVHETNRLMESTKIKPLAAWWKSADADARAAMVKALSNAEVDDFDSQAGAQVQEFFFGISDEDQEKLDGLHLPIGRAAYSEDTLVRLTKRMIGEGMDLYEARQAEFKIPNDWAPPAPEIGERVGNPAVDRVLKATARWLNAAERQWGAPKSVNIEHVRAAFMSESSARELDRDNQQRAKRNVKVVAEMQEKLGIEGRPSRADVWRFQSIQRQNGKCAYCGTQISYMNSEMDHIVPQAGEGSTNTRDNLVAVCRECNSSKSNIAFAVWAENTSRPGVSVQKAVERTRHWVTDSGLRKPEFDKFRKQVCDRLRRKATDEPIDARSLESVAWMANELRSRIAQKFKDGDTKVRVYKGALTAEVRRASGIAGKLEFVDGKGKSRLDRRHHAVDAAVVAFTSNYVAETLALRSNMKFDQELRRKAPQWREFTGSDHVHQVEWTKWKYRMQALAELLNNALVQDRIVVMHNLRLRLGNGAAHEDTIGKLTRIKVGDAISTTDIDRASSEALWCALTRDPDFDPKTGLPENPNRMIRIHGTHLAASDEITVFPVAAASIPIRDGFAKLGSNYHHVRLFRVPNGKKYNYFLMRVYTIDLLKFRKEDLFTVELKPQTTSVRKCLPKLREALANGTAEYLGWLVNDDELLISASASIEKPIAKLQEQYGPTKRWRFAGTDSESRILLRPLQLSAEGLPSDVEKDIREIVEKRGWRISINNLFNGARVTIIRRDALGRPRLHSAAHLPTCWEVK

SEQ ID NO: 15296 - protein, 1083 aa, unidentified
  REGION 1..1083: note = Cas Enzyme sequence
MAAIAIDDDGKPTEILSAISLIHDSGVDPDSAKSAATRLATSGIARRTRRLYRRKRKRLAKLDKFISSQGWPLKEFEEYEDPFYPWRVRAELATTPITDKQELGEKLSIALRHIARHRGWRNPYSKVTALYAVAEPSDALVSIQEQCATELGRPIPPTTTVGQLVASMNLGKTRLRGKAKLANKANPHGKEAGLFTANKLQQSDYANEIHTIAKVQGLSNELVKQIIDHVFAAESPKGSAAERVGKDPLQPTKKRALKASDAFQQYRIAALIGNLRIRDGKENRRLTAEDTRLVFDYLRSLPAKQEPTWQLVAEQLKIDRGNLVGTAIMTDDGERAGAKPPVHETNRLMESTNIKPLAGWWKSADADARAAMVKALSNAEVDDFDSQAGVQVQEFFFGISDKDHEELDKLHLPIGRAAYSEDTLVRLTKRMIDKGMDLYEARQAEFKIPNDWAPPAPEIGERVGNPAVDRVLKATARWLNAAERQWGTPKSVNIEHVRDAFMSESSARELDRDNQQRAKRNVKVVTEMQEKLGIEGRPSRADVWRFQSIQRQNGKCAYCGTQISYMNSEMDHIVPQAGEGSTNTRDNLVAVCRECNSSKSNIAFAVWAENTSRPGVSVQKAVERTRHWVTDSGLRKPEFDKFRKQVCDRLRRKATDEPIDARSLESVAWMANELRSRIAQKFKDGDTKVRVYKGALTAEVRRASGIAGKLEFVDGKGKSRLDRRHHAVDAAVVAFTSNYVAETLALRSNMKFDQELRRKAPQWREFSGSDHVHQVEWTKWKYRMQALAELLNNALVQDRIVVMHNLRLRLGNGAAHEDTIGKLTRIKVGDAISTTDIDRASSEALWCALTRDPDFDPKTGLPENPNRMIRIHGTHLAASDEITVFPVAAASIPIRDGFAKLGSNYHHVRLFRVPNGKKYNYFLMRVYTIDLLKFRKEDLFTVELKPQTTSVRKCLPKLREALANGTAEYLGWLVNDDELLISASASIEKPIAKLQEQYGPTKRWRFAGTDSESRILLRPLQLSAEGLPSDVEKDIREIVEKRGWRISINNLFNGARVTIIRRDALGRPRLHSAAHLPTCWEVK

SEQ ID NO: 15297 - protein, 1035 aa, unidentified
  REGION 1..1035: note = Cas Enzyme sequence
TLGQYFFKRLDEEKGHVAKTRIRGVYTGRIEHYIVEFNAIMDAQGYSADGRLRRDLYNAIFMQRPLRSQKHLVGKCPLEPKNARAMIGHPAFEEFRMLSFVNNLSFENENGEYKDEFGNLLYPLTEDDRKIVCAEFMKSASSIKFGVISKRFAKDPRFKERKLRFHYYRDDDSVPACQTRHRIKSAFGDVPYDEQKVFDALTFFDDTEKLCGWFRRHFPALDEKSVLKLASIHPKEGNAKYSLKAINKMLPFLRKGMELSQARFFAKLPDLIPDFAEHEEEIVTNFNEMIWQYRKERKQYGELDGAVRKITPQPASLEERKKSYFLPRWMTEEKWECLYLKDDSAYVPETEYKNKGETVKLAKPRLPPVRLGMIRNPLVQRSMTTLRRLVNYLCDHGKIDFTDTIRVELARSVNDFATRKAWQNWLGSRQKIRDEARIEIEKLKIAATEDAIDRYVLWKEQNGICMYTGKTIEVTELFAGAAFDVEHTIPRSLSGDDSLANKTICEAHYNREIKKGQVPRACSNWDKIDVFLASWRDKVEQLEKTYRSQLKSVSSKTEPAARSQARVKAVTTRFELDYWRDKVRRFDADPKKMGRSENGFMGFKKRQLVDTGIMCSHAVEFLKCLYPATYAVNGAATAFARKAWGIQGDGSKDRSEHTHHAKDAMVIAALTPSRFTAICTALKDDGVERGRECSICPKPYPDFAEKVRKACDEILVKHILRQTTLRQSFKHNVLAYPHREKGNPNGRMIRCVKSQGDTVRGQLHLDTFYGCITDPLSNVQRKVVRKPLVGPVKDAVAIVEKIVDPAIKDIVKSTVAKLVEQGVKNIDSGCIKMPSGVPVNKVRIYAANATNAQVLRNHAMESRHEYKNPYYVTSAPGSNFRLALFEENGKTHVVPDNSLSWAQNHKKADYVPLDGKPGFIGYIMPGTMALTYREGRPEELQKLTQTELRKRLYKVVKFRNDGLITFRHHLEARASTVLEKYLKEEGLNGKGESKINLENQYLLLLLSPKTYLSQMLFEGIHFKMLLDGSIEFMKR

SEQ ID NO: 15298 - protein, 1309 aa, unidentified
  REGION 1..1309: note = Cas Enzyme sequence
VFFARLFAVEFNIGKRRVLPDGRTEGQRDFIYGTILLKRKGSESIRASSLKTTSAYSLVVIRCGAYNIPTGGSKSRGRLEKMKKTLGIDLGSNSLGWAILDDLTGDILDKGVLVFPEGVDPDAGTSVETPAAQRRAARMGRRLKFRRKLRKWNLLKLLIENGMCPLSIAELEGWKKEGVYPVSNKEFISWLKSTDSSNPYCDRAAAADGKVPTFTLGRALYHIAQRRGFKSSRKEEASLIDEETGAPKKADKDFGAVKSGIAVLSEKIEKSGCKTLGQYFFKRLDEEKGHVAKTRIRGVYTGRIEHYIVEFNAIMDAQGYSADGRLRRDLYNAIFMQRPLRSQKHLVGKCPLEPKNARAMIGHPAFEEFRMLSFVNNLSFENENGEYKDEFGNLLYPLTEDDRKIVCAEFMKSASSIKFGVISKRFAKDPRFKERKLRFHYYRDDDSVPACQTRHRIKSAFGDVPYDEQKVFDALTFFDDTEKLCGWFRRHFPALDEKSVLKLASIHPKEGNAKYSLKAINKMLPFLRKGMELSQARFFAKLPDLIPDFAEHEEEIVTNFNEMIWQYRKERKQYGELDGAVRKITPQPASLEERKKSYFLPRWMTEEKWECLYLKDDSAYVPETEYKNKGETVKLAKPRLPPVRLGMIRNPLVQRSMTTLRRLVNYLCDHGKIDFTDTIRVELARSVNDFATRKAWQNWLGSRQKIRDEARIEIEKLKIAATEDAIDRYVLWKEQNGICMYTGKTIEVTELFAGAAFDVEHTIPRSLSGDDSLANKTICEAHYNREIKKGQVPRACSNWDKIDVFLASWRDKVEQLEKTYRSQLKSVSSKTEPAARSQARVKAVTTRFELDYWRDKVRRFDADPKKMGRSENGFMGFKKRQLVDTGIMCSHAVEFLKCLYPATYAVNGAATAFARKAWGIQGDGSKDRSEHTHHAKDAMVIAALTPSRFTAICTALKDDGVERGRECSICPKPYPDFAEKVRKACDEILVKHILRQTTLRQSFKHNVLAYPHREKGNPNGRMIRCVKSQGDTVRGQLHLDTFYGCITDPLSNVQRKVVRKPLVGPVKDAVAIVEKIVDPAIKDIVKSTVAKLVEQGVKNIDSGCIKMPSGVPVNKVRIYAANATNAQVLRNHAMESRHEYKNPYYVTSAPGSNFRLALFEENGKTHVVPDNSLSWAQNHKKADYVPLDGKPGFIGYIMPGTMALTYREGRPEELQKLTQTELRKRLYKVVKFRNDGLITFRHHLEARASTVLEKYLKEEGLNGKGESKINLENQYLLLLLSPKTYLSQMLFEGIHFKMLLDGSIEFMKR

SEQ ID NO: 15299 - protein, 1050 aa, unidentified
  REGION 1..1050: note = Cas Enzyme sequence
MELIFGYDIGTTSIGFAVVEHKRVDGTGSIKRMGVRIFPEPRNPKDKIPLNQKRRMARLHRRQLRRRRKRKAEVFRLLHEAGFLPSRDSKEWQEIMRGRTKENEDPYDPYVLRSRAIEPAEKLTEFEIGRALYHLAGRRHFLAKSMQEEDSVIEAQQDEDEKEARSNREQTLRELEEQGLTLGQLLSKRSPHERKRGVHATRQKVQEEFNSILDAQKHHHPRLGDPNFSSALQQSIFFQRPVFWRKNTLGACPFFPESPPCPKGAWLSHQRRMLEKLNNLEIAGGNQRPLDSEERAAILEKLQTQSSMTWSGVRKVLAPLYKNRGEPGIEKTLKFNLEIGKEKNLLGNALEAQLAKVFGDAWNQHPRKDELRGAIHERLWNADYRERGERVEIVPDGLREEARKAAMESLQRDFSLDDDHVKQLVKLKLAPGWEPYSTEALLKILPLLQRGERFGAIVNSPDFEQWREQTFPNRDRPTGEVMNLLPSPSDKIEQSRLNNLRNPTVIRIQNELRKVTNNLIRMYGKPDLIRVELAREVGLSKRKREEMQSGMKRKEARRDKAKTELDKCGVDSNRRNIEKWMLWDECGRQCPYTGQMISFDDLFRTGMFEVEHIWPQHRSVDDSFVNKTLCHREENRRKQDRIPDEYLNEDEMAALRQRLDGCQRTRANPSGMTPGKIKRFLAKSIPDDFASRQLNDTRYAARETIASLKRLWPDIGPNAPVKVQAVSGRVTAKLRKFWGLNNILGLDGEKNREDHRHHAVDALVVALTHPGVTEVLSHYWRSERERLPEAKIVPPMQDLVTQTKAAVEEIVVSHRVQKKVSGPLHEEKVLGDTSQAETSSDKKDYRLYVNRKPLKELGTKSFGDGDERIRDPQLRKRLETWVNDRGGVPKKAFSSPPFPMRGKDGVRIQKVRIIKKRLPDLMKKASTGFSEMNLVHHVAIWRNDDGSIGWDIVKLAVAAERKTRREPIVQRNGLTNAKFLMSLSKGEALRIESDIYIVESIWSDGRVVLVDHRDAKENPDRTRKRVHVLISDGAEKISIDPIGIVRPAND

SEQ ID NO: 15300 - protein, 1050 aa, unidentified
  REGION 1..1050: note = Cas Enzyme sequence
MELIFGYDIGTTSIGFAVVEHKRVDGTGSIKRMGVRIFQEPRNPKDKIPLNQKRRMARLHRRQLRRRRKRKAEVFRLLHEAGFLPSRDSKEWQEIMRGRTKENEDPYDPYVLRSRAIEPAEKLTEFEIGRALYHLAGRRHFLAKSMQEEDSVIEAQQDEDEKEARSNREQTLRELEEQGLTLGQLLSKRSPHERKRGVHATRQKVQEEFNSILDAQKHHHPRLGDPNFSSALQQSIFFQRPVFWRKNTLGACPFFPESPPCPKGAWLSHQRRMLEKLNNLEIAGGNQRPLDSEERAAILEKLQTQSSMTWGGVRKVLAPLYKNRGEPGIEKTLKFNLEIGKEKNLLGNALEAQLAKVFGDAWNQHPRKDELRGAIHERLWNADYRERGERVEIVPDGLRKEARKAALESLQQEFLLSDDHVKQLIELKLAPGWEPYSTEALLKILPLLQRGERFGAIINSPDFEEWREQTFPNRDQPTGEVMNLLPSPSDKKERLRLNNLRNPTVIRIQNELRKVTNNLIRMYGKPDLIRVELAREVGLSKRKREEMQSGMKRKEARRDKAKTELDKCGVDSNGRNIEKWMLWDECGRQCPYTGQMISFDDLFRTGMFEVEHIWPRHRSVDDSFVNKTLCHREENRRKQDRIPDEYLNEDEMAALRQRLDGCQRTRANPSGMTPGKIKRFLAKSIPDDFASRQLNDTRYAARETIASLKRLWPDIGPNAPVKVQAVSGRVTAKLRKFWGLNNILGLDGEKNREDHRHHAVDALVVALTHPGVTEVLSHYWRSERERLPEAKIVPPMQDLVTQTKAAVEGIVVSHRVQKKVSGPLHEEKVLGDTSQAETSSDKKDYRLYVNRKPLEELGTKSFGDGDERIRDPQLRKRLETWVNDRGGVPKKAFSSPPFPMRGKDGVRIQKVRIVKKRLPDLMKKASTGFSEMNLVHHVAIWRNNDGTIGWDIVKLAVAAERKTRREPIVQRNGSTNAKFLMSLSKGEALRIESVIYIVESIWSNGQVVLVDHRDAKENPDRTRKRVHVLISDGAEKISIDPIGIVRPASD

SEQ ID NO: 15301 - protein, 1050 aa, unidentified; identical to SEQ ID NO: 15300
  REGION 1..1050: note = Cas Enzyme sequence

SEQ ID NO: 15302 - protein, 1050 aa, unidentified; identical to SEQ ID NO: 15299
  REGION 1..1050: note = Cas Enzyme sequence

SEQ ID NO: 15303 - protein, 1128 aa, unidentified
  REGION 1..1128: note = Cas Enzyme sequence
MTTSSENIPSIRYRVGIDVGLKSIGFCAVEVDRNDQPVKLLNSMVFIHDAGVDPNENKAAKSRKLTAGVARRTRRLYRTHHQRLVNLDRVLSKEFGWPLPDLMAFKDPREPWHVRSRLLEGYIADDNERKAALSIALRHMARHRGWRNPYAKVETLLQPAEPSDFLKGLKKRISESLGRSFPADATPGQLVDAYLAHPDYAKKAGTPKLRGPEGILAGKLHQSDNAEEIRRICEVQQIDPADRDRLIRAVFQAKSPKGSAKERGLVGHDELPGQAKHVRAEKAHPAFQRFRIVSVLANLRIREGRAERSLTPEELQGLTDFLLLAGLKQEVTWQDLADNLGIERSDLRGTARASFDGSPVLRNPPTDVTTEKIMACKVKWLKEWWKDADDEQRGYFVDAFSNSGGSEDSSDVNDEVAELLEQATEDDQLEFEKISLPQGRAAYSLDSLRRLTDRMLRDGVDLHTARRLEFNVGDDWKPAVEPIGAPTGNPAVDRVLKQVSRWLHAATERWGEPTVINIEHARDGLGSERVARELMRENDRRRSANAAAVAEMAAQLKLSGRVRRSDQIRYFALQRQNSQCLYCGTEITFTTAEMDHIVPRADGSSTNDRSNLAAVCRTCNHKKGAVPFAAWASSDRANTGVSLKGALDRVKFWVRDNGMSPKQFKQLQREVSARLKSRKPDEEFDGRSMESVAWMAVELRTRIEGFYRTRDQESVPSVGVYRGQLTAEARKASGFESRVNLIGGRGKNRFDRRHHAMDALVIALMNPSVSRTLALRVNMRDAQRLAGLEETWKNFYGKPGEASQRFESWRESMLRGVELFNIALSDNAIPFVENIRLRVGSSVIHDATVHSFCPPKTPDGEQIITKGYGEQRRLGDVLPVELIDRAETPALWTALTRCPDFDPKKGLPENPNRTITVNGTRVGPMELLNFFGSSAACLKVRGGYVELGSSIHHARIYRIDGKKIAYAMVRIFQVDLLRLKDQDLFTTPLKPSTISMRTAEPKIRQALADGTATQIGWLVEGDELQIDTSKYSGGFIGEVLERYPEVTSWRVAGFPHPAKLRLRPYLLSAEGLDKEASKDMTDLLDGQGWRPAVNVVFSPGTVQITRRNALGELRSSEFSSLPITRVMR

SEQ ID NO: 15304 - protein, 1180 aa, unidentified
  REGION 1..1180: note = Cas Enzyme sequence
MLHRVLLREGPGNFLKRTQMCVRCDTMCPMTTSSENIPSIRYRVGIDVGLRSIGFCAIEVDDEDHPIQILNSVVHVHDAGTGGPGETDSLRKRSGIAARARRRGRAQKKRLKRLDALLEDLGWGVVSNEMLESHAPWHVRKRLLNEYITDEVERRQCLSIAAAHIARHRGWRNPYSKVDTLMLEHEPSDRMRGLKNRVEEQTGLCFSDQATQGELIATLLEHDKDVTVRGFVRKGGKATKELGVLQGKYMQYDLVAELRQICVKQKVSDEVFTQLVSTIFYSKEPQADKKNQRKRVGIDELQLAVDPQAVELRAERAHPAFQKFKIVATLSNMRIHEDGVGERALRPDELRAVTAYLLDESGVGIPTWEEVAGQLGVPRHRLRGASKASLETGGGLRYPPFDETTARVAESEIDWLVDWWMQADDESRGHMIDEISNGCGSETNDIEDEEVIELISGATAEDTAKLELLAKKLPSGRAAYSLKTLREVTSSILETGDDLARVIERLYGVEPGWAPTPAPIEDPVGNPSVDRVVKQVARWLKFAEKRWGIPQVVNIEHTREGLKSASLLEEEKENRIKYEERREERLKKMYAQLGISGPFRRSEQTRYEILYLQDCACLYCGCKIGFETFEIDHIIPRVDASSDSRRENLAAVCHNCNIAKGGMPFGQWMKLNDCPNGVSLEEAIKRVKRWDKNRVGLTEKAMRKRKGEVIGRLKAEKPYEEFDGRSMESVAWMAIELKKRIEGHFNSDRANGNVVKVNAYSGRLTACARRAARVDKRVRLIRLKGDSGHHKNRFDRRNHAMDALVIALMTPAIARTIAVREDRREAQQLTHAFESWKNYLGSEERMQERWGSWIGDVEYACDRLNELIDANKIPVTENLRLRNSGKLHADQPESLRKARRGSKRPRPRRYVLGDALPAEIINRVTDPGLWTALVRVPEFDDQLGLPADPARSLSLRGSRISADFPINYFPTDSPALAVQGGYVGLEFHHARLYRIMGPKEKVTYALLRVCAIDLCGIDRSNLFSVELKESSISMRTADPKLKEALKSGAAHPIGWLVPGDEIQIDPSKFPKQAIGEFLDEFKEYGSISSWRVSGFDTPTRVILKPRVLSNEPLKKGSRLGGRSAELSVSYGVQKIVGGSGWVVAINALLQSGSVRVIRRNALGEVRTSSESHLPVSVNLR

SEQ ID NO: 15305 - protein, 1121 aa, unidentified
  REGION 1..1121: note = Cas Enzyme sequence
MSVGLAAIEVDETGFPIRILNIQSVIHDGGIDPQLGKKKSISRKATSGVARRTRRMRRRKAVRLRQLDATLESLGFPIVEPDSLDTWEVWLTRAKLAGSYIQDDEIRKEDISIALRHIARHRGWRNPYSNVESLFVDVAPSEQYEELRRKAEEKLGTSLSGNPTSAEIVECILKRQVGEVQLRTRSHKGANGNAAEKEGLLPTKLMQSDNAAEIRRIFKVQRIDDETGRKLLRAVFKACSPKGSVERRVGRDALAPGLPRALKASLAFQEYRIANVLTNLVISEDGTKRKLTIAEKQRVFGFLSSNETDDITWIDVAEKLGLERRQIQGVGCLTADGEERISSTPPRNVTALRIHSAKPVIRKKLVAWWKAASPTVRETMVELLSNTVDIDRVREDMDYSSAVAFIDSLDDEELTALDSVDFLSGRAAYSPQTLKQLTERMLNTDDDLHEARKAVFGVDDNWKPPVDTIGTPVGNPAVDRVLKIVNRYLLACQKRWGNPQSVQIEHVRESFSSIAKAKETERAQDERARYRNDLRQKLYEQEGLNKIRESDIRRWESVQRQNGTCLYCESPITFKTCEMDHIVPRKGVGSTNTRVNLAAVCAECNKLKSDTAFSVWARTEDAALRKVSQRDAIERVKTFIFDKSVPPREQRAFKQAVISRLRQTESDPAIDNRSIESVAWMADELHRRIEAYFNQDTDTSGNAPATRVWVFQGRVTALARKASGIEGRIHFAGEWKKTRLDRRHHAVDAAVIAMMNHSAAQTLVERDSLRLSQWITREPETWKSYPFSEGQKKTRFKEWLDCMNTLLDLLNDALDSDRVSVTRCQRMSLGNSQAHAATIRKMKHVELSSPMDADLIRRASTPALYCALTRLPEYSPEKGLPENRGREIVLNGRHIRSTETIDFFVSGAAQLMVRNGSAEIGDSIHHMRIYRYRKTGAKSQKYMYGMIRVFQIDLLHASSEDLFAVQLPPQSVSVRYGDKNVVQAIQEGRAEYLGYIVPNDEILISYEGVQMKDSEKIGAYANDFSGTASELAQRRHWVVVGSDVSKLALRPSYLSEEGLENSGSESDRLSNQTRKVIEGKGWVVAVNILAKYHPVVIRRNALGEPRFRTDSGMPVSWRWDR

SEQ ID NO: 15306 - protein, 1067 aa, unidentified
  REGION 1..1067: note = Cas Enzyme sequence
MRNKKVARLRQLDLLLEELGFPIVEPDSLDARDAWRVRAKLVDSYILDDEIRKEDVSIALRHIARHRGWRNPYSSVESLLIDTVPSKQYEELRSKAEQKLGRKFLGNPTPAEIVCRVWEEQGETARLRTSRHKDKNGKVVAREGLLPVKLMQSDNAKEIRRIFETQRIDDATGRRLLKAVFKASSPKGSAAQRTGRDALAPELPRALKASMAFQEYRIANVLTNLVISVKGVERKLTVEEKRRVFALLSSDKRNDVTWIDVAEELGVERNQIQGVGRLTADGEERISSMPPRNVTVSRIRSVKLVRKKLAAWWKSASVAERETMVEILSSAVDIDRVREHMDYASASTFIDSLDDEELVALDSMNLPSGRAAYSIQTLKCLTERMLNTDDDLHEARKSVFGVGDDWKPPVDAIGVPVGNPSVDRVLKIVNRYLLACQRRWGNPQSVQIEHVREGFSSVAKAKKTEKAQAERAQYRNDLKEQIRREKLAKIRESDIRRWEAVQRQNGECLYCGRPIDFNTCEMDHIIPRKGAGSTNTRVNLAAVCAVCNKLKDNTAFSVWARTQEAIAQDTSGYKVSLRDAIERVKVFNFDQSVPSPRDQRVFRQAMISRLKQTESDPAIDNRSIESVAWMADELHRRIEAYFNRDADTSKNTIKTKVWVFRGRLTALARKACGIEGRIHFAGKQRKTRLDRRHHAVDAAVIAMLNHSVAQTLVERDSLCLSQWITRRPETWTEYPFVEGQKKTRFEEWLCRMDGLLDLLNNALDADCVHVIRNQRLALGNSQAHDAIIRKMEHVELLSSMDSDLIRRASTPALYCALTRLPDYSPENGLPENHNREIVLNGRRIRSTEMVDFFASGAAQIAVRNGSAEIGNAIHHMRIYRYRKNGKSTQEYTYGMIRVFQVDLIHASSKDLFTVQLPPQSVSMRYGDRNTVQAIQEKRAEYLGYVVPNDEIVIDFEGVQMKDSEKIGAYARDFSGTASELAQRRHWVVVGSDVSKLALRPAYLAEEGLENLESDRFSEQTRKVIGKGWVVAINVLAKYRPVVIRRNALGEPRFRSNSGMPISWRWNG

SEQ ID NO: 15307 - protein, 1121 aa, unidentified
  REGION 1..1121: note = Cas Enzyme sequence
MSVGLAAIEVDETGFPIRILNIQSVIHDGGIDPQLGKKKSISRKATSGVARRTRRMRRRKAVRLRQLDATLESLGFPIVEPDSLDTWEVWLTRAKLAGSYIQDDEIRKEDISIALRHIARHRGWRNPYSNVESLFVDVAPSEQYEELRRKAEEKLGTSLSGNPTSAEIVECILKRQVGEVQLRTRSHKGANGNAAEKEGLLPTKLMQSDNAAEIRRIFKVQRIDDETGRKLLRAVFKACSPKGSVERRVGRDALAPGLPRALKASLAFQEYRIANVLTNLVISEDGTKRKLTIAEKQRVFGFLSSNETDDITWIDVAEKLGLERRQIQGVGCLTADGEERISSTPPRNVTALRIHSAKPVIRKKLVAWWKAASPTVRETMVELLSNTVDIDRVREDMDYSSAVAFIDSLDDEELTALDSVDFLSGRAAYSPQTLKQLTERMLNTDDDLHEARKAVFGVDDNWKPPVDTIGTPVGNPAVDRVLKIVNRYLLACQKRWGNPQSVQIEHVRESFSSIAKAKETERAQDERARYRNDLRQKLYEQEGLNKIRESDIRRWESVQRQNGTCLYCESPITFKTCEMDHIVPRKGVGSTNTRVNLAAVCAECNKLKSDTAFSVWARTEDAALRKVSQRDAIERVKTFIFDKSVPPREQRAFKQAVISRLRQTESDPAIDNRSIESVAWMADELHRRIEAYFNQDTDTSGNAPSTRVWVFQGRVTALARKASGIEGRIHFAGEWKKTRLDRRHHAVDAAVIAMMNHSAAQTLVERDSLRLSQWITREPETWKSYPFSEGQKKTRFKEWLDCMNTLLDLLNDALDSDRVSVTRCQRMSLGNSQAHAATIRKMKHVELSSPMDADLIRRASTPALYCALTRLPEYSPEKGLPENRGREIVLNGRHIRSTETIDFFVSGAAQLMVRNGSAEIGDSIHHMRIYRYRKTGAKSQKYMYGMIRVFQIDLLHASSEDLFAVQLPPQSVSVRYGDKNVVQAIQEGRAEYLGYIVPNDEILISYEGVQMKDSEKIGAYANDFSGTASELAQRRHWVVVGSDVSKLALRPSYLSEEGLENSGSESDRLSNQTRKVIEGKGWVVAVNILAKYHPVVIRRNALGEPRFRTDSGMPVSWRWDR

SEQ ID NO: 15308 - protein, 1121 aa, unidentified; identical to SEQ ID NO: 15305
  REGION 1..1121: note = Cas Enzyme sequence

SEQ ID NO: 15309 - protein, 1040 aa, unidentified
  REGION 1..1040: note = Cas Enzyme sequence
MKTLGIDLGTNSVGWAIIEDRKILDAGVRVFEAGLEGNLQDGTQVSRNATRREKRMLRRQHERRARRMCKIMQILQAAHLMPVSDNMAEAIVNIDNRVLKRLKSLADIQHLAHVIPYRLRAEALDVRLNDFELGRALYHLAQRRGFLSNRKTSVSEEDEETGQVKNGIHELDELMQASGSRTLGEYFSSLDPEMERIRGRYTGRKMFVHEFKQVISKQRELGNTHLTESFEKQLYRAIFRQRPLKSCRNLVGVCPLENHQNRAAWYHPLAQKFRVLQTVNHLRLSFESGEARCLNVEERETLLALLYRSSCLSIASAKKALKLNDKKNPCVFSIEEGGEKSLPGHAVNSKLIAIFGEERWMQHLSEEDQVKIVLDIQSYTSANGLKKRGMKVWGLTEEQAEAFADVQLPPDYAGLSLVALRKILPLMAKGAEYMTAVTEVYGNVLRTDHVYDELPMIKGFIKDLRNPAVERTLTQLRHVINPIIRNYGKPDEIHIELAREMKKSIKEKKMLTKKVREQEKLRKEAAFELKSQLSEFEHHEPRRRDIEKYLLWKECRGQCPYTGKPISLPNLFGDTPEFDIEHIIPYSLSLDDSFVNKTLCHVRANREEKRNRSPYQAYAEDASRFEQMIERVNKFESLARVEKLRRFKLEALDEFSDFANRQLNDTSYASKLAKGYIAALYGGTYDETKQRVLAVSGNITAIIRNYFKLNRILGEGDRKTRSDHRHHAVDAIVIALTSQRTIQSVSETAAEFATKSQRLMYQGGCEPWDGFTQEVRRAIEAIKVTHAVSHKVRGPLHEETNYGIVKGEEGVVSYRKALQNLSEKDLGNITDLVVKTIVQETFISLGIYDQVSGKLDVRKMSMLNDPNNLPRMKTGDGRVGPLIKSVRCHKPLATVLLGDAASPRAVVTGNNHHMEIVETTDKKGNVKWEGVCVSMMEAYDRKRKKLPVVQQDHGKDKKFVFSLACGDIIECVMEDDIKKKLFVIRSVPQSKQLGFVPINNALKKSDMETDFKTKMIEPLRLTGARKVTITPFGDIRYAND

SEQ ID NO: 15310 - protein, 1099 aa, unidentified
  REGION 1..1099: note = Cas Enzyme sequence
VSLSYRVGIDVGTYSLGCTAIEVDDNDQPVNILSSVSLIHDSGLDPDQQKRAVTRLASSGVARRTRRLYRRRRRRMINLEKFLTSQGWETRPFEHYSDPYLPWNARVALVNGYISDDAQRGMYLSIAFRHIANHRGWRNPYWKVSSLYSPDKPSDAFEQIRKELEESTGHKIPETVTVGQLISFAQFGKDRLRGGGKKKDEKKPQEQVNQAVISARLHQIDHAREINEICRVQKIDDALRKQILDLVFAAESPKGAQIGRVGKDPLQPKLPRALKASDAFQQYRIVALAGNLRIYRDGVSTPLDRDEKLIVFNYLINLSHKEEPSWLKVAEVLNIDRGQLHGTATMTDDGERAGAAPPVHDTNRTILGCKIKPLVHWWEGANDDERAAMLKALSNSEVEDFDSPAGAQTQAFFANLDESEQEKLDSLHLPIGRAAYSEDTLMRLTSRMLDENLDLYEARLAEFDIPKDWAPPAPRIGEPVGNPAVDRVLKGVARWLEAAADEWGAPKSVVIEHVRDGFISKSKANEIDRANNARHKRNRELFKQMQENLGIDGKLRSSDLWRYQSVQRQNCQCAYCGSPITYTTCEMDHIVPRAGEGSTNTRDNLVATCHRCNLAKKNIPFAVWAAQTNIPGVSVKEALDRTRHWSEDSGMTSKDFKKFRKNVCDRLKRTVVDEPLDARSMESVAWMANELRGRVAQRFQEENTVVNVYRGELTAEARRAAGISDKLRFIDGTGKSRLDRRHHAVDAAVVAFTQNYVAETLAIRSNKKREAQLLQAAEQWKEFTGSDAEHRAAWNAWLPKMQKLAVLLQKALDEDRIAVTSNLRLRLGNGRAHEDSIGELKTIRVGDAISVTDIDRASSEALWCALTREPDFDENNGLPENPDRRIRIHGTWYDAEDDIEVFPVGAGAIKVRGGYAELSRFHHARIYKIPGKKAPVYCMLRVYNADLIRHRHEDLFSVEIKPQTMSVRQAEPKLRKALAENTAEYLGWLVTDDELVIDTSNFNTGQIAEMQSELGQVRRWRLDGFYSPSTLRLRPLQMSAEGLREDTSIGAKKIIDRPGWLPAINKLFGEGHVTVVRRDALGRARLTSNAHLPISWKAE

SEQ ID NO: 15311 - protein, 1024 aa, unidentified
  REGION 1..1024: note = Cas Enzyme sequence
MINLEKFLTSQGWETRPFEHYSDPYLPWNARVALVNGYISDDAQRGMYLSIAFRHIANHRGWRNPYWKVSSLYSPDKPSDAFEQIRKELEESTGHKIPETVTVGQLISFAQFGKDRLRGGGKKKDEKKPQEQVNQAVISARLHQIDHAREINEICRVQKIDDALRKQILDLVFAAESPKGAQIGRVGKDPLQPKLPRALKASDAFQQYRIVALAGNLRIYRDGVSTPLDRDEKLIVFNYLINLSHKEEPSWLKVAEVLNIDRGQLHGTATMTDDGERAGAAPPVHDTNRTILGCKIKPLVHWWEGANDDERAAMLKALSNSEVEDFDSPAGAQTQAFFANLDESEQEKLDSLHLPIGRAAYSEDTLMRLTSRMLDENLDLYEARLAEFDIPKDWAPPAPRIGEPVGNPAVDRVLKGVARWLEAAADEWGAPKSVVIEHVRDGFISKSKANEIDRANNARHKRNRELFKQMQENLGIDGKLRSSDLWRYQSVQRQNCQCAYCGSPITYTTCEMDHIVPRAGEGSTNTRDNLVATCHRCNLAKKNIPFAVWAAQTNIPGVSVKEALDRTRHWSEDSGMTSKDFKKFRKNVCDRLKRTVVDEPLDARSMESVAWMANELRGRVAQRFQEENTVVNVYRGELTAEARRAAGISDKLRFIDGTGKSRLDRRHHAVDAAVVAFTQNYVAETLAIRSNKKREAQLLQAAEQWKEFTGSDAEHRAAWNAWLPKMQKLAVLLQKALDEDRIAVTSNLRLRLGNGRAHEDSIGELKTIRVGDAISVTDIDRASSEALWCALTREPDFDENNGLPENPDRRIRIHGTWYDAEDDIEVFPVGAGAIKVRGGYAELSRFHHARIYKIPGKKAPVYCMLRVYNADLIRHRHEDLFSVEIKPQTMSVRQAEPKLRKALAENTAEYLGWLVTDDELVIDTSNFNTGQIAEMQSELGQVRRWRLDGFYSPSTLRLRPLQMSAEGLREDTSIGAKKIIDRPGWLPAINKLFGEGHVTVVRRDALGRARLTSNAHLPISWKAE

SEQ ID NO: 15312 - protein, 1092 aa, unidentified
  REGION 1..1092: note = Cas Enzyme sequence
GIDVGTYSLGCTAIEVDDNDQPVNILSSVSLIHDSGLDPDQQKRAVTRLASSGVARRTRRLYRRRRRRMINLEKFLTSQGWETRPFEHYSDPYLPWNARVALVNGYISDDAQRGMYLSIAFRHIANHRGWRNPYWKVSSLYSPDKPSDAFEQIRKELEESTGHKIPETVTVGQLISFAQFGKDRLRGGGKKKDEKKPQEQVNQAVISARLHQIDHAREINEICRVQKIDDALRKQILDLVFAAESPKGAQIGRVGKDPLQPKLPRALKASDAFQQYRIVALAGNLRIYRDGVSTPLDRDEKLIVFNYLINLSHKEEPSWLKVAEVLNIDRGQLHGTATMTDDGERAGAAPPVHDTNRTILGCKIKPLVHWWEGANDDERAAMLKALSNSEVEDFDSPAGAQTQAFFANLDESEQEKLDSLHLPIGRAAYSEDTLMRLTSRMLDENLDLYEARLAEFDIPKDWAPPAPRIGEPVGNPAVDRVLKGVARWLEAAADEWGAPKSVVIEHVRDGFISKSKANEIDRANNARHKRNRELFKQMQENLGIDGKLRSSDLWRYQSVQRQNCQCAYCGSPITYTTCEMDHIVPRAGEGSTNTRDNLVATCHRCNLAKKNIPFAVWAAQTNIPGVSVKEALDRTRHWSEDSGMTSKDFKKFRKNVCDRLKRTVVDEPLDARSMESVAWMANELRGRVAQRFQEENTVVNVYRGELTAEARRAAGISDKLRFIDGTGKSRLDRRHHAVDAAVVAFTQNYVAETLAIRSNKKREAQLLQAAEQWKEFTGSDAEHRAAWNAWLPKMQKLAVLLQKALDEDRIAVTSNLRLRLGNGRAHEDSIGELKTIRVGDAISVTDIDRASSEALWCALTREPDFDENNGLPENPDRRIRIHGTWYDAEDDIEVFPVGAGAIKVRGGYAELSRFHHARIYKIPGKKAPVYCMLRVYNADLIRHRHEDLFSVEIKPQTMSVRQAEPKLRKALAENTAEYLGWLVTDDELVIDTSNFNTGQIAEMQSELGQVRRWRLDGFYSPSTLRLRPLQMSAEGLREDTSIGAKKIIDRPGWLPAINKLFGEGHVTVVRRDALGRARLTSNAHLPISWKAE

SEQ ID NO: 15313 - protein, 1109 aa, unidentified
  REGION 1..1109: note = Cas Enzyme sequence
MSRSLTFSFDIGYASIGWAVIASASHDDADPSVCGCGAVVFPKDDCQAFKRREYRRLRRNIRSRRVRIERIGRLLVQAQIITQEMKETPGHPAPFYLASEALKGHRNLAPIELWHVLRWYAHNRGYDNNVSWSGGFSEDGGNKEDTERVQHAKDLMDKHGTATMAETICRELKLEEGKADAPMNVSTPAYKNLNTAFPRLTVEKEVRRILELSAPLIPGLTSEIMELIAQHHPLTTKQRGVLIHYGIKLARRYRGSLLFGQLIPRFDNRIISRCPVSWAQVYEAELKKGNSEQNARERAEKLSKVPTANCPEFYEYRMARILCNIRADGEPLSAEIRRELMNQARQEGKLTKASLEKAISSRLGETETNVANYFTLHPDSEEALYLDPAVEVLKRSGIGETLSPSVCRLAANRLRRGKSVTPNYLLNLLKSRGESVEALEKKIEKERHQQANRKKAKKTDPDYAATPLKPRYATGRAPYARPVLKKVVEETLDGEDPTRPARGEAHPDGELKAHDGCLYCLLDTDSSVNQHQKERRLDTMTNNHLVRHRMLILDRLLKDLIQDFAGGQKDRISRICVEVGKELTAFSGMDSKKIQTELNLRQKSHTEAVNRLKRDLPGKALSANLIRKCRIAMDMNWTCPFTGATYGTHELENLELEHIVPHSFRQSNALSSLVLTWPGVNRMKGQRTGYDFVEQEQENPVPDKPNLHICSLNNYRELVEKLDDKKGHEDDRKRKKKRKALLMVRGLSHKHQLQNHDAMKEIGMTEGMMTQSSHLMKLACKSIGNVLPDARIDLIPGAVTAEVRKSWDVLGVFKELCPEAADPVSGKILKENLRSLTHLHHALDACVLGLIPDIIPAHHNGLLRRVLAMRRIPEKLIPQVRPVANQRHYVLNDDGRMILRDLSISLKENIREKLMEQRVVKHIPADMGGALLKETMQRVLSVQGNGEDAMVSLSKKKDGKKEKNQVKASKLVGVFPEGASKLKALKAAIEIEGNYGVALDPKPVVIRHIKVFKQIMSLKEQNGGKPVRILRNGMLVHLTSSKDPRRTGVWRIASIKDGKVGVKLDLQRAHCAAPTNKKHECNWREVDLISLLKKYQMKIYPTSYTGTPR

SEQ ID NO: 15314 - protein, 1109 aa, unidentified; identical to SEQ ID NO: 15313
  REGION 1..1109: note = Cas Enzyme sequence

SEQ ID NO: 15315 - protein, 1042 aa, unidentified
  REGION 1..1042: note = Cas Enzyme sequence
MPLVFGFDIGTTSVGFAVISHDSRLATGKIHRLGVRIFPEARDPKGVPLNQGRRQARLRRRQLRRRRERRRLLGDLLLDAGLLPPRDSTDWDLVMKRDPYDLRRRAFEGETLSPVETGRAIYHLAQRRHFRGRDIEEVSDTADDANDEADDRQATSARERTVQALRREGKTLGAWIAERGPHERRRGEHATRDIVEDEFSGVWLPRVPEPFRSSVREAVFLQRPVFWRLNTLGRCRFVPGAPLCPKGSWLSQRRRMLEKLNNLALAGGNQRPLDSEERQAILDELQTRASMGWPGVRKALAPLYRARGEPGAEKALKFNLEEGGEGKLLGNPVEAKLADIFGDGWRGHPRRREIRESLPERIWEADYERVGDQRVVILPKAERGRRRAEVARDFAAEFGLPGDRAARIEGLKLPSGWEPYSVEALRAMLPHLEAGVRFGELVTGPDREAWRAKTFPERDRPTGEVFDRLPSPADPEERNRVASLRNPTVARARNELRKVVNNLIDLYGKPDLIRVEVARDVGNSKRQREEKASGIRRQERRRKAAREALLQNGLAEPSRADIERWMLWEECGHRCPYTGDSISFEALFRTGEFEVEHIWPRSRSLDNSFRNKTLCRGDVNAEKGNRIPYEFFRSNAEEWDALARRVAGMKAARGGTGMSPGKIRRFLAPLIPEDFAARQLNDTGYAAREAVAHLGRLWPDLGPEAPVKVFAVSGRVTGHLRRLWGLNSILAEDGEKTRADHRHHAIDALTVACCHPGMTQKLSRHWREDDDPRTPPPHLPPPWETIRGDAERAAAAIVVSHRVRRKVSGPLHEETVYGDTGGESADRGTTYRHLVRRKPVEELKASESERFSGARIIDIIDVGVRDIVREWVDRHGGDPGAAFAHGYPRRGRKGPEIRRVRLRVRRQIELMAKASTGYAALGSNHHIAIYRLEDGTVDWEVTSLLEASRRVARHEPVVRRDRGDGAQFLMSLSPGDSVRIAERGEMRLKTVRSVWSSGQVEMVDHDDARGATVFRPRARTIASSGGRKVSVDPIGRVRPAND

SEQ ID NO: 15316 - protein, 1045 aa, unidentified
  REGION 1..1045: note = Cas Enzyme sequence
VTSMPLVFGFDIGTTSVGFAVISHDSRLATGKIHRLGVRIFPEARDPKGVPLNQGRRQARLRRRQLRRRRERRRLLGDLLLDAGLLPPRDSTDWDLVMKRDPYDLRRRAFEGETLSPVETGRAIYHLAQRRHFRGRDIEEVSDTADDANDEADDRQATSARERTVQALRREGKTLGAWIAERGPHERRRGEHATRDIVEDEFSGVWLPRVPEPFRSSVREAVFLQRPVFWRLNTLGRCRFVPGAPLCPKGSWLSQRRRMLEKLNNLALAGGNQRPLDSEERQAILDELQTRASMGWPGVRKALAPLYRARGEPGAEKALKFNLEEGGEGKLLGNPVEAKLADIFGDGWRGHPRRREIRESLPERIWEADYERVGDQRVVILPKAERGRRRAEVARDFAAEFGLPGDRAARIEGLKLPSGWEPYSVEALRAMLPHLEAGVRFGELVTGPDREAWRAKTFPERDRPTGEVFDRLPSPADPEERNRVASLRNPTVARARNELRKVVNNLIDLYGKPDLIRVEVARDVGNSKRQREEKASGIRRQERRRKAAREALLQNGLAEPSRADIERWMLWEECGHRCPYTGDSISFEALFRTGEFEVEHIWPRSRSLDNSFRNKTLCRGDVNAEKGNRIPYEFFRSNAEEWDALARRVAGMKAARGGTGMSPGKIRRFLAPLIPEDFAARQLNDTGYAAREAVAHLGRLWPDLGPEAPVKVFAVSGRVTGHLRRLWGLNSILAEDGEKTRADHRHHAIDALTVACCHPGMTQKLSRHWREDDDPRTPPPHLPPPWETIRGDAERAAAAIVVSHRVRRKVSGPLHEETVYGDTGGESADRGTTYRHLVRRKPVEELKASESERFSGARIIDIIDVGVRDIVREWVDRHGGDPGAAFAHGYPRRGRKGPEIRRVRLRVRRQIELMAKASTGYAALGSNHHIAIYRLEDGTVDWEVTSLLEASRRVARHEPVVRRDRGDGAQFLMSLSPGDSVRIAERGEMRLKTVRSVWSSGQVEMVDHDDARGATVFRPRARTIASSGGRKVSVDPIGRVRPAND

SEQ ID NO: 15317 - protein, 1239 aa, unidentified
  REGION 1..1239: note = Cas Enzyme sequence
MKKRTLGLDLGSNSLGWAILDDATGDILDKGVVVFPEGMDPSADSTESPAAIRRAARMARRMKFRRKIRKWTLLSLLLENGMCPLKKEELADWKAHGRYPTSNAAFLAWLKASDTKNPYCDRAAAADGPVPPEVLGRALYHLAQRRGFMSSRKDEADGGDEGASSAREKELGAVKAGIKALDEEIRASGGKTLGQYFKKVLDEDRGKPAKRRIRKRYTGRVEHYEKEFAAIMDAQSGTVQPDLRGKLHDAIFDQRPLRSQAHLVGPCPLEPKSPRAQIAHPAFEEFRMLSFVNNLTLEDASGEWRDPAGAPLHPLTPDDRAKIRKAFMKASPTFKFGDISKLFKKDPRFKNDGFRFHYYRDDETLSSCSLWHRLLGIFGPSGGDDPFRFQAEFDALTFYNDRDKLREWLSKHHPELDEDAAAAFLKIHPREGNAQYSLKAIRRILPWLRKGHQLSDARFFAKLPEVVTGFDANEDRIIRDLLDIEAATRRERANRAKENVRATEKPPVPLADRWRDYLAKTWGVDETGWKRLYLRGEDPYAPQTEIDRNGKKIPLARPRLPRVELGMIRNPLVQRSMTTLRRLVNYLGDHGKIDPSTTIRIELARTVHDAATRKGWQKWQETRKELREKACKAIQEAGERPTDLLVERYLLWMEQNKKCLYTGKTINLTDLLNAKPDAPFDVEHTIPRCKSGDNSLANRTICDMEYNRHKKQGRIPRECPNWAEIDVRLQPWREQLEALETAFGKKAAAARKATDPKAKSAARAKAVALRFERDYWRDKLRRFEATSEQLEFGTGDLTGFKKRQLVDTGIMTRHAVDLLKCLYPRTFTVNGAATAFARMAWGIQTDEAKNRDEHTHHATDAMVIAALSPARFNAICSALKDDAKSRRRPCDVCPPPFKDFAEKVRRATDEILVKHVLRQTTLRQSSRRNVLARAHAPKGNPDGKQIKAVRSRGDTVRGRLHKDTFYGKIQPPEGGEKQFVVRKPLAGKVSDVKDWLGRIVDGGIKTVVGQAVLVAEAEGKTFFEPGDIVMPSGVPIFKVRVFAPPNAGPVELRAHSMRSQKDYKTPYYVSTAEGSNFRLALFRQKGIFSVEPDNSLRWAQEHKKTDYLPLHSQEGFLGYVMPGTMALVHSLGKPEELRRLSQVELRNRLYKIVNFEGNGLITFRFHAEARPSSVLGQYLASLPKSAKRNKKGESNISLDTPYELLRLSPKTYQNQVLFEGIHFHMLMDGSIHFLDPRRA

SEQ ID NO: 15318 - protein, 1021 aa, unidentified
  REGION 1..1021: note = Cas Enzyme sequence
RRWARAARRLPRRRAHRLLRARRLLKHEGVLKPEDFDENGFIKLLPNTPWQLRAAALDRRLAPLEWAAVLLHLVKHRGYLSQRKNEEQTADKELGALLKGVADNTHALQAGNFRTPAELALNKFEKESGHIRNQRGDYSHTFSRKDLQAELVLLFEKQKEFGNPYVSDDLKNSIENMLMTQRPALSGDAIQKMLGHCTFEPAEPKAAKNTYTAERFIWLTKLNNLRILNQGNERPLTDAERTKLMDEPYKKSKLTYAQARKLLGLEDTAFFKGLRYGKDNAESATLMEMKAYHAISRALEKEGLKDKKSPLSLSPELQDEIGTAFSLFKTDEDISGRLKDCLQPEILDALLKHISFDKFIQISLKALRRIVPLMEQGKRYDEACAEIYGDHYGEKNSEEMLYLPPIPADEIRNPVVLRALSQARKVINAVVRRYGSPARIHIETAREVGKSFKDRKEIEKRQEENRKDREKVAAKFREYFPNLVGEPKSKDILKLRLYEQQHGKCLYSGKEIDLGRLNEKGYVEIDHALPFSRTWDDSFNNKVLVLGSENQNKGNRTPYEYLNGKDNSREWLEFKARVETSRFPHSKKQRVLLQKFDEEGFKERNLNDTRYVNRFLCQFVADHMHLTGKGKRRVFASNGQITNLLRGFWGLHKVRAENDRHHALDAVVVACSTVAMQQKITRFVRYKEMNTFDGKTIDKETGEVLHQKTHFPQPWKFFTQEVMIRVFGKPDGEPEFEEADTPEKLRALLAEKLPSRPEAIHEYVMPLFVSRAPNRKMSGQGHMETVKSVKRLNEGISVLRVPLTQLKLKDLEKMVNREREPKLYAGLKARLEAHKDDPVKAFAEPFYKHDKAGNRTQQVKAVRVEQVQKTGVWVRNRNGIADNATMVRVDVFEKAGKYYLVPIYSWQVAKGILPDRAVVAYAEEENWTVMDESFKFKFVLYANDLIKLTAKKNEFLGYFVSLNRATGAIDIRTHDTDSTKGKNGIFQSVGVKTALSFQKYQIDELGKEIRLCRLKKRPPVR

SEQ ID NO: 15319 - protein, 1014 aa, unidentified
  REGION 1..1014: note = Cas Enzyme sequence
LKSAGVRTFPAGVEGDASAIASGRDVSRAVKRREARSRRRLLARRRHRLTKLALILQGADLLPAGDIGSPDALVSYFAALDRGIFPLDARRANPHLLPYALRARALDERLTPHELGRTLYHLAQRRGFLSNRRVKPKPAGAKQSDEEKEEGVVKAAIGELAKHIEDAGARTLGEYLSRLDPEQERVRNRYLSRKMLLDEFEAIWTAQRAHHPSILTDDLKEKVHRAIFFQRPLKSARHLIGKCDLEKGKRRAPLACLSAQRFRLLQKVNDLQLFLPDGEVRELTPEERATLLDALQREGDQTFAAVRRLLKLPRGSKFNFETEGEKGLIGNRTARKLADVFGEKRWAAFPPKEREHIVNEMRSIHNRDALKRRARKQWPLDDETAQRLAEVALEDGYCNLSRQALAKVLPLMEEGIQYATARKQLYGDQPGPRQLSSLPRLETALEVRNPAVERALTELRKVVNAIVREHGLPAYVRIELARDLKRNRKDRKEISLRNAKNRRGREEAARKIIAEAGIPNPRRSDIEKWLLADECGWQCPYTGKQISVESLFGDHPQFDIEHIIPFHRCLDNSFMNKTLCDLEENRAHKRNRTPHEAYAHDEENWARIIARVKQLSGRSGRVKLERFQSETVPGIDDFATSQLNDTRYASKLASEYVGLLYGAGASGVDPDGTRRLQAGRGAVTADLRNEWELNSILGGGEKTRDDHRQHAIDAIVTALTTPATIKRLSDAAARAPQARRRRFAPVEPPWPGFLEYVRAAIGDLVVSHRVSRKVVGAIHEDTYYGRYEDADGKVWAHQRKPLADVTDIESIVDPAIRECVRKELKGRTPKEAFASKADCPHLRTKKGRNIPIYRVRIRKRDSLTPIGRDARSRHVKLGSNHHVEIVEATDKNGNPRWEGVVVSTLEAMRRLKAREPIVQRDHGSGKRFLFSLCGGDTIELDAEHEKKELYVVRTISLKKTGRVTVDFVGIKDARKKSDIQVAGAWGSSDIDPLRKRNCLKVIVMLLGEVRRAGD

SEQ ID NO: 15320 - protein, 1062 aa, unidentified
  REGION 1..1062: note = Cas Enzyme sequence
MEIAGVRQDQDDSILGLDIGAASIGWALVELRDGEPHALKAAGVRVFEAGVEGDIASGRDQSRAAKRREARSRRRLLWRRRHRLTKLAACLQQAGLLPPGDLSTPAAIDAYFIGLDRELFPQHIRTHDPHLMHYRLRARAPDEKLTPYQTGRAIYHLAQRRGFLSNRRETARPRADDDEGVVKKAIGELEHEMRAAGARTLGEHLSRLNPEHDRVRGRYISRAMIEHELDAIWQAQASHYPDLLTDDLKTAVRRAILHQRPLKSPRRFIGFCDLERDRRRAPLAILPAQRHRLLQKVNDLKFIPNGELPHGITPEQRAALADALETNADLSFPAIRKLLSLKGGRFNFETEGEKGLIGNKTAARLITVFGEERWAAFTPEQRNQIVDDLRTIHTRDARKRRAISAWNLDDGLADRFADLVLEDGHHSLSRQALARVLPLMEEGQPFATARKACYPDHAEGNPRDLLPPLDDVMEVRNPTVERALTELRKVVNAVVRKYGKPVSIRIELARDLKRNRKQRQDIHFRSIANRKDRDAAKALLDARGITNPRRSDVEKWLLAEECGWICPYTGRHISVDALFGDAPQFEVEHIIPFPRCLDDSFLNKTLCHVDENRRKGNRTPWEAYHDTPQWDEIIGRVRSFQGGGRGRAARNPKVERFLRQEAATIDDFTSQQLNDTRYASRLAVEFVGQLYGAGADGVDPERTRRVQAGRGQITSDLRNEWALNCILGGGEKTRDDHRQHAIDAVVVALTDAAMVKRLSDAAARAPSAHRRRFAPVDSPWPTFLEDVRDSITGMVVSHRVSRKVAGPMHEDTLYGRYRYPAEDGKERDWAHVRKPLSGSRSPLSRNDIPDIVDPAVRRCVEEKLAALGETDPGNAFKSRENHPALRARDGRDIPIHKVRIRRPDSTRQIGLGPSVREVIFGSNHHVEVVETTDAKGRTKWEGAVVSTFDAMSRLKGRTPIVQQDPGPGRRFLFSLAGGEIIELDDKEDGGSPEAQRSLYTLRSIWESRGSVRVEFTGINDARQKDAIRKAHAVQTATVDVLRQRNCRKVLVSPLGEARNAGD

SEQ ID NO: 15321 - protein, 1054 aa, unidentified
  REGION 1..1054: note = Cas Enzyme sequence
LGLDIGANSVGWAAVTLDGDGRPVGLGGTGVRVFPEGVEGDLTTGREKSRAVKRREARLRRRMLERQTRRLVKVALVLQGAGLLPAGKARSAADRMSFFAALDESLFPEQARKTAPHVLPYALRARALDERLERYELGRALYHLAQRRGFLSNRRESAGARGDDQKKEEGKVKKGIGELRERMEKSGARTLGEYFAGLDPTQERIRQRYTARGMYEEEFEAIWAAQAAHHPAMLTEELKKRLHRAIFFQRPLKSQAHLIGECDLERGRRRAPWALLSAQRFRYLQKVNDLDVTEPTGERRRLTDEERNKLAEALESKPNLTWAGVRRALGLARGCHFNYEEGGEKGLLGNKTAARLAGVFGRERWAGMSREEQDRVVEDLHSIHDRKALARRGMRAWGLDEEAAGEFAGIPLEDGHCSLSRQALERVVPLLEEGVQYATARKQLYGEKPGPRAVDALPPLDDVLEVRNPAVERALTEVRKVVNAIVREHGRPHRIRIELARDLRRTRPQREKTARQQRRNRAAREAAAGKLLHDMGMASPKRDDTEKVLLAEESGWQCPYTGKTITMQALFGEAPQFDVEHIVPFHRCLDNSFVNKTLCEADENRSRKRGRTPWEAYGSDAERWEEIIARVRGFKSNVARAKLEKFLQQEMEGLDEFAARQLNDTRYASRLAVEFVGHLYGARADGVDPHGKQRVEASRGQVTWFLRSEWRLNQILGGGPEKERADHRQHGIDAVVVALTEPRTVKMLSQAAVRAAQAGRRRFAPVEPPWPGFLDEVREAVLGMLVSHRAQRKVSGPMHEETIYSKLHPDREGREWAHVRKRLGSDRQALSQAEVGDIVDPVIRRLVEEKLRELGVGDPKKAFASEENHPEMVTRDGRRIPIHSVRIRSSVGTETIGKGPRERRVKLGSNHHVEILEVKDKRGRVKWEGVVVSMYKAMRRLRAAEPVVQREHGHGKEFKFSLAGGEIIELDAEEDKMDKAGRGKTAAAGLYVVRTVTLTGGYPRVDFAAANDARLKKDMLAAGDWGWASMSRLQKRNCRKVSVTPLGEVRRAGD

SEQ ID NO: 15322 - protein, 1007 aa, unidentified
  REGION 1..1007: note = Cas Enzyme sequence
MWRTRQAHKAREAWLDEVWRAAGQEPLRKREVWRNPETKKWDLKHTADERLEREFAKKGDQTCYTSCLLRIKLLRGEKLEPWQIYKALHSAIQRRGYDPDIPWKARESSRRANSEGDKEEEGTRERMEHYVTELRAMFPNREDCQFPCYVDAVRMKLCDPAQPDVLLPRIDCHAESTRDQIVPRQLIEEEIRMLADAAGREIDGLVNKADYLLWGPAEHPYASYNAGLRKKFGLREGGANDWQGVVGQKIPRFDNRIIEKCSLIPRLNVCKIKSDGKEPLPESLIVCEATYLMKLKNMRVQRSAAEQTGLTAQEIRSVFEDPKIKGFKVTENQWKRVCERFGVRPLPGSSKVEPPRMGGRSRFCRPALGILKRLVLSGKNPPDFFREELGILNGNTDPKHGLVADDLKFLACMGHTWEGIHIPNQKLEAIVQQADDPDEAIRTIIGSQNDPIVRHRLTMFAERLAALRAAHGAPEMVVLEFIREDFMGKKAVIKYRAFLKKRDAERKLAREDAIKVGATERSSSLKLELLRAQGGICMYTGVALQETKLDEYEIEHIVPRSKGGPDAVINYVLTTHAANKEKDERTPFEWLSKTDRWDAYVHRVRSRATALRNKKVKLLLNEDAAELAERYTALAETAWISKLAQAILDVFFGWRNGNDPTGRKRTAIVNGGLTARIRRKYKLNSLLNPEAKDEEEAEKKNRSDDRHHALDAMVISFIPGWTRDVAKEHFFRLPDGVNRETLGREISEVMPRNICLEKPVLAETIYGARENGSGRIIVQRAEVLKLAYKPINPSKSVYDLGYATKQFKSIRDWNIRQLLEDFIRDEPPEEAWKEFCGSFRLRRKDGSAGSRVTCVLMDVGEAVEYADLSKDGSGAWRKAKQGHKGQIVYLDLQGKPRIRPVYAFESVHGVIQEISRRGETVYGFFQSGCLVKIERPIVHTVTPLEPGIYRLNTIKTVGQVKVTDIHGKASLPINISKFIEAQLKPLHALEVMQQSARRKFMLAERRK

SEQ ID NO: 15323 - protein, 1382 aa, unidentified
  REGION 1..1382: note = Cas Enzyme sequence
MKRILGLDLGTASVGWAVVNEAENSEEQSSITALGSRVVLLSADEKNNFLTGKSVSATATRTAKRGARRNLQRYKLRREWLKDALVSAGIINENTCLNDSNSKELFATYVSRAKAVTEQIALEDFAKVLFMINKKRGYKSNRKTDNTESEDGQIIDGLDLAKKLKARNITPGQYLLELFKENKKNKAVFYRSDLQEELNRIWAFQSQFYPEILDNTLLSAITNKSKKAVIGLFKGIKNIEIADVKTKERTEKALTWRSEALHKQLEIGEVAYAIAEVMGAISQSSARLALLSDNSKHLEFEGLTIGQYLLNLLRNNPNSSLKNINFYRKDYEDEFNSIWNKQASFYPQLTESLRSTIFNSIFMQRNLKSCKALLANCELEFAEKRITLPDGSCQTKTIYSKVCPKSSPYFQEFQIWQSLSNIRIIDKENTHLTKSQELSYDQKVMLLPELMILSELKANKIIEILFGKKSNYTINMPSIKGNKTNETIFNALLEIVELTGHSIDNIVKTDANQQIEAVKSIFESLGYKTDFITFDSTIEGKDGLNQPYYKLWHLLYSYCGDNSKTGNEALIRKIEELTGLEKEEAKVLANCTFENDYASLSTKAIRKLLPHLQSNLDYSEACEAAGYNHSKRSRTKEDIKNKVYKDKLDLLPRNSLRNPIVEKILNQMIHVINQTSEAYGKPDEIRIEMAREIKKNKIQREKLANQLRQNTAELERIKDILRKDFKLSHISHNDILRYRLYEELSLNGYKTLYSNTYIERQQILDPTVTIEHIVPKALAFDDSFSNKTLEIQPVNGEKSNQTAFDFISKKYGSEALEQYINRVNNLFENGKISKTKRDNLLRKQEDIPSDFLNRDLRNTEYIAKKALEILEDYVPRVTPTIGEITKTLREDWQLVNIMRELNWEKYNSLGLTSFYYDRNGTKIGLIHNWTKRNDHRHHAMDALTIAFTKPSIIQYLNNLKSQNDKGSSIYAIQAKETYIDETRKRLIKPPYNIKQFRNDAKQMLDNIFVSHKAKNKVVTPNTIVTKKKRKAGKETKVEEKRTFLTPRGALSNETVYRKICNYETKEITINSKLTYEIALTIAKKKEREAVLERLAQHNNNPTTAFKNYNKNPIMLQTSVGEKPLISVKIVNYKELFVKRSEINEKLDIKRVLDAKVRARLTDRLKEYNNDPKAAFANLEENPIWLNEEKGIALKHVTTIERVVGLPIRPKRNINGEIMKDEQGQPLKSHYVATGGNHHVAIYEDEEGKWHEKVVSFNEAASRSIQKLPIIDKDFNKELGWVFQFTMKQNEMFVFPDKEAGFDPLAIDLKDPANKSLISKHLYRIQKISSGDYYFRHHLETNVEENKEVKGITWKRITSLSPLQGIIKVRINHIGQIIDIGEY

SEQ ID NO: 15324 - protein, 1382 aa, unidentified
  REGION 1..1382: note = Cas Enzyme sequence
MKRILGLDLGTASVGWAVVNEAENSEEQSSITALGSRVVLLSADEKNNFLTGKSVSATATRTAKRGARRNLQRYKLRREWLKDALVSAGIINENTCLNDSNSKELFATYVSRAKAVTEQIALEDFAKVLFMINKKRGYKSNRKTDNTESEDGQIIDGLDLAKKLKARNITPGQYLLELFKENKKNKAVFYRSDLQEELNRIWAFQSQFYPEILDNTLLSAITNKSKKAVIGLFKGIKNIEIADVKTKERTEKALTWRSEALHKQLETGEVAYAIAEVMGAISQSSARLALLSDNSKHLEFEGLTIGQYLLKLLRNNPNSSLKNINFYRKDYEDEFNSIWNKQASFYPQLTESLRSTIFNSIFMQRNLKSCKALLANCELEFAEKRITLPDGSCQTKTIYSKVCPKSSPYFQEFQIWQSLSNIRIIDKENTHLTKSQELSYDQKVMLLPELMILSELKANKIIEILFGKKSNYTINMPSIKGNRTNETIFNALLEIVELTGHSIDNIVKTDANQQIEAVKNIFESLGYKTNFITFDSTIEGKDGLNQPYYKLWHLLYSYCGDNSKTGNEALIRKIEELTGLEKEEAKVLANCTFENDYASLSTKAIRKLLPHLQSNLDYSEACEAAGYNHSKRSRTKEDIKNKVYKDKLDLLPRNSLRNPIVEKILNQMIHVINQTSEAYGKPDEIRIEMAREIKKNKIQREKLANQLRQNTAELERIKDILRKDFKLSHISHNDILRYRLYEELSLNGYKTLYSNTYIERQQILDPTVTIEHIVPKALAFDDSFSNKTLEIQPVNGEKSNQTAFDFISKKYGSEALEQYINRVNNLFENGKISKTKRDNLLRKQEDIPSDFLNRDLRNTEYIAKKALEILEDYVPRVTPTIGEITKTLREDWQLVNIMRELNWEKYNSLGLTSFYYDRNGTKIGLIHNWTKRNDHRHHAMDALTIAFTKPSIIQYLNNLKSQNDKGSSIYAIQAKETYIDATRKRLIKPPYDIKQFRNDAKQMLDNIFVSHKAKNKVVTPNTIVTKKKRKAGKETKAEEKRTFLTPRGALSNETVYRKICNYETKEITINSKLTYEIALTIAKKKEREAVLERLAQHNNNPTTAFKNYNKNPIMLQTSVGEKPLISVKIVNYKELFVKRSEINEKLDIKRVLDAKVRARLTDRLKEYNNDPKAAFANLEENPIWLNEEKGIALKHVTTIERVVGLPIRPKRNINGEIMKDEQGQPLKSHYVATGGNHHVAIYEDEEGKWHEKVVSFNEAASRSIQKLPIIDKDFNKELGWVFQFTMKQNEMFVFPDKESGFDPLAIDLKDPANKSLISKHLYRIQKISSGDYYFRHHLETNVEENKEVKGITWKRITSLSPLQGIIKVRINHIGQIIDIGEY

SEQ ID NO: 15325 - protein, 1217 aa, unidentified
  REGION 1..1217: note = Cas Enzyme sequence
MKRILGIDTGTNSLGWAVVERNDNNTYRLIRKGSLIFQEGVKIEKGIESSKAADRTSHRALRKHYFRRRLRKIEVLRVLVKFGWCPKLTDEQLHLWHTKKQYPNSEAFMAWQRTNENLEQNPYYYRHVCLHDKLDLNNEAEAYILGRALYHLAQRRGFLSNRLDASEEDENGTVKTEINKLSQEIEDSGCQYLGDYFYKLYSENGNNVRIRNRYTDREAHYKKEFYAICKTQELSEQQIKALEKALYFQRPLKSQRQGVGKCTFEKGRQRCADSHPAYELFRMLTFLNNVKVKGPHDIEFRPLNNDEYEKALPMFYRKSKANFDFEDIAKAIAGKGNYQYFKDEGEKPYKFNYRMSQGVSGSPTTSRLREIFGEDYAQGIAEVYSKGAGKAPEQMVNDVWNVLYSFSDKNKLMQWGIENLQLNKEQAEKFSKIKLTHNFASLSLCAISKIIPWLEQGLSYSYAVSMAKIPDIVGKAIWEEHKDSITKEIIDLITNFDPKDESMQGTLDYYIKDYLKNNFELKAGATDKLYHPSMIETYPDAKPNANGIYQLGSPRTNAVRNPMAMRSLHQLRKVINELLKEGTIDQNTEVHIEYARQLNDANKRWAIGDWNKSQEKKKKEASDEIKKLYKEATGKDIEPTQDDITKYLLWEEQKHLCIYTNESIGITDFIGSNPSFDIEHTIPRSMGGESVMSNLTLCASWYNRDVKKAKMPSQLNKKDYEAILERISHWKEDIERLRKEKDKLRTHSGMAKDVKDRLIRKRHLKDIELKYWQDKYNCFLLKEAPEGFARRQGAGIGLVGKYAGLYLKTIFHKKDDRTKTNVRTIKGSTTAEFRKMWGIQDEFEKKSRDNHIHHCIDAIVIACIDTGSYNEVARYYQQLEEYERTKDNKPSFPKPWTTFTEDILALKDEMLVVHSTQDNMPKHAKKRVRIAGKKLIAKGDAARGALHNDTYYGAIERDGEIKYVVRRALSSFEKESDLENIVDDAVKDIIKKAVAEKGFKKALSEDIFMNESKGIKIKKVRCYAKSVKKPLNIRKQRDISNKEYKRQYHVQNESNYLLAIYEGEIKGKVKRGYELVKNIEAAEFYKASTSKGDYPSIVPEKDEKGLPLKHLLTIGKHVLLYESSASEIDFKDIHDLSKRLYKITGLSYLPVGKGFGNIVMRHHQEARASSEIKIKNGAYKNNEEYRPSILMLHTQFHALVEGEDFIITPLGDIKPIH
